United States Patent Application Publication US 2006/0134663 A1 - sequence listing, part 125

SEQ ID NO: 413084 - DNA, 394 bp, Homo Sapiens
accaatccccttaaacagggtatataatctcgccctcctttaaatgcccactgcactttgtacctcacttgtaacgatcagaaattatactgaaaagatattaagttgacactggtgggaataatattgtcaaaccagtgacaaattctgtttgaggtaaatctatggttcattgatggcatctctgccactgatctccactgtcacaatccttagaggacataaatcactaactgtcccaggataacaccagggcttttgttttatgaagtcatcagaggttccaagttttaaaattccaggtaagtattctcagaagtctcacataagactgagactgaaacacaagaaccattctgttttacatacaatttcttaaaattagcaaatgctt

SEQ ID NO: 413085 - DNA, 179 bp, Homo Sapiens
tctggacagggagagagtcagggtcaaggtcatggtcatggcaggggcacgtcctccagcttctggtccagcatcttgaggtcgtccaggaagcgggtaggggtgaggatgtgggaggagcctatgatcccctctctcttgtcgttcgggctccttttcttctctcatgctgccctcat

SEQ ID NO: 413086 - DNA, 253 bp, Homo Sapiens
cgccagctgccatcagccggggcgcccagcgcgtgtggccctgcccggcgtggacgtgagccagcctcgactggtgctgccgcggctggcgctgtctgtggggcactactgatatgcgtttgtcgtgtcatttggggacacgccactgacacatatcatccataacaatgcgacagtggacccctaacgcctgcagcccatcattgaaggagacacataccgagtgtggtctaacacacaacacctgatgctt

SEQ ID NO: 413087 - DNA, 444 bp, Homo Sapiens
cctctgtttacatccaacttgctcggctgctgtcctcccacagccgacagagatggaaatcttagagtaaaatatgcaaatcatattaaataaaaacccaaatgaacgaactctgcgctatcttgctcaacgtactaggacaaacttccatattccccctaaacgcccctgaggccatggctgacagaaccacctgctactttcaacacagaaaattcaattttcctttaccttcaaaccgaaaacctttattgagaggcagcatttggcaaagcaggggctaaaagcccagggtaattcaaggctcaaaactcatgtcctcagctctgcacatgtcggaatgggacataactcaccacggtgagacccactggctggtccactgtggcgcacgtcatccacgccaccacctacttacctccagcggagccctggaaacaaaca

SEQ ID NO: 413088 - DNA, 875 bp, Homo Sapiens; identical to SEQ ID NO: 301298

SEQ ID NO: 413089 - DNA, 762 bp, Homo Sapiens; identical to SEQ ID NO: 301300
  misc_feature (65)..(172): n is a, c, g, or t
  misc_feature (197)..(226): n is a, c, g, or t
  misc_feature (253)..(281): n is a, c, g, or t
  misc_feature (299)..(503): n is a, c, g, or t

SEQ ID NO: 413090 - DNA, 629 bp, Homo Sapiens
  misc_feature (75)..(94): n is a, c, g, or t
  misc_feature (113)..(371): n is a, c, g, or t
ccaagtactaagtttcagggttctcttcagcaatcattaattaatacttcagccattaattcagatgcaaataannnnnnnnnnnnnnnnnnnngagatggagtttcactctnnnnnnnnnnnnnnnnnnnnnnnnnnnnnnnnnnnnnnnnnnnnnnnnnnnnnnnnnnnnnnnnnnnnnnnnnnnnnnnnnnnnnnnnnnnnnnnnnnnnnnnnnnnnnnnnnnnnnnnnnnnnnnnnnnnnnnnnnnnnnnnnnnnnnnnnnnnnnnnnnnnnnnnnnnnnnnnnnnnnnnnnnnnnnnnnnnnnnnnnnnnnnnnnnnnnnnnnnnnnnnnnnnnnnnnnnnnnnnnnnnnnnnnnnnnnnnnnnnncagccagatgcaaataattttcttagaaaattatttcaaaagttattttaggcccagaaatcaaggattgttccaaccatgaaaatgggtaagacacctgccttaagcaaatctaacctgctattacttgccaaattttatatattcttttctcttgcctgtatttctaattagtgatttgtttaatgaagaactcttcatgtagagcaattaactgggcctaagaaattttgaagctttccatgacataaagtggtt

SEQ ID NO: 413091 - DNA, 896 bp, Homo Sapiens; identical to SEQ ID NO: 301301
  misc_feature (204)..(213): n is a, c, g, or t
  misc_feature (754)..(754): n is a, c, g, or t
  misc_feature (780)..(780): n is a, c, g, or t
  misc_feature (835)..(835): n is a, c, g, or t

SEQ ID NO: 413092 - DNA, 610 bp, Homo Sapiens
  misc_feature (434)..(434): n is a, c, g, or t
gcggccccatcatacgaagttactgaagttattgcgtaaacattctgttttagtcatccttgaggatcgttttaactccttgatctgtaaaactgtcttaagcatcttaacatgttacatcacagggttttagctcagatttccaaagagccatattttttgatgcatatttccagttgaattccagtgtgaatttccagttgtactttgcattctgattctttgatatttgaacttggccatctgtgggtgctactctcgtaagactaaaaggcacctactaaatacgaacaaggataaccagttctaccaaaaacattaccaaccaaacctcccctgttcttttttcagactttccttttgctttcaacctcttaaactgtaaaggagagatttaatgtttccctattattctgctttgactcacatactanaatgaccacatggcactccattgaatcttttcagttgttcacgaattaaaataatgcccatgtttttacagtttttcgagtagtctcagcaatggatctgtagtttcaggacctgttttttaaaagatcaaggatacttttatgtgtttcagaagtagctgtttttttcattttta

SEQ ID NO: 413093 - DNA, 941 bp, Homo Sapiens; identical to SEQ ID NO: 301303

SEQ ID NO: 413094 - DNA, 1219 bp, Homo Sapiens
  misc_feature (1071)..(1087): n is a, c, g, or t
  misc_feature (1094)..(1094): n is a, c, g, or t
  misc_feature (1106)..(1114): n is a, c, g, or t
aaggcctgggcgagcggaagggtgggagagaggggctaggccggggagggaagcgctggggccggggccggctttccaggagccggcgggagcggggtgcgtaagaggcgggcgaggaagaaccggcgggcaacgggaagggcagaggtggatctctccctcagcgacccgtctcgccgagtgaagggtcgagggtttggggcacaaagggcgcagaacgttttttcctgtgagaggaacattaagactcctgggagggctggggctaacgcctccgagagccccacctggtcagcctagggttagacgtgtacccaggatgctcgtgaggtggctcgctgatggacctggcatatgaggggaaaaggaacgcttcatcgaggctgccacaagccgtgcactgctgcggaatacccaccacactactagcgtggcacggaggtccgctagcaccgctataggtattcgcagcctggccatgtagagacgcaggaagccctaggggacttggagggcaaacacaggcctttgcaagggaaagaagtatcggccttacctgtaattcttggggatgggctcgccctcacaacgaaaactaacgacgcactctcccgggattggaggaccggccctggcctttcgtctcacggtgggctggctaggccgtacctttccccatggtgaagcgcggactggaaacgtataaaccaccggactcggctcctcgatagggcaatgccgcgtgcaaaacttgggtgcagccaatggcgaaccctccggaagaattggcccgaacttccggccccgggttgattgttaccagggtggggaaagggaaaggtggaagaaccccggggggggctttccgaaacggcggttgttccccgggaaacccaggggggttcccggtgccccccgctttttaaagagtgggcatttaaacttgggcctgtgggagaaagggaaaaggctttctctcctttaaggcccactctggtgggaaatagggggcccggggccctacctttgggagatcaacccggggagccccccccgcaaacaaaaatggtnnnnnnnnnnnnnnnnnatctctnggaacaggggannnnnnnnnaaaagaaatagggttgatgggcacacacgaaaaaccccccgcggggggggagggcttggtattatataaggggggagaatctcccctctcaaagaaaaatagtgt

SEQ ID NO: 413095 - DNA, 435 bp, Homo Sapiens; identical to SEQ ID NO: 301304

SEQ ID NO: 413096 - DNA, 1140 bp, Homo Sapiens; identical to SEQ ID NO: 301305

SEQ ID NO: 413097 - DNA, 477 bp, Homo Sapiens; identical to SEQ ID NO: 301306
  misc_feature (314)..(335): n is a, c, g, or t

SEQ ID NO: 413098 - DNA, 976 bp, Homo Sapiens; identical to SEQ ID NO: 301307
  misc_feature (422)..(590): n is a, c, g, or t

SEQ ID NO: 413099 - DNA, 556 bp, Homo Sapiens; identical to SEQ ID NO: 301308
  misc_feature (249)..(249): n is a, c, g, or t
  misc_feature (259)..(259): n is a, c, g, or t
  misc_feature (456)..(512): n is a, c, g, or t

SEQ ID NO: 413100 - DNA, 111 bp, Homo Sapiens; identical to SEQ ID NO: 301309

SEQ ID NO: 413101 - DNA, 932 bp, Homo Sapiens
  misc_feature (348)..(432): n is a, c, g, or t
  misc_feature (819)..(827): n is a, c, g, or t
cggctggaccggtccggattcccgggatgtgtattccctgaccagactgaccctctccctccccattttcctcttcctcccgaccgtctcctaactatgtccaccctctacgactcccctcacacatatgacatccccctcctccgagccctcatatccgctcgctatagggaggatgaggagggtcccggacgatgatgaccccacccacgcatctgtctacctgccccccccgactaacaagtactatacttccccctcccctacagccgttcctgtaacatgggccctgtggtctcttgctatgtgggagtttttaaaaaattttagaatgaaaaatctcaaaannnnnnnnnnnnnnnnnnnnnnnnnnnnnnnnnnnnnnnnnnnnnnnnnnnnnnnnnnnnnnnnnnnnnnnnnnnnnnnnnnnnnataaagaacacctaggtaacccatcctccaccttcgacaattatcagctcctagctaatttgtgtcatctgtaaccccacctgcttctgccctttctgtattattttgaagcaaatcttatcatttatctgtaaatatttcaggactttaaaaaatatgtgtaatctgaataccatttttacacctaagaaaatggacaattccttaatataatgtgttgtctatagatgtcaaaaatttttgcagtttttttggatcaggaacccagtaaggtactgaatattgcagttagctgatacacatcctaaatttcttcaattgttgtggtcctccaaactagagtgtatcagaataactagagccttgttagaacacaaactgctgggnnnnnnnnnaaaactggggatctgtaaatctgctgtgaaaccctgggaatttgcatccccaacaaattccccgggatgctgaaacctccccggcttggggctcccctccccttg

SEQ ID NO: 413102 - DNA, 254 bp, Homo Sapiens
gctccagcaggcgtgcacctagacactcaaagagattcggaagtctgccatgaaggagacgggaactacaaatgtgcgcaccgacacctggctcaccagagctggctggcccaccagattaacgtatgtgccacaccgtatccgcgtgcggctgtcctgaacactgtctgaggatgaagatacaccgtatacgctatatactccgcacacctatgtacctcgtaccactatcaagaatctacagacaggcattg

SEQ ID NO: 413103 - DNA, 376 bp, Homo Sapiens
gagaagacgacagaagggacagagcaagacgcagatgaagacacggatgtggacgcagatgaagaagtggatgcgggaacagattatgcagatgaaacagatgaggtgtctactgttctctcacctttagtgtcctgtgtgctgtaggcatgtgaattctgcgtggttagtttatgtgagagactattatttatttctgggtagagactcttcttggatgcctgctaattgtgttattatgtgctctgaggaatgtgtgattatggtatgacgggtatttgttgcattcctagtgaatgtttattagcactactcatgtgtgtatttttgatctataatcttcgtctgttgttgatgttaatcttgatctgtgtct

SEQ ID NO: 413104 - DNA, 106 bp, Homo Sapiens
tgctgcgccacctgttgccgacaagaaacccgatgctgggtctgggtcatcaacctaactccagtttacaggcagcattgatcatggacgcggtcagccacctcag

SEQ ID NO: 413105 - DNA, 161 bp, Homo Sapiens
gagaagacgacagaagggacactgtatagtgagcaggtttacaagatgcttccgggataagcaggagggaaaaggcagaaatgtccacataaccacagctgcggccaaatcctcagaattatataacagcacgaaacattaaagaggattttaaatctgac

SEQ ID NO: 413106 - DNA, 157 bp, Homo Sapiens
cgacagaaggggacagacttgctggaggaggagatcaccaagtttgatgagctcgttcatagtgtctttttctcagctttccacgagatcttgagcctgagttgtgtgacgtgcgcgcgtgcttgaggctctgccacgatcttatactgggaccggc

SEQ ID NO: 413107 - DNA, 297 bp, Homo Sapiens
actggactcatacaatgcactggtcccatagggagtttcaggcaccatggaagaccgtaatccacaccctctcatcttcaacaacagaatagtaagttgcatctgtgtagaggacaataccagcgctctctggttttggctgcacaaaggcgaggcccaacgatgcccccgctgaggacccatgacaagctggtgccccaccagttggcacactgagcacgttgactatattactcaaaatgtgctcgtaagcttcctcttcccagcaacactagctcagtgcatcgtcgtcttctc

SEQ ID NO: 413108 - DNA, 143 bp, Homo Sapiens
agaagggggtattggggttattttctgggatgaatagcaggtgactaaagcaggccgtttgatattaaatcacataaagagcacaatgatagaagtttagattttaatcaatactgtacagggttctaggtaatttgtacaga

SEQ ID NO: 413109 - DNA, 109 bp, Homo Sapiens
gagtgctgtgccacctgctgccgacaagaaagccgatgctgtggctgggttagccaccgaaatccacaatagaggctgataagggcgaggacgtggtcagccacctcac

SEQ ID NO: 413110 - DNA, 133 bp, Homo Sapiens
agctgacagatatacctacagacggagtgctgtgccagctgaagccgacaagaaagccgtagttggggctgtgtcaacaaccgaattccaatttagatgtagatttggatgtggacgttgacagacacctcag

SEQ ID NO: 413111 - DNA, 208 bp, Homo Sapiens
atgccaaatctgtcaagagcaataaaaataatgacaacgtgaagcataaagaacgatgcagcatatacctttacaccctgcttcattagctgacaaagaggagaggcagaaaagctgaagcagttcttgcctctctgtttggcagagaacgaactgaaatgagccacacacactgattgcaactgacttatattaaaacactaaaaat

SEQ ID NO: 413112 - DNA, 276 bp, Homo Sapiens
gggggcgccgtccatggaaaagccgtaggtggtgaattacgcacctgcattacatgatcatgctacccgagatggagggcatgatggtggatcgtgtacaccggcatgatctatcaaccatgtggagatcaagcaacagatgatcggacagtacctgcgtgagttcttcatcatctacatgcccgaaaagcatggccgggccgacatcgacgacactcactactatcgcttgatgcatgacaaggaatggctcaggtaataaaggcgctcatgact

SEQ ID NO: 413113 - DNA, 108 bp, Homo Sapiens
gaaacaaattgcgaagagacgcagacgagactctgtgcgagcttatacttctaagactgaatccagtcagagataggattcttagagtaacagataatctgatcagac

SEQ ID NO: 413114 - DNA, 132 bp, Homo Sapiens
ctaatcggtggatgcagtgcacccggcgctttgtcaacgatgggcccacctttggccagaagactggccacaatgcctactctcccttcttttgtgccttctgggtgtctataataaaacaagccctcagtt

SEQ ID NO: 413115 - DNA, 229 bp, Homo Sapiens
aagggcaaggattctttgtgtgcccaaagaaggatgcgctaagatcgcatgcagagaggctatggtgggcagaccatgccatttttacagaagaaggctaataccacaaagaagatagcgcgtaacgctggaacgtgttgatcctaactgcctatccaagaagatggtgggcattaatagatgcacgcattccgtactgatatgagataagactagacagggtcaagtg

SEQ ID NO: 413116 - DNA, 151 bp, Homo Sapiens
catgtgtcgtggactttgtactgttaggaagctccttactcaccgacgagaccagaagtggtatgataaacaggataagaatgctcatttgggcacaggcctaaaggacgacccttgtgtaggttgctctcatgcaaaaggaattgagctg

SEQ ID NO: 413117 - DNA, 115 bp, Homo Sapiens
gctaagggactgatgcaagacaaccggcgcttagacaacgccgtgcccacctttgacttgaaaaagggccccgatgccctcttttatgcctttggtggtcccggctttctctaat

SEQ ID NO: 413118 - DNA, 343 bp, Homo Sapiens
ctaaatccatgaagtttgtggatggcctgatgaatccacagcgtagaccgtgttaactactacgcagacactgttgagcgccacgtgttgctcaaacacgttgtgctgtgcatcaacgggatgatcatgctgacctgggacccacttgccaccattgtgcctaagaagcgccgtggcgtgaccacgtgagcattgtggaacccaaagatgatatactgcccaccacccgcatctcataacacaaaggtgagaagccagagcccactgccatgcgacagtcagctcgcacacatacagggctgtcgtgcagactgtgtctgagactgggtagtgtctctaaaga

SEQ ID NO: 413119 - DNA, 140 bp, Homo Sapiens
agatgggctaagcggtggatgcagtacaaccggcgctatgggaacgttgagcccaccttgggcaagaagaagggccccaatgacaactcttaggggtcttgttttctggctttgtgtaatacaaaagccacttagctcag

SEQ ID NO: 413120 - DNA, 109 bp, Homo Sapiens
gagagctgagccacctgaagcctacacgaaagccgaggctggggctgcctcatcaaccaactaacactttagaggcggataaggtcgtggacgaccccagccacctcag

SEQ ID NO: 413121 - DNA, 106 bp, Homo Sapiens
gagtgctgcgccacctggagccgacgcgaaagacgacgctggggctggaccagcgaccgagtcccagttcacaggcggattcggccgtggacggggacagccacct

SEQ ID NO: 413122 - DNA, 121 bp, Homo Sapiens
aacgttatcgtttggaaagctttttaataagacgcacattttttgcctgcgttgtggctgtaatgcctaccatcttctgaattctacctgaggtagatgtgtgtaccctggcgagcgcaag

SEQ ID NO: 413123 - DNA, 125 bp, Homo Sapiens
gccggatgcaccggtaggctcgcatattataagaccacgcgagacctgcctcccaataggaaatatgaatcatgtacagggctgtgccctggtgcgcataaatttgtctgcgcactcaagcaata

SEQ ID NO: 413124 - DNA, 377 bp, Homo Sapiens
gggtggcgagaagaaaaagggccggactgccatcaacgaattggaaacgccaaaatacaccatcaacattacaacgcatcctgggaggagcttaaaaagcgtgcaccgtccacactcaaacaaattctgaaatttgtcatgaaagagatggtaactacaaatgtgcgcatagacaccaggctcaacaaagctgtgtgcaccaaatgaataatgaatgcgacataccgaatccgtgcgcgggtgaacagcacacgtaatgaggatgcagattcatcaggtaaactatattattttggttccatatgtacactggtacacttttagaaatccacagacaggatatgctggtgaaagactattgctgattcgtcgatcaa

SEQ ID NO: 413125 - DNA, 172 bp, Homo Sapiens
gctacagggacaatcacatcattgacatggggacagcgggccagtgcccacctctgaacatgacagagctcgttatcgtgctcaaggtcaccaaggctgccggcaccaataaacacgcactgaattgctgaggctggacatctgcccgattgccacaatgaaatagagctat

SEQ ID NO: 413126 - DNA, 106 bp, Homo Sapiens
gagtgctgtgccacctggagccaacgcgaaagacgaggctggggctgtgctagcgaccgtgttccagtttacaggcggattcggccgtggacgtggacagccacct

SEQ ID NO: 413127 - DNA, 118 bp, Homo Sapiens
ctacagacggattgctgggccacctgttgcctacaagagagctgaggctggtgctgactcacaaacccaattccagcttaaaggtggatttggtcgggtaccccatcagccacctcag

SEQ ID NO: 413128 - DNA, 136 bp, Homo Sapiens
tgaagctgacaaaaatacctacagacggagtgctgagccacctggagccgacccgaaagctcctgctggggctgggtcatcatccgaatcttcttttagaggcggatttggtcgtggacgtggtcagccacctcag

SEQ ID NO: 413129 - DNA, 102 bp, Homo Sapiens
gtactattaaaaccgtttcttaaggtcttaattctcaaatcacttgcagccttccagtgcagttttaaatttcctatgagcatcatttggcttccaaagtgg

SEQ ID NO: 413130 - DNA, 139 bp, Homo Sapiens
gaagcaggatggtctaccttctgctgacctgcaaaggatgaatacacatcatttgacaagcctatatgaaagttattcgttggacgtgcgcttgttcatgttattgcagctaagataaaaagttcaagtaccagcaaat

SEQ ID NO: 413131 - DNA, 120 bp, Homo Sapiens
gcggccgcctactactactttacggttgcaagaaaacaacagaaaaaattggccaattccccaaaggtcctaaaaacccacggcctcttggtttgaccccattaaaaattgttatttccc

SEQ ID NO: 413132 - DNA, 280 bp, Homo Sapiens
aggggatacgtgcatttctagacacacatgaaagctcttaggaacaaaaagaaagctcagtcatgaattcttcctaaaaaattgagataggaaatctaatttcaagaggtgaaagtagatatggagggatgcaggccaacaatttaattttagaagtgaggaaactgtatcccagcgaggggaagtgacttgccccagtatacaaagagatagtaataataagaaagctaaggtcagaactcaggttttctgagtccccgtacagtagtcacttaactcc

SEQ ID NO: 413133 - DNA, 242 bp, Homo Sapiens
  misc_feature (70)..(197): n is a, c, g, or t
cgtgagaaacataagagaagatggcgaattagaagatggtgaaatagacgatgcaggatttgaagaaatnnnnnnnnnnnnnnnnnnnnnnnnnnnnnnnnnnnnnnnnnnnnnnnnnnnnnnnnnnnnnnnnnnnnnnnnnnnnnnnnnnnnnnnnnnnnnnnnnnnnnnnnnnnnnnnnnnnnnnnnnnnnnnnnaagatggcgaattagaagatggtgaaatagacgatgcaggatttg

SEQ ID NO: 413134 - DNA, 148 bp, Homo Sapiens
cgaagcccccctgcaaacttggactaatcgaaagggcaaacccctggccctgaaaaacccaagacctaaaatggggccgacaatgggcggtgccaaaatggaggcccttgaggagagcattaccctccagttgccacagctttggaaa

SEQ ID NO: 413135 - DNA, 205 bp, Homo Sapiens
cctgcttgcggaattccaggtatgggtctgactatccagacagatccttattatacacttttctgggggccatttgatacaagagcactctataatctcttattacttcagctgaaatcgaaatgctccgctctgctgcaagtactgcagttatcatcacctgtggtcaagttagcttctcggtggaaacagatcagccaagggt

SEQ ID NO: 413136 - DNA, 169 bp, Homo Sapiens
cgcggctaggcgcaggccatgctcggccagagcaccggggagctgcagattcgcctcgcctcccacctgcacaagctgcataagcagctcctccgcaacgccgatgacctgcagaaccgcctgacactataccatgccagagcccgcgaggtccccgaacgcggcctca

SEQ ID NO: 413137 - DNA, 202 bp, Homo Sapiens
cttgcagccccatcattgcatcacctgccttacagcttttgactgccactctcatgtaaggatccaaagcgaggaactaagctggaagcctgaccggttgatttccaaagggtgggagcttacatgactgaaacccaaagtcgctattagcaggatcgtcaacagggggctaattcagggctcatgactgacctcgaaccat

SEQ ID NO: 413138 - DNA, 476 bp, Homo Sapiens
ctttaaacaaatttttattgcacattggatggcacataattggatacttatatactttgcacacaattattctaactgtacacagaaaggctgcttaacttttcatctgggggtggctagcactgccattctgattataacagaatagttttaaaaatgcctcagggatcttaagttgaaagcattacactggtacatgggtcttgtacccagctatcgggatgtacagatgatttttattccaaaatacttaataaatcatctgtaggcatggacactgacagcagtagaccattatatattttagaacctgaaaccatttactagtggatcttgtgagtctcatccaaccgttctcttaagtttctccaactgacttctctgaagctattgctgaagaacactgccttgggctaactgtcccagctcatttttaaaggttaaacacgtaggctaagagtttgaacatagcccct

SEQ ID NO: 413139 - DNA, 435 bp, Homo Sapiens
  misc_feature (180)..(195): n is a, c, g, or t
  misc_feature (338)..(338): n is a, c, g, or t
agcgagagaaaattaagttttatttaggaaagaaaagctttaacaaaaagacctggaaagagatcccatttggggcgacagctacctggacaatactctgttcttaggatgtggccgtctggtcctctccctttcttcttgctatgctccaaagagcaaatgtttggcatttaggagtcnnnnnnnnnnnnnnnncttgaaaagacatacatcaatgattttaccatcgctttgaaaactaatcttctaaggccagagaagaaatacttctaaacaaaacgccaggcatgtccatcaagtgatccttttttcagtccagtaatgatgcctgatacagngttcacaggatcatcttttgttttcttaaattgaaatggcctttaaagctgaaaacctgtgcccttggcaagacgtttggggactgttccagagata

SEQ ID NO: 413140 - DNA, 109 bp, Homo Sapiens
gtgctaacataatagtatggtccagcgctgctgcatgaaggtaaggattcgcaagcaggattttatactgcgaggtttctactactctatactggaataaaaacattac

SEQ ID NO: 413141 - DNA, 183 bp, Homo Sapiens
cctccatgttccacaccgcctgcttcatgtgattgccgtccacctaagtgtctgacacatacctttctacgacggggggcacgttcccttagcggaactcgaccttactgaacacgatcagaggcacctattgccacacgcgccgtctcccaccaccaccatcttcttgcggatggccgccat

SEQ ID NO: 413142 - DNA, 204 bp, Homo Sapiens
cttttaaaggcaaaattgaaaggtaatttatttaaagtggacacatacaaataacgtaggaataggggtgcttgctactgaaggttctggggatagactaaatttattgctatggttcacatttactcacaagtaggagtaaatttaatgcaacccaggttacagaaggcaagcaggtaaaaggataaagaacataaaacaact

SEQ ID NO: 413143 - DNA, 233 bp, Homo Sapiens
agctgtatatttatacctgctcatgggtgaatctacaagctgacttaaacttacacagagagctcatgcttactaaataccgaagctggcaacacaagaaccacttgccccatggaaagctcacacggttcacagcagactgacctattaaagcgtattaagataatgcaatgaatttgaaaacagcgggcattacagtattcatctcatgataaatgtcaggactcaaggca

SEQ ID NO: 413144 - DNA, 112 bp, Homo Sapiens
tcataacggtctggccctgcaaaagtgcctgtacgctaatgctacccactctctctctgttaataccatctttgtggagccaaatgttctcggggagttcgcttatgacata

SEQ ID NO: 413145 - DNA, 480 bp, Homo Sapiens
cgcgggtaggtgcagaccatgctcagtcagagcagcaacgagctgcgggtgcgcctcgcctcacacctgctcaagctcgctcagcgggtgctccacgatgccgatgacctgcagaagcgactggcagtgtaccaggtctgcgcccgcgagggcgcctagcgcgggctgagggccatccgcgagcgcctgggacccttgctgaaacacggccacgtgcagtccgacactgtggactccctggccattcagtcgttacacgagcgcataccacgcctggtgcgagcgtgtgcgcgctctgatggaggacatgagcaccacggacccgagaccgcctggactaggtgaaggatcacgtggctgacgagcgcgccaagctggatgagcatgcctagcagatactcactcgatgccgaggtcttccaagcccgcctcaagagcatgttcaaacccctgatggaagacatgcagcgccagtgggcc

SEQ ID NO: 413146 - DNA, 118 bp, Homo Sapiens
acttattgaaaagggaaaggaaaccgcaacatgcattctctggctacgatatcatggaagtacacgcaacagctatggctaaataaaaccgacgcttatattgtcatatcacagtctc

SEQ ID NO: 413147 - DNA, 157 bp, Homo Sapiens
gatagtgtgaacacgcctggaacatgggctgaaacaggtccgcactgccgaccaagactgggaccactttgcgagtgctcgtcctgatgcttcacattaccacggatctatcggttatacttctcctctgactgaccgacacattcaagcatttgtt

SEQ ID NO: 413148 - DNA, 184 bp, Homo Sapiens
ccacacacaacccataaacaagatcaagacaatgaacctgagccaaattttgcactgaaatgacaaaacaaatcttgccacgggctctgctgaatttgcatgaagacccaaatatctctctgacttgatcggcagctgtttgctcaaaggcagtaagtacagaggctgcaatagtgactataag

SEQ ID NO: 413149 - DNA, 429 bp, Homo Sapiens
ttttttttacttgttaactttcccaaaggagttttatgacaaggtaatgtgaatgaaatagatacaccaccctacttgaatcaaagagtatatcaaggcccaccacaggcatgttttgtctcaagtgctacagagctgctctaccccactgccttctcaccaatgccaatctctcctccctcctaacacagtcaggccccaacttaggtgcaagcaataaaggatactgctgtcatccatccactgtctaatccataaactgagttctttcactccttctcttcattttcataatgtaatacataattaaaactactatcctcacactagaaattacacttcctcactttgtttggaatctactaccctacctagtaaaacaactgttctggagtattataaaatcaagacattctgatatgggtaagc

SEQ ID NO: 413150 - DNA, 141 bp, Homo Sapiens
ggtcaaaaatatcttattggactatgcaaaacaccagtaaatactgtttcgtaagaagagtttcagctccaaatgagagcggtcgggcttgtcatcatttaataacccccttatcaccgacaacctaaagaaccaaagctt

SEQ ID NO: 413151 - DNA, 153 bp, Homo Sapiens
atttattcctcaatgatggtgatgaatggtcttatctcctcctgcaggccccttgttcagcttgatgttttctgcttcctctcggttcctccagttctgccgtggtttccctacttacaaattggacttcttgttctctgtgtgttctgaaac

SEQ ID NO: 413152 - DNA, 121 bp, Homo Sapiens
ttaattattattttcattttatacccatatttcacattttctatattaaaatataatcattcgtattcccccaacccccatccctcatataaaaaatttattaactttacacaacattaaa

SEQ ID NO: 413153 - DNA, 141 bp, Homo Sapiens
aaaacaaaaccgggggcggcggaaccgggtttttggaaacccctaaagggacccaaaaacccccaaaaaaatttgccccgggaaagaccggcaaactccccaaaccaaggtttttccaaagccgggggcctaacctggggg

SEQ ID NO: 413154 - DNA, 132 bp, Homo Sapiens
aattttaacaacaagggagcaaccacatgtagggggtgggggtaaggttgggggagaccacccttccttgctaatggctggtattctaactcaaaagccagagggtgttatgggaggtatgcaggatcatgc

SEQ ID NO: 413155 - DNA, 380 bp, Homo Sapiens
tggcatgcgcaagtactgtatttcagcacatgctgttgttagtacaatcattcccctcaatgttgattttaatgaaatcacatcctccaggccaccaatatcttgacctggggccttgcaacggcacagcctccctctgccagagtcaagtagggagggatgacattcctggagccggcagtctctctggaggtgcagggagcggggaggtggcccccatgcttcctgatagctatttaggtccctggtgacacctcctccaccagactgtgggcttcagggagcaggactgacacagggctcatttgtcctcccaccaccaccaggcgcagacattctcagagtaaagggctcatcacctacttcctgggggagtgact

SEQ ID NO: 413156 - DNA, 120 bp, Homo Sapiens
tggagaataagcaggcgctgcctccattccagtctcacatcacacacgactgcgggctgtacaagtctgacacacagttcaccaccgagcccgcgcagctgaccccagacgatgagtgat

SEQ ID NO: 413157 - DNA, 505 bp, Homo Sapiens
  misc_feature (252)..(279): n is a, c, g, or t
actacaggcattggcagctataatttctctttatcactgtatagctacatttcataagttttggtgaattgggtcttatttagactcttctgaaagtgttgtctaatttttctcatgatttcttctttgactcattgcttattttaaaatgtgcaagttacttttcttaggtgttatttttttagagcacttttagttttgtagcaaaattgcgaggaaggtacagagatttcccatataccccctgctgtnnnnnnnnnnnnnnnnnnnnnnnnnnnnatcttccttattatcaacattacccaacagtatggtacgtttgttacaattgataaacctacattgatgcattatggtcacccaaagtccttagtttacatcaaggttcactcttggtgttgaacatactttgggttgggataaatatataatgcaatgtatccaccatcataatatcatacagagtattttcactattctgaaaatcctctgttctgcctctctg

SEQ ID NO: 413158 - DNA, 118 bp, Homo Sapiens
  misc_feature (22)..(22): n is a, c, g, or t
gcttcagcttcttaattctgtngagggcactgtcagtgcagaaccatctcatgtgcgtttcgttgaatagtgtgtttacgaggattgactcatgatagccgttgcagtgctagatgat

SEQ ID NO: 413159 - DNA, 384 bp, Homo Sapiens
atccgacgagcaagatgcgggcgcatgccgtctagctgcacgttgggagcgtggtccaggatttctttgtgggattctctctggtgatccaggtaatgagttctcattgaagtcacccaaatgtgaggtcatttatgtcagtggccagattgtgtagttcaatgagtgcacagattcacatcttgggtccaatgtacatggcactgcagggcatattagccgcgggcccagtcagcaaagactggcttctggtaatctcgcaggaagattcgggcagcacgggtggtactgctgcactcaccagtatcacggcatgatcccctccgcattgagattggtggagacaagctatggctacagtctggtagagccacacatctgcgg

SEQ ID NO: 413160 - DNA, 181 bp, Homo Sapiens
aaggcagccttagttttctttttactggttaaagagggggggctctgttacccaggctggatgggatgcagtatcgggatatagctcaccgcagccccaacttccttgggcttaagcgaacctcccaccttacccttccaagtaggtagggttacaggggggggccaccacactcggctaa

SEQ ID NO: 413161 - DNA, 103 bp, Homo Sapiens
atgatgcaagggcttcactcgtgaagccaaacccacctctccgggggatacgttggccagctgggacatattcagtcataggagcaccttcaccaggtaacag

SEQ ID NO: 413162 - DNA, 205 bp, Homo Sapiens
gaccgccccccagaccaaaaatgggccagaaatcgaaaagctccagggcaacaaaggagcctctatttgcaccatatatttgtggtccctaaaaaataacaccatgggcgggaagatagagaccccaggctaacgtaggtgatcacactaggactttaggatgcccattagaaaacaagagttaaactaaacttctggcctgccg

SEQ ID NO: 413163 - DNA, 502 bp, Homo Sapiens
acaacagcgcgcattttctcttcctcatcttcgcgtgaggctgtgagaggactgctcggatcagttcgtcaaacactttattgaggtctcgctagtgtgatcgccgagcactccaggtattttgcagtagcagtctacttatccgttgctagaccctgcggatagtagatgggagtcagcatcttctccttaagtttctcggtcgtgtctttagcatcactgagatcgagttcagctaccactaggactagttgagtgattaggacactggtgtcgcactcaggataacaatttgcaccgacatttttaaatgatgcaggactctctacggcaaagcaaatttagacacatctgttttcggataggatatggggcgtgatctgtcataatcttctttgtcgagctgtatcccataatcccagaatcaccggttttcgttctagcatgaagttgtcagagataattgccaaggacggtaggggcttaatcctccgcgaaatgc

SEQ ID NO: 413164 - DNA, 112 bp, Homo Sapiens
ttttttcctattgtaacctctttataaaaaaacaattaaaacatttcaacatttcaaaagcaaaatctgggtaaattaggaatattcacagcttcataaaaaagagtaagag

SEQ ID NO: 413165 - DNA, 491 bp, Homo Sapiens
taaccacacaatttgttcaagggtatgttcttgtacaagattcaaggggtgcagaagtaaaacatggaaattcgccctccccagagctcacctctgtggccagcggggtgcagacttccagccctctgcgtgctcatggtcgtaacatgtgcacctaaacacacgtgtttgtgaaacattgtcctgccgtggggaacgcaatgggcacttccagggcgctgtgccctgccaggctggaatcttgggcccctcttgttcacatacagatacacccctgatgcctgatgtccagtgaggaaccaaggctgcggggaagggtggccccaccttcactcttgttatcaggcctcagacacactaggaggatggaggcgagttctctcagctgcccatcccactgaggggtgcccggccgtcagtgtcttgtctgcacttacgtcccagaacctctagagcttgcccccaggggggcactgctgggagggtgcgag

SEQ ID NO: 413166 - DNA, 115 bp, Homo Sapiens
gcactatatacattctgtccactgacgatactgtcagctggccatgcattttattgcacatataaacagtgtacaaggatcttgaagacgtcttagccatagaaggactgcattt

SEQ ID NO: 413167 - DNA, 133 bp, Homo Sapiens
actaaaacaatactctatgaccgattgttttaggatggacaagttttgtacagatctgtctatagtacattactaatttacttaccaaactttatgctgagacttgcggatctaaaaaagtgaagaatgaaac

SEQ ID NO: 413168 - DNA, 143 bp, Homo Sapiens
ggggggaaaagcacttggttatttttaaaaaagggcccccccaaataaaaaacgggccgggacaacccaggggtcctagggatggacaggccctttgaggggtggggttacaaacaaccccatagggggggccccccaccccc

SEQ ID NO: 413169 - DNA, 415 bp, Homo Sapiens
tatcatatgaacacactggtggtggaggatgcacagccggtggcggccctatgtgtggtcatccgctctgaggctttacttggcggctgactcatattgattttgctgcttctggtcccccgacctgcgcccccgagtcctgggtgactgacatggagatcatctgctttactgcgtggatacctggcgcatggaggcctacactgtcatgtgtgccctcaggggactgggaggaggaaccttgcgtggtgtccacaccggttgcgcttcgtgtatttccgcgtgtagcaccgttagatgtctgcttgctggacctggcgtttcttacgctagcggttgatctgcaccactctatccttgcgtttgaccgtaatgtcgtccggggcgtaaagcatgacatctatgacacgctcca

SEQ ID NO: 413170 - DNA, 189 bp, Homo Sapiens
gacgctcgtatccctcgctcttatcctcggccagttcgcggtggaagtggctcacgccttccatagccacatcatcttggtcggaatagaagccccaagagaggcaggtgtcagacgcctgctggtccatattgaccagcctgctgaccggtgcctgcacgtcagtggcctaattctgaccaatctggg

SEQ ID NO: 413171 - DNA, 698 bp, Homo Sapiens
  misc_feature (233)..(245): n is a, c, g, or t
  misc_feature (272)..(282): n is a, c, g, or t
  misc_feature (438)..(438): n is a, c, g, or t
  misc_feature (630)..(630): n is a, c, g, or t
gggatcccaaaggccccttttattaaaaaaaatggcccttaaaatttaaaattccccaagccctgggaattttcctgggttcccaggtttgttgggggaccggggggcatccacccctttgggcagccgggcagggggcgggttggggcaaaacaacaggcccaaagcaggagcttaggggcatcccccacacctccccctgagcccccctttttcgggggctggaaacaaannnnnnnnnnnnnttaatactacccccatgccggcaacannnnnnnnnnncaaaccttacatttttattaacacagagcacccctccagggccccaccccacagggggatttagggaaaaagctttcctaaaccctttgggggccaaacccccggcccaggagggggaaacaagcaatgcgggggtttggaatggttagggcccanttccaggggacacatgcaacccccaggcccgcacacagttgttggccgaacacaggttttgtttccttggggaaccagcctccctttggagagactaacccacttcgcccggtttaacccagttgaagagaaagtggttttcctttaaaagggaaaccacaaatgtcccagccccttgggtcgggggttgtnggggaaattggaaccggggcaccccttggaaaggaccctgtggggcgccccgggccaccccccagaca

SEQ ID NO: 413172 - DNA, 154 bp, Homo Sapiens
aaagcaagaaaggaaactttgtcctctgataaagaatcttgggcactgcctaaagtgaaagcgcatgcggttgaacatgggggactttttcaaaagaagactactactttcagcagtgagaaaattacttttgggttgggtaaagcaacaaggc

SEQ ID NO: 413173 - DNA, 557 bp, Homo Sapiens
  misc_feature (415)..(423): n is a, c, g, or t
ttttttttaacattacagaagacctaaaaccttatatttgatgaaggttctaagtacaaggatcaaactataatcgtgtcatttcttcaatactttcagtactgctccccgaccaggatttagtttgccaaattacgacatcattttcaaagtgctactaatcaacagagagggcaatgaatgaattcacccatatacatctgtcaggctattgagcgataaagcatggtattgagacatgtgtgttcttaccatctgcacacattacagcaatgcactgcacacatatatgtctgaacctaatgttacacgtgaaaaagaaaagcattcatgccaaccctcagtacaattcacatcacatcagttctacaattggtggctttatgttactctacatatacctatatgtcccgannnnnnnnncttgtgaaaaatgattaagacacagaatcagatatactctttaggagattagcttcaatcttatgctaacaaaatcgcagtcaccctcaaatggagttatggcaagcaaatttgctttctcagaactcataatt

SEQ ID NO: 413174 - DNA, 364 bp, Homo Sapiens
aaggagcctccccggccaaatgctactggccaaaccgtattatccgatccaaccccctcgccctaaaagggcggaaaaaaccctgtacaggccaaatggccccaatacccaaaacacaaatcttatggccacatatctgcatgctgacctcccacagggaatgcatttgggccggcccggcataccccctcacaaaacgtgccataaccttgttcatccagtccacaccctcaccgcaaggggcacactggccacaattatctatctaaaaaaactcaaagaggcgggcgatgggtttcacaaagtgcagtgagcgggccatgacaatgaccacatgtgtgcccaaccctgagtgtgcctgcac

SEQ ID NO: 413175 - DNA, 191 bp, Homo Sapiens
tacatgcactccaatggcacagcaagaggggcggagaccccctaaacacacaagagagccttcatgcgagacatccctctccttgatataataatgcatacacttcacaatgattacactatcattacatctacccctttctgcttctacacagaaggcggttatggaaagctctgccgccagcatcgaca

SEQ ID NO: 413176 - DNA, 135 bp, Homo Sapiens
ggggctcccctttttttatggggccccttggaaaaggcacccagggctaaaaggtcccccggtaaaaaattatttaaaaaccgaccaggacaaagggcccgggccggggccccaaaccaaaaacaaaaaggaaac

SEQ ID NO: 413177 - DNA, 240 bp, Homo Sapiens
aaggaggtgtcttctaaactcactccctgggaagggagaaggcttgttttgttaatccatgccctatggtggggtgagtaaactgctcgtccaaatacgttccacttttaattaattgggctgagggctttaattaattatgggggtcccttcttagaccaactcgtactgacaaagtgcatgcgctgaatgtgtaaccgagtcgttgacacacggcggtatttcattgttccagcccag

SEQ ID NO: 413178 - DNA, 506 bp, Homo Sapiens
gccatatataaaactgtttatttctattgaatttatatttacaaacgtggaaaaagatacagatgagaagatccaggagaagtggggagagggacaggaaggatgcatttgaattaggtcatgagcatctcagggcaggcaccctgtcttttagactttgcatacccaacaaatggcacagatgtgcacatactatatacacttaagcagttgttgagtgaattgatggtttagaaggacagacaaggaaccttaaaattggggatcagtattatggtgcagtggaaagaaccttggcccgtgagttgggaaaattaaattattggcctacctctggcctagaactcactcttttgcactacactttatccatacaatgaggagataaaaacaaaatgagctctaagatctcttccaactctgacattccaggacttcaggataagataggtgttaagtgcttataattgttttacttaggagtttgagatttctggtctagattg

SEQ ID NO: 413179 - DNA, 178 bp, Homo Sapiens
cagacaactgctaggtggctgagacccattcgattcacagtataagccgcggacagatagatgcgtactggacttcaaatatttttacccattcacttgctcgctctattggctaatacgcgcattgactactcctggacatagataggtcgtgcgtgcctatcagtgatatgaacac

SEQ ID NO: 413180 - DNA, 247 bp, Homo Sapiens
ctgtgcacaaaactgcgacaccccgatggtagaggctgtgaggatcctcctttgtaacacttgcgatatccacggcgaagatgatgtctgcacgggtgaagttcatggaaacaggtaaggataccacactggacttcttttaggagttcgtttgcttgacccaccgcacattggtcaggggaatggcggaagagatggcattgcacatggacacgccgtttgatattgactgggcccctggcaggtt

SEQ ID NO: 413181 - DNA, 380 bp, Homo Sapiens
gagcccttttttcctttgagcctgagcttgcactctcttatatatcctagctctcttcatcttcctcctcctgttcctgataggaactttcactggtactttactaactgaaggactctgaagacaattcagccaagccagggggcatggtagcagagactggaaaaggccctgactctagaggttcatctggcatgtctgattaacgaagctaagatacatacggtagctttcgtgccattgccacaacatacctgatctgagggaaagaacttatagtaggtggagaacataagcaggacattaacagtgaacgcctgtgcatgccgggaatcacggatgtccatattccgtttgacagtgctgacgtgcatggagtg

SEQ ID NO: 413182 - DNA, 378 bp, Homo Sapiens
ttaagaaaaagagattttaattgactcatagttccgcatggctggggaggcatcaggaaacttaaaattatggtggaaggggaagcaaggcatgtcttacagggtggcaggcgagagagagcacaaagggtgaagttttaaaccatcagatctctgagaactctatcacgagaacagcatggaggaaaccacccccatgatccagtcacctctcaccaggtccctccctccacacgtggggattacaatttgagatgagatttgggtggggcacagggccaaatcatatcacctattaaggagcttgttttttgtgacagggacttgttctgtcacccaggctggagtgcagtgtgtgttcacagctcactgcaacct

SEQ ID NO: 413183 - DNA, 205 bp, Homo Sapiens
  misc_feature (81)..(89): n is a, c, g, or t
cggaaaacacggggggacccaaaataaagcttcctgaatggccgttataaccccttgacctgaattttccccttggatttnnnnnnnnnacccaccctttttgtaaagggtgggcctaaacctcctaacttcctaaaaggcatttggcctttccaggggaaagcccctttggccaatgatcaggagtttttttcctcccccaaat

SEQ ID NO: 413184 - DNA, 229 bp, Homo Sapiens
ttcaatttattgctcaaccctggtacttgaggcaagcctggacctttatcaactaccaaagaagaggctgcaggcatttttggacacatcctgagcgaaaggggaacctgtcttggtgaggaaccaaaacaagacaacaggggttgagaaccatgaccccaaaagaaatcatggcccacttctcgcacggggtgaggaggggaacctagagacctataatggctatagc

SEQ ID NO: 413185 - DNA, 169 bp, Homo Sapiens
cagtttctggtggcttttcaccttttccacattcaaaccggacaaaggtttctaccgacaccccctgaggtttgacatactgccccaagggtatggggggatccaccaaatacggttgggacagaaacttaatctttgcctttcccccaggcttatagtgaaaggagcc

SEQ ID NO: 413186 - DNA, 344 bp, Homo Sapiens
agggcttttccaggaccaaggcccttaggcagggctggaccctggggatgggtgaagggagtcaacctcttctcccacgatgatcgaacggggctttaacacccctaaaaacaagttgaggtcccactagaaggaggggatgtgcgggacactggtgccttacttcaggatgacactttgcacggccatttttaaatgtggcagggctccccagggtaaagcaaaataaaaacccatttggccgcggataggataagggggggaaggtggcataatcttctgggccacctgtttcccataagcccaaattcaccgggtttacctataccctaacattcgctgaa

SEQ ID NO: 413187 - DNA, 272 bp, Homo Sapiens
  misc_feature (46)..(54): n is a, c, g, or t
aaagaaaaaggaacccacggggccaaccaaacgcggaaaaactatnnnnnnnnnagaggggcccttcacagggcaaaaaggaggaaaagggctaccttcaaacaaaagagccccatggcctccggaagggaaaagcccaaaagggggtaggaaaaaagctgttgtttcaaaaaagggtccccggtttacccagtgagagggctccaaaacacgtttcgaatcccagtcccataaccagtcgccccatcggtggcagtccaagctcaaaggaa

SEQ ID NO: 413188 - DNA, 228 bp, Homo Sapiens
ataagagtagaggggaggcctctttagatcagttttatattacttgttctgcttcacaaggagatcatggtgctgtgactctgggtattttcttaatagcatgacaaagaagacttgctcctccttccatacaattcacccacttgaagtgtaccattcagtggtgtttagtatgttcacagagatgtgtaagaacaccacaatcaattctagatcatgttcatcacc

SEQ ID NO: 413189 - DNA, 318 bp, Homo Sapiens
  misc_feature (54)..(62): n is a, c, g, or t
ttgatagaatcctgagcccaacaatctttcactttccccttaacgcctattagnnnnnnnnncagcagctcaaatgtttcctgaccttcaggctcatcaaggtttgggggctatgatgaattgagaagcctttccccaaacattagggacagaagcccacactccattctagctgagagttgccagatcggggaataggccaggtactgagaaagtttttttgtaacaagatggaaatctagacgtgtgcacgcctgtgtgcctgtgtaacatcttaaattttaaacattgtcaactgattcactttttaaagatcgg

SEQ ID NO: 413190 - DNA, 160 bp, Homo Sapiens
ccgttaccgcccgtacccaaaaaaaggggcgggtcccgttaaccccccacaaaaacaagggcccataacccaaatggcgctccaccctgacactacccaccgcaaacgcggccgcgaccacccccaccactaaaacggcacaacagggcccacacagaac

SEQ ID NO: 413191 - DNA, 203 bp, Homo Sapiens
aactcagaacaggttattctttccaaattagggggcacaaaggcttattctattttggtgaagaaagggggaatctaaggtaagcaagggatgcctgtggctaagcctaacatgcggcgagactaagctggagttgggacctagacagtagtctgctaacatccatcctcactttgcctgacacgccgcctatctagaaggta

SEQ ID NO: 413192 - DNA, 103 bp, Homo Sapiens
aaaccaaacaggaaaaatccccccttttttttgggaaaaaaaggtaacttttcatcccaccaaacaaaacaagatttaggggaaatttcttaaccctttcccc

SEQ ID NO: 413193 - DNA, 358 bp, Homo Sapiens
gcggggcactctcatcggtcggcggctgccccaaagggccgttccgttttgattatggagaccctgcgtgaaaggtgtaccgaggagggtctgtggaggcgtcgtaggtcttcagaggtttgctctgagccgtatgggccctgctgctggccagtctgaggcgctccccgcaggcccgtatcatgatctgagctattattggtctgaggctacccttattcttgccattgatgcttatcacttagctacccacgggcactcttgcctgcgccaaatagtccctagaagtgagccgggaaatgcagagatgcacattgaagaccatgaccacttgcagtcggaagccgcgggtgctggg

SEQ ID NO: 413194 - DNA, 252 bp, Homo Sapiens
  misc_feature (118)..(126): n is a, c, g, or t
  misc_feature (188)..(203): n is a, c, g, or t
aaacttcaaaacaaaaattttattacatttaaagggggaccccttggggggaaaaaggagggatttctttattaagaaaaaaacccaaactaaatcctggggcggattggatttcggnnnnnnnnngacaaaaggaccctgggcccccttccccattccagctaaggggacttaaaattacaaaaaannnnnnnnnnnnnnnnaaagaggggcccaaagtcaaaaaccccccagggcaacttaaaacaaaca

SEQ ID NO: 413195 - DNA, 279 bp, Homo Sapiens
  misc_feature (51)..(91): n is a, c, g, or t
cccccttcttggtaaaacccccaaaggtgggaaaaaaacgggcccccccannnnnnnnnnnnnnnnnnnnnnnnnnnnnnnnnnnnnnnnnggatttggggggacccattttgggggggttttaaaataatttttaaatttttattctataaacatttgctgaaaagggaaaacaaaaatgctgcccccagccacaggggtccggccaaacggagggatccattttttcctttcacccccccaggtttaaaaaggactagggtggcattggggaccccc

SEQ ID NO: 413196 - DNA, 248 bp, Homo Sapiens
ggggtggaggattcatattggcattttacttatttacagaatcaaaaaaccaacccatacccccttttcaaaaaggggggaagggctttgcaaccttttccctaaaacctgggcccaaaccccagtcctggaccactggatccacccaaaaggaaagggggccaaccaaaaattttcctgactttggaacttacaaacccaaaaaaatagagggggaaagggaaatttttggcccccggactaaaggg

SEQ ID NO: 413197 - DNA, 106 bp, Homo Sapiens
atataataaatgatagcttttatttaataacacccaaaattaataccgggggaattctattaaatcattcactccactttaggcttaaaaaatattttttggagga

SEQ ID NO: 413198 - DNA, 174 bp, Homo Sapiens
  misc_feature (72)..(83): n is a, c, g, or t
tggggggagggagggacaagggcccagggccccccctcttaccctgggccctggaaaaggcagttttttgannnnnnnnnnnnaagagttaaaccgcccccccctggtccagggttacaaaagggggaaagggaccccagggttggggccctggcccccccatgacaaagggga

SEQ ID NO: 413199 - DNA, 314 bp, Homo Sapiens
ctttaaaaagttctccaaacaggaggggttgggcctgggcccggcttattttaaaaatcctttccccttcgttcccataaagcgggcccacccttgtaacgggaaagggcccaaaaggcggggctttaaccctttaccccgaaaaccaaaattctaaaattttctagtttttcccctttccggaaaatccccttttcaacggggggctttggggtcaaaacccctttttttgaaccaaagttcaggataccttctttgggcccgggcccatggggggggccaaccatttcccggattttttgctggggaaaccg

SEQ ID NO: 413200 - DNA, 150 bp, Homo Sapiens
gggccagggggtccccaaattttgaaaaaatttcggggggggtccctgaatgactgaaattcaggaaacccggggggttaacaaaaaacccctttccttattaaaagctttttggggggggaaaaacaaccccccaatcaaatcaccttt

SEQ ID NO: 413201 - DNA, 163 bp, Homo Sapiens
aaaggtaaagggtttttaaaagcaaacttacgggaaccgcccaaaaaacaaacaacattaaaaacatgtccttgcttgggggacaacccagttaaaaaagtttagggaagggggggaatctactgtatgaaaaaaaggccccaaaccccatttagttgccctc

SEQ ID NO: 413202 - DNA, 393 bp, Homo Sapiens
  misc_feature (298)..(324): n is a, c, g, or t
cttttaattgcccatttgggttttgggttttctggggggggaaaaacctcctcatttccaatcccagttttttgggtacaatctggggttggggtctggctgccggcaaggggtaaaggggggtgcaggactgccccccgattttgcccccaccttttcagggcggggagctcaaaccatggtagtacttgccctgtttcagggcctccttgaacccctcacacagggacaggtcattttgagggggggaacagtccaggaactgcctgattttataggcccagggccccatttgcannnnnnnnnnnnnnnnnnnnnnnnnnnccttctggacaccaggctgggagggcgtccaatcggcccgaggttttttaaagtcaccaaagccgccgg

SEQ ID NO: 413203 - DNA, 313 bp, Homo Sapiens
ggcacgaggatgatgataattttaaatgtacgatcattaagttgtatgcctcagtactataacaggtgaatctctgtaatattgactaaacagttaaaagatattttgtaaatttcaggtccatcgcatcaatgcatgaaatattagaaaaccaaattccaaagaatcaggaatttccatttccacccaaagtatactttattatcttctagcagtcgcctgtttatataaaagcatcggaatctcagctacttatataattgtctccttttattggaaagttacacttagagattaataatatgtacagaga

SEQ ID NO: 413204 - DNA, 228 bp, Homo Sapiens
  misc_feature (75)..(110): n is a, c, g, or t
ccaaaaaaggttttttgccccccctggtttaatcagactggtattcggggagcaattcaaaacgggcctttcccnnnnnnnnnnnnnnnnnnnnnnnnnnnnnnnnnnnncccttacccggccccggaataatgacttttaaagccttggttttccccttagacaaattatgccctttttgttttctcaccttttctttgtttcccccaggataaggctttaaatggg

SEQ ID NO: 413205 - DNA, 118 bp, Homo Sapiens
cccaggaaatccctgccatgacaggccccaaaaacttttctttttttgaaaacatgccccacccccggggggttgggaaaaaggggaaaccaggggaccccagggatgggattccact

SEQ ID NO: 413206 - DNA, 194 bp, Homo Sapiens
  misc_feature (58)..(72): n is a, c, g, or t
  misc_feature (120)..(130): n is a, c, g, or t
ccctcccactttgggggaaaaaggcgtttatggggtaatttaaaaaaagggggccggnnnnnnnnnnnnnnnaaaaccccacccgggaaaaaatttttgggccactgccaaaaaccaaannnnnnnnnnnttgccccccagggggggaactcaaaaccccccctgggcccgggggtttgtttggaaactgggtt

SEQ ID NO: 413207 - DNA, 161 bp, Homo Sapiens
  misc_feature (77)..(93): n is a, c, g, or t
ggacagcaccatttgtttatggacaatcccaggtcattccaaacaccccgaaagagggctttgaacaaccccccccnnnnnnnnnnnnnnnnnaaaggcacccccacaaaaacacaggtttgggggaaaggccacacaaaccggggtctttccttttgggg

SEQ ID NO: 413208 - DNA, 384 bp, Homo Sapiens
  misc_feature (83)..(91): n is a, c, g, or t
ggaacaggccgtttttttccaaagggcagctgaccccaccccccaaggagggtctgggctgggagggcccaagtggcaggcannnnnnnnncaaggaccctggaatcaaaacttccccaccttttggtttacaggggcagcaggcccccctggcaatctccagggctttgagggccccctccgaggggagcccctttctttcccaaatcccaaattaaaccaggggcttccaaaactggaatttgttttttggagggaagggtgcccaaacagcctttttacaaaggggggccccccccaaaacctccttgggaagtaaaaccaaaatttttggtggtgaaccactgcctttcttttggcccccttggaggaaggggaccgaag

SEQ ID NO: 413209 - DNA, 129 bp, Homo Sapiens
aaaaacaggggaacaaatccaagaaacaacttttttggagaaaacagcacaatttttacaaacatattagggggtttgacagggttacttttgggtaaaccttaaaggaacccacaaagttaatatttt

SEQ ID NO: 413210 - DNA, 131 bp, Homo Sapiens
gacaggccaaaaaactcctccaggcctggggcagctaaacacagttccttgggggaaaggtttacttggaacatgggggaggcagggtttatgaggaggccccccttggaggggccccacatgggtctttt

SEQ ID NO: 413211 - DNA, 671 bp, Homo Sapiens
ggcacgaggaacacctctagatactgtcataatgtatccagagattcaattagagagagtgtgtgtttctgggccaacagaggcaaggttagggggcagaggtaatataagtgagctggcccaagccatgcaacttagcctcatagattgaagtcatcacatgaattaaccccaaactggtacccagtgatgtcagagcatgagtccagatgtgctctgtgcgtgcatgggatggcttccaataaagtcaaatgacacagtcacgtgtcagtttaggtcctctaggaaacagacaccagagagaatgagaagtgcaagtgacatattgggggatgcctatgaaagacaaaggggagagggagcaggatgaggtgggaaggcttcagactgtgacacaggtgtgccacctgtgaaaagtgaaggggaaagaagcagcattctcagggagagcctcagaccacagtgccactctgagcaagtggccaggctgatggagcctgacactaaagattgcccattagagaagtctcggccctagtgtcccagccatggagtgtcccaaagagcgcagctttggtgtgagctctgagggagcaagtcctctttgaggttctctgaaagagatctaagctgtgcacttcttgggctgccttaattatgcttcaagggtc

SEQ ID NO: 413212 - DNA, 400 bp, Homo Sapiens
  misc_feature (156)..(164): n is a, c, g, or t
gtcgggggaagggtccctcattataaaattttggcggttctttgcccaaaaaaactcgaggggcccccccggcggttgtaatagggccccggtaaatgacccccccctttgacccctcccgggttatggccaaaacaataacgtttggggggaaannnnnnnnntcctcgggaaacatgcctggtttttttgctgcctccccataaccataaaaaaaggggctgccggaccccccaatgggaaaagggtggcaagtcaactttccccccaggggtccatatacctgacctcctttacggggggccccccccgttcccatgaaatgggcaaacaagccccctcgatttttaaagcggatttttccccccccatttgccgcacccaaaaaaaggggggggtc

SEQ ID NO: 413213 - DNA, 212 bp, Homo Sapiens
  misc_feature (102)..(112): n is a, c, g, or t
gttcacctttcctttctttaacatcaatagccctgattttaacggggttccttttcccttttaaagggggggatttaaacttttttaaaagttcctaaagannnnnnnnnnnttttaaaaaatttagggtgaatgcttgggggaggatttcccatcccaattttggggaaaaagaccctaagtaacctcctttaaaccccacccccgggcca

SEQ ID NO: 413214 - DNA, 246 bp, Homo Sapiens
  misc_feature (173)..(188): n is a, c, g, or t
gccacactgtttgactttttttgtttatccccacccccatcccatgaaacaagcgggactttcctttttaaagaggggaaaaccaatattaaaagagactcaaaaacccgctccaggaaaaaggacaaaactgggactttggactcaaaatttaacgctcccccgccacaccnnnnnnnnnnnnnnnnccacaccaagggactttttgggggaccctggcaaagggtcttttaaaaacgggctttt

SEQ ID NO: 413215 - DNA, 295 bp, Homo Sapiens
  misc_feature (64)..(72): n is a, c, g, or t
  misc_feature (95)..(111): n is a, c, g, or t
  misc_feature (138)..(166): n is a, c, g, or t
  misc_feature (194)..(208): n is a, c, g, or t
accaaggacgggttttttttgaaaaacaaccttaaagggggcctctcccccaattagggaaaannnnnnnnnttttacaaacaaaggaatttaannnnnnnnnnnnnnnnntcttaaaaaaggcccccaaaggttttnnnnnnnnnnnnnnnnnnnnnnnnnnnnnaaggcccctgcccaaaagggggggtgtnnnnnnnnnnnnnnnaaattttggccccgggggcccaaacccctataggggggccttttaaaatcaaaaacatgtccaacccgttccccggggaaaaatgga

SEQ ID NO: 413216 - DNA, 382 bp, Homo Sapiens
tttgggcttaggccccccaccctgggtgggcccaacattggtggaacacaaggcaccaggcccccccactgtttcacccctttaaaaagggggtttaaataggccaggccccaacctggagggcgggggtcccggggcctaggggggaaaaaaatcggaaaaataggggggctgcagggccttttttggtgaaataccctggacagggttacacttaaaaagggtttggaaaaaatccctccctggggcattgagtttgggcccaaccttcaccagggatgttggggccgggtacattggatagggcttataatctggcagcttggtcataaagggcccctgttccttggggggggtccccaacagggggaaaaaccttttt

SEQ ID NO: 413217 - DNA, 290 bp, Homo Sapiens
  misc_feature (128)..(140): n is a, c, g, or t
ggctatatttttaaacaccatttcgtctcatcatacctaagggcagggggcaaaggcccccccctttccattttttaacctaaattaagggaagccctttgttaataggccccccggggggaaagggnnnnnnnnnnnnnaaaaaccctttggggttaaaacccttccaaaaaagggcccctaacccccctttgggccaaaaaatttcccccaaggtttttgggaaatacccccccttaaaatttaattttttaaagggggaaaggtcccttttttaaactttaacaaaa

SEQ ID NO: 413218 - DNA, 142 bp, Homo Sapiens
  misc_feature (78)..(87): n is a, c, g, or t
cacagtaaaaaactacctaccaaatgctttccccagagttaaaggattaaacccataggtttttattaaaacacgggnnnnnnnnnnaaatttatacccacaaaacttatttcattaggggtttttgacaccccccaattcc

SEQ ID NO: 413219 - DNA, 194 bp, Homo Sapiens
gggggaaaaaaagggttttattaaaaagggggggcctttgccccttgggggcccccaacccccaaaaggggccgggaggggggcaggtaaaaaaaggttaaaaccccttttgggctgttccacccactggcccaacgtaagggccttggggttgaatttaagggtcaacttaatgtcccgggcgggtttcaggg

SEQ ID NO: 413220 - DNA, 116 bp, Homo Sapiens
  misc_feature (56)..(64): n is a, c, g, or t
acattaagccctcttatgatttcagggcttcacaaaattgcccttaatttttgaannnnnnnnncctttaacaaaaatcctgggcaagggcagcccttttttccttttaaatatgg

SEQ ID NO: 413221 - DNA, 260 bp, Homo Sapiens
  misc_feature (66)..(74): n is a, c, g, or t
ccccaaaaattttatgggggggaaaactacaaaacatttacgggccaaggttaacagccacaattnnnnnnnnncggatcccccaaaatatattacaactaagggggacttatttggtaacattaaaaaacctacttttgcccaaagtagcccaaagggtccatatggggccccaactggccctacgaacaaactaaagctcccgttaattcattgggtgcccagaaaagctaaggaaacattcctgcctttttacgggg

SEQ ID NO: 413222 - DNA, 483 bp, Homo Sapiens
  misc_feature (361)..(374): n is a, c, g, or t
  misc_feature (412)..(440): n is a, c, g, or t
ccaagattcggcacgagggcgaacctattcccaaggagcacacacgtgtgaggccggccaagcacccaacacccagccgccgccggccagacctggctgggggcgctgcacgccactgctggccgcctagtccggcctttaggcgcagctgctgtagacaaagcttcaaactacctaaggaccagaaagcccggcccggttgtcgaggatgcgttagtatgagttgccaggcctctggtccaccacactgtgtctccctcagctgcaggtcgaagagcatgtgttaattcaaatcccggacccttctacttttttgtcaagtctctgcattctgttggtagttaggttttagttctgggannnnnnnnnnnnnncccccacactgagttcatgttttacaactgttgggagnnnnnnnnnnnnnnnnnnnnnnnnnnnnngcagttaattgctatgggtcgaacctgagttaacccaaatatt

SEQ ID NO: 413223 - DNA, 398 bp, Homo Sapiens
  misc_feature (98)..(108): n is a, c, g, or t
  misc_feature (139)..(163): n is a, c, g, or t
  misc_feature (183)..(191): n is a, c, g, or t
  misc_feature (252)..(260): n is a, c, g, or t
  misc_feature (262)..(305): n is a, c, g, or t
caaaatttaaaaaagcccaagggttttcccccccctatggaaatcttcccctgactttttgaggttgggccttaacaaaattttaccaaacagaaaannnnnnnnnnncgttaacccaaatgacccaaagtcatttttnnnnnnnnnnnnnnnnnnnnnnnnnttttaaccgtcttggccccnnnnnnnnncctgccaaattggcaagggtttaaaaaataattttcggctttgacaggggggcaccccccnnnnnnnnngnnnnnnnnnnnnnnnnnnnnnnnnnnnnnnnnnnnnnnnnnnnnaccataatttttttgcccccccataaaaaattttttgccggcttccttaggggcaaaactaccaaaaaggggggggcccattggggttctttt

SEQ ID NO: 413224 - DNA, 173 bp, Homo Sapiens
  misc_feature (73)..(96): n is a, c, g, or t
ggcacgaggcggggctggctgtcttcggcagcttgattgggggaggcgacccacacacagggcgcttggagannnnnnnnnnnnnnnnnnnnnnnnaaagcgggattaattgtttttggcagcttggttttggggggaccctaaaaaaggccttcggggtttcttttatcggg

SEQ ID NO: 413225 - DNA, 449 bp, Homo Sapiens
tccatccgggcccggcccaaaaaggtttgggaaaaaaagacctttggaaaaacccttagtttccatcatcatcatcatctttattatttaaaaaattttaaccttttccttaaaagggaaccggtttggcttttcgggttcctgtggaaggaaaggaaaaaaaggggagggctcccaaggccccatttaatcttggctaccaaaaataaggccatttatttttccggcttcttgtaaaaaccggggggttttaaaacaaactccccttggccttcctccccttttccctttcccagagccacctaaaagaggaaaaaaccttttgcgaggttgcccctggggaattttggctgaatcaaccaccaaaccaaaaccttgttggaacctgttgtcttgggggcaaaaaaagaaacccagagggggagaggccctgctttggccgtggcccc

SEQ ID NO: 413226 - DNA, 140 bp, Homo Sapiens
ccaggccatttttattaaaacaaaagcaggggccccacagccacggggacatgttttccaaacagaaaacacagggcctggggttgaaaaagcctgacagggaaaattaatgcctttttccttggcccccatgaccaaag

SEQ ID NO: 413227 - DNA, 163 bp, Homo Sapiens
  misc_feature (109)..(109): n is a, c, g, or t
agaaacctctggggggagctggagggaggggaccctttttctgaaggcggccccgggacagggcaaaatcagggggcccacggggtggtccaagggaaaagaggaatcntaagaccaaatcaccatggggccgggggtgttccgacaaaaaaagcgccaaaac

SEQ ID NO: 413228 - DNA, 561 bp, Homo Sapiens
  misc_feature (99)..(135): n is a, c, g, or t
ttttctaagggggggaccttggaaaaatccaaaccaaggcatttccctaaaaaattggaaagcccccaaccgggcccttttttaaaagggggggttttnnnnnnnnnnnnnnnnnnnnnnnnnnnnnnnnnnnnnaaaagttttgggggacaagagggggggcaaaggggagccccctttcctgcccggggcctaaccctaacccccaggtgggaggcattaaagggcccagggccccccgatgggttttgttttccttaaaacccggcggggcgcgtggggggaaacccacaaagcacaaaattcctttggcccccggaagggtgggggccccccggccctggggggaggccctaaaacaacacaaaatgcaatcgtccgaagaaacccaggccgcctgggccgaaagggccgtaatttcgccgtgagggggctgagcggaccccgaaccggaacccctcggcccccgggggccccaatttggaattccgagtacagctcacattgaaggccccttggtgaaaccaatgacttgcggagaaatctccacctttgctcacc

SEQ ID NO: 413229 - DNA, 274 bp, Homo Sapiens
ggctgtccctttgtacaccgcgccggggaagggggctccgagggggcgcatgctcaaaccctgcctttcctttactgttgctttgttttttttcctttgcaagacagaaaaacaaaatgatcgggtctgccctattgggggttctactctgcaacaaacgggggttgtgtgtgagtgcgtttaattgtattgggtggggaaagaaatgggaagaagaaaaataaaatctccgcccctgtactcaaactcgctccccccttcgggtcttacgacc

SEQ ID NO: 413230 - DNA, 385 bp, Homo Sapiens
  misc_feature (262)..(272): n is a, c, g, or t
tttttagcagggaagcccatgccagggggacatattagttgccctccaccccattctgggtctcagcttagagcctgcagcaggaagggcttaatctgaacaagaaacaaaatttcccagggggtccttccatcctggaagcctgggcccttagggctgggagggcagtgggggtgccaaaatgtgacaacttttacaatgccaaggggaagaatagtgtctgaccccccactctcaacctaacttggatttcctggcggcnnnnnnnnnnntgccaagagatttatttgcagagaaaagggaggcctggggtctgggcttttgattgggaagggtgactcctcgagcttgggagtgggaagcccataggcacccctcccccttt

SEQ ID NO: 413231 - DNA, 225 bp, Homo Sapiens
cccatatgggccacaaatagacggaagcgatgaacagaaaactcctcaccaattcgggacccgggcccactccgtccccaggggaatcttttgggtaaaagcgccgcaatcccccggggcctgccaagggtgcgcggcctgatctccttgccccagggggggcttttccttagctggcaggggatccccccgcccgggcggcccctttttagctgggagagcccc

SEQ ID NO: 413232 - DNA, 315 bp, Homo Sapiens
aaccccaaaaatttctccggacaagagagggggccgggggggctggtttttcttcaaggggttttggccctcagggaggaacggggacttggcccacatgcaggttaccccccggcccgttatcccctgcttagcccagggaggagacagtcgaggtgatggggccgaccacacagggaggggccacggatcctactcttgcgggtaaaaattatggctgaggctgggggcacaaggagggggtgcccacgctcactgaccattgtgcagagacagagcctcaaagctcggacaggggtgaaggtaccacacggg

SEQ ID NO: 413233 - DNA, 124 bp, Homo Sapiens
tgccaccgcacttccggacggcgatgactgacttgctgcccctgaggtcgcgcttgtacccatccatgtggatgttttccgcgtctccctgcatgtctggaacagatgtcaccaagtgctttag

SEQ ID NO: 413234 - DNA, 205 bp, Homo Sapiens
  misc_feature (45)..(45): n is a, c, g, or t
gcaccttaaccttttcggatttattataggagatttcaaccccanattctctttcacgggccttgaaattttcacctgggcccaaccggtctagccccaggttttttataaaaggaagattacctggaagcttccttggggccaatctggccttaagggttaataccgaaagaaaccggcccggggcgctctttacccaaagggg

SEQ ID NO: 413235 - DNA, 130 bp, Homo Sapiens
aatgggctttcttcccttggtcactcctgtgcgcaagatgtgagcgtgctgaggttacatatatcatttgcccaccagagcgtatgctatccttttcgggtgagcatcgctcattaattcggaccaaacc

SEQ ID NO: 413236 - DNA, 138 bp, Homo Sapiens
aggcaggggggcgggggccccattggggaactttttgaacccaagggccaaaaatccccaaaagatcatttccaagggaaccctccctaaaggctaaattaaaaagcccagggaaaagggccccccgggggcttacag

SEQ ID NO: 413237 - DNA, 465 bp, Homo Sapiens
gtgggggatcacattaattgtattgaggacacacggcaaggcattcactattccccactacgaggggggggaagcacaggtctgggggaggaggggcaagtcacccacggggcgggcccaccgagggcaacctactttacccatatttgaaggctgatggggcctgctaatgtggaccatcccctcctgagcccgagagcagggcaccaagccccacaaacgtcctgccgacacagaggagggcaacagatccacaggcccgcccacagggtccgcaggaccggactgcacggactgacttcatgccttgttgaagttctctgcgcccatccagctagagctcgctatgggaggcttccgcgggcgctgcaagcactggcttcctgcaggcggatggcgtcatcagctccatgaagtactcaccgagactgtgctctgtggagctggtcaccatagtctctgtcc

SEQ ID NO: 413238 - DNA, 473 bp, Homo Sapiens
atagacaatagaaatttatttctcacaggtatggaggctggtaagtccaagatcaaggcactggcagattccgtgtctggtgaggactgctctctgcttccaagatggtgtgttgttgctgagtcctccagagggaacgaagactgtgtcctcatgtggcggaagggatggaaggaaacaaaaccactccctcaagcccttttagaaggaccgtgaccccatctataagagctgtgccctcacgacttaatcacatcctaaagttcccacctcttgttaagtttcaacacatgaattttggggaagacagggataaggaaagaacatggtgattaatgctgtccccctggactgattttcaagctttctatggcaagagtttataggcaaaaacaaaatccgtccattgcatgtttgatagtgccatgaacctctcttttgttgcactcatcacagttgtacattaatctata

SEQ ID NO: 413239 - DNA, 100 bp, Homo Sapiens
tgatggtgataccgccctcacagacattaatgcctgaggtttcatggacctgtgcatgctcgatgcttaggtctgtgactgtacttatgaggatcaggcc

SEQ ID NO: 413240 - DNA, 217 bp, Homo Sapiens
catggaaccagggttgggggaaaaactacccccggtgttcgttttaagggccgtctgatacatgggattttatattgagggcccggatacggcagcgacactggccttgatcatatccttaggggtctgtgaagaaacttatcttgaaaaccctttgtatcttgacctggctgatggactacaccagaagatggaccttactgcacaaaggactgat

SEQ ID NO: 413241 - DNA, 442 bp, Homo Sapiens
cacttggtaaagagcttccccatttaagaaacttagagcaacgatgaaaaagctctaccccagagcaatcggggctgtgccctcagagccacagttgttgagcatcaaattctgccagggcagagcggacagggaagtacacacaggcagtaatgctcggcctaagtcctcggaagacagagaagtcctctccccataacaagagaggctcttctacagtcaggagggccacgcagcgtgcactggctgagcaccagcccggcggacagaagcagagggcagaagctctcaggagacatgtgtgagatggaactgggggaatgcggacagaagggaagtctaagaccattcctttgtttctggctcaagcaacctgtcattagccaagcttcggaaagggcacatttggggagaggacgacaatgagttctgtgttgcatga

SEQ ID NO: 413242 - DNA, 227 bp, Homo Sapiens
catatattcaggactatattttacaggattacaaagctgatgcactggggtgctattctggcaatggcattgagcgacagagctgagtgcattatgccacaccagttgacttgggcacatttgggagctcaacaccagagagcagagaccgatactgttgaccctcagactactcactgagagcggatcatcgtggacacataatatatagcctatgtagacatgcc

SEQ ID NO: 413243 - DNA, 197 bp, Homo Sapiens
caaccccttcggtttgggaaaccccctaagggggggccaatttggttttaagtccagggggcccctccgtaaaaccagaaaaccatatggtgggccctaaaattttatataccaaaccccatttcggccatggttctttggggaaaccgtaagcggggcccaattttccctcccggccggccaaaacctggcctttt

SEQ ID NO: 413244 - DNA, 160 bp, Homo Sapiens
cttgctgctgggtgctctgatggcgtctagtgtcgcgtacgcgctctactactactacagccttggccgtgagttgaacggaatcgctaatgaatgacctggcgtggcaccctgccgacttctacaaaagtacggacagccctatcggtctgagatattg

SEQ ID NO: 413245 - DNA, 394 bp, Homo Sapiens
agaagagagaggccccatatcagaaggaagtgtgacccagaaggatggagctcttcagagacaggcttctttgagaatcaagaaagattcagaacaggtgaattgagtagattgtggcttttggaaactgagtaacacagtagcaaattgcatagcgttttaaacactgcaacctgacttaagagagaatccccctgtaaagggtctcactcctgccacccagactgtagtgcagtggtgatcatggctcactgcagcctcggcttcctgaactcaggtgatcttctccctcagcctcacaagtagctggaactacagcaatgaatgaaggttcctgttgctccacattctcaccagcacttggtttcatcagtgttctgacttcagccattct

SEQ ID NO: 413246 - DNA, 370 bp, Homo Sapiens
  misc_feature (169)..(169): n is a, c, g, or t
  misc_feature (237)..(237): n is a, c, g, or t
gaatgagggtccaggtcatcccacccaacaagtctcttagaccgcagagatgccagccaagggcaggaagactctggtacaggtggtggagaaggggcataaggagtaccaggtagaaccttgagatcaaatgcagcatcagagtctgagtctgtcccattaacccttntcttgtcagtttccccagtgaagcaaaactcactacaatgataaataagccatcagagatggggtaancttactacaagaaacaagtgactctgagcaccattgaagggtcatcgtgtacacagacactgcccacctcagatcccttttcagggcccacacacccatctcctagcctactgagaataagggctgctaatgg

SEQ ID NO: 413247 - DNA, 183 bp, Homo Sapiens
aaacttcaaaattttagggtttgtacaaaagtccacagttccagttgaaggccccattgttccgggctcccccctgccttaggaaagttaaatttgttttgtgcttgcccaggcaaagggcacaggagggccaagttttttttaggggaacatgattgttttaaaaacaaaacaaaccaaacc

SEQ ID NO: 413248 - DNA, 233 bp, Homo Sapiens
cagttaattaaaaaagtttattttttcaaggttggggaatgcgcccgtgacacagtttcatgaaatcctgatgacacttgcccagggtagttggggcacagcttggttttatacgatttagggagacaagaatgagacatcaatcaatatacgtaagaagtacattggtttggtctggaaaggcaggacagcttgaaacaaaagcaggaagactcatgtggggagggagggag

SEQ ID NO: 413249 - DNA, 303 bp, Homo Sapiens
ctgaggctgctcaacaggtgaccacactttgaataatgaggagtaagaacacagaatagggagtgtgccctatgggtataaccaggaagctactgggaggcccagtcgcaaggcgcaaaactacttgcaccagcagcgtgcaccagcaagatagcagaagctggaagagagccggctggaagacatataccctggctggaagacacctacccttgaagatcgagaaacaggccatctgggtaccacatagcagttatgtcaggctaggacacttcctgtttacaggagactatgaaacccctg

SEQ ID NO: 413250 - DNA, 475 bp, Homo Sapiens
gctggtgttgttgaggtccttgggagcattccactggacttcaccatttctccaaaattatcagcccagtcagcttcatatacccagatatggacacttctacacgtgaaattcaaactgaagataaaactctgactttggagtataaacttttgccttgagtatgaaaccttgacattgctgaaagaaaagtggaaactgtaagggacaacaagtttcaccaaggcacagtcttctctgataggccagcagagcagctaaggagaagacagatcattcaagaacttaagtcgtttgttagctacagcatttccattgctgtgatacacattcagccattttggaggaaagctaagcaggtactgaccacccattttcatgtactttaaataacaaatattatttctcaaggtcttcattttatcattaaattcagctaattactacctgatttcaaaggcagctagtgtagaag

SEQ ID NO: 413251 - DNA, 285 bp, Homo Sapiens
ccattgaagaaaatgattattgagtgatagaatgaatcttggcttttgtttctaaatttaactgccctagaatcctgggtttggcctttttctgccagaagctgctgccctaggggcaaagttctccaaaagtttttcagtaaatcctaagatgcaacaaatataatgcctagatagacaacagattctttttacatgatatgtttctacacgcacatgatagaggtcttttggtttttaaattctcaatacttaaacctaaatatatcaaagtaaaagtatgtg

SEQ ID NO: 413252 - DNA, 366 bp, Homo Sapiens
tgctactatttcattgctggaggtggggacgtatgcaccgcccacctgtgctgatgagaaagcactaactaaggtgggaggccagaatcccttgctgaccaacaaaggcctgctgctgccttatctgtctgtctgctggtactggcacatggtgagaccttccccatgtcacaggccaccactccaccggtggaaatacaagtagtgggagttctgcttaacacgtgataggaccaggcctatccgggacagacccataatcatcatgacaggagcatttccatacagtcttttgtccctgccaagggacatcgtctatctggacacagcataatgctatccttttcataagctgctgcgtatgga

SEQ ID NO: 413253 - DNA, 106 bp, Homo Sapiens
ccatgctgatactttgaataatctggaaaattgcagaaccacagacttcacttgtgaaaagagccaatagccagggtcctacagacgccttcttttctggggcatt

SEQ ID NO: 413254 - DNA, 136 bp, Homo Sapiens
ctggtacacatctctttttgaaccagattttcttggataaggggaaccactgtatgtgttacttgattttctgtgttttgctgaaaatactgtcaactcagacatttggtggttggggtgaacttgccaacatgtg

SEQ ID NO: 413255 - DNA, 234 bp, Homo Sapiens
caggaaaaccacattggaataaccaaaatttaacccagcccttccggcacaaaaattaattcccttaaggaccataaaaatcccccccaaaccaggcggccaaaaaccatacccccggatttaattaaaatccaaaaggtagggacccaaaaggcccaaaaccatcaccaagccccaaaccattaaggcccttaaaatttaaaggggcaaaaaaagggccaaagccgggaaccc

SEQ ID NO: 413256 - DNA, 213 bp, Homo Sapiens
ggggggccccccctttaatggaaaaccaaaagggtaaaaatcccaccggccccaaagaaggggccccctgaaagggaaaaaggggggcggggcggctgggggcccccattttcaatgccccggaaaaagggaaaaaaattttggcagggcccgccgtccaagggggggcatttgaccttgggccccgggggtttcaaaagaagggcgcccccg

SEQ ID NO: 413257 - DNA, 121 bp, Homo Sapiens
aaaaggggagggagcaatcccaggaccccgccgccacaggcaggcccgccacagacacgcccaggcaaacgacgcccgcggcaggcccagccaagacacccgcccgccccgccgggaaggc

SEQ ID NO: 413258 - DNA, 130 bp, Homo Sapiens
  misc_feature (98)..(98): n is a, c, g, or t
gaaacttgttttgttcgaccgaccttgatgtcccacctgccccactgtcattagaggctgagacctttcctgccttcagtgtaacccttaagtgctcnccgcgcttacttcccatgggtctaagcatccc

SEQ ID NO: 413259 - DNA, 426 bp, Homo Sapiens
tttttttgggaaaattctgcctagaggacttttgacgttatttcattcatgcttttatgtggagatttattttcacaaaagaataaatgttgcattaaaaagtagacttacttcaccctgtaataccttacatgtatgaacatttggtacattatttttgtgatagctctttgagggaaagacggtaaatatgactcttgaaagttgaggaagctaacactgaagcatatattttcttatattctgaggaggaaaactatcaagctctcattagtccacaaagcattattccaagttattcccaaatttccctaaattaccatgttaatgcatgaattgggagttaacctgaatcacatagatgttagctaatacatgaatctacttttgtgggagtaactccattttaaaaagttttagaatagg

SEQ ID NO: 413260 - DNA, 184 bp, Homo Sapiens
aacgctgtctcaagcacgcatccccatgctgccaggggagggccaggaaaaggaacaccctgggcgagccaaacgcggaagaactatgggaggtgcacacggcctccatgcatagccaaaaaagatgacaacggctacaatcagacaaacaaatcgacagggacatccgggagggcaaacccca

SEQ ID NO: 413261 - DNA, 123 bp, Homo Sapiens
atttatttaaacaaaaaacgtgcccatgacctgcctactcatttgcttcactgcccatcctggaatggggagaaggcgaccctgagggccccttgggcagctctttccacgagggcttggcgg

SEQ ID NO: 413262 - DNA, 157 bp, Homo Sapiens
tttttttgaacccctccagttgggagggcaaacccctatcacggctatatttggccacgtccaggaatggcttggagaactcatccaacccctcttcctggggggcctcaagaaggccaaaagctttccccccctggaaaacccggggtgggctcac

SEQ ID NO: 413263 - DNA, 142 bp, Homo Sapiens
gctggaaggtggcataaaagaaaaagggctctgcccccggaattttggccaaagcttccaggtccagaaaaggccaggggtccctttctggattgtcctcagggccaaaagggcgcccggtttttggaagcccccccatccc

SEQ ID NO: 413264 - DNA, 299 bp, Homo Sapiens
acagaaggactccgttatattttgaagttagagcaaggaatgaacactttcaacaaataaaggactaataaaagggtaacagaatgggtattatcttggtaaaactcacagtaaacatcactctaaagctacaattaacctgattttgtagtaccatagtagtttgtcacatatttatgcctgtagtccatgaaacacccttaaatgctcattgctgaaaaatttccaccaatgtgacaccagcactgataaattggagttatctttagcttttcagagtataaaaagcagtttccttt

SEQ ID NO: 413265 - DNA, 226 bp, Homo Sapiens
cccaccagggccaaagccttttccaaaggggcacttcccaaataagggacccccggaaactgaaagccctaacaggccccccccggggcaaaaactggaagggttcataggccccctgaaaaaaggtcagggccgttaacccccacccccgaacattaagggtccaaccgaaaaggccccacttcggacaaaaggggtttagagcaaacacctggactaaccagga

SEQ ID NO: 413266 - DNA, 139 bp, Homo Sapiens
gtctgtctattgctttgttcagattgctcttgatggagtccaggaatgtcgtggtgtataagaagtgcttgttcatcttcacattgcttgagtcgcgaatgcttaccgcctggtccttggtaattgtttctatttgaat

SEQ ID NO: 413267 - DNA, 211 bp, Homo Sapiens
gaagctggactgcctcacccacctctacaaaggccaggtcaagggggggctgcacaaaggcggatacaatgtgacttacttcaactatttacaaaaatccagcgatcaggaacccatgaccataacgagtcaactgattgaggaacgctcatcactcggctctataggttctgtcactgaacgagactatgtgagccacgggtacatgagg

SEQ ID NO: 413268 - DNA, 504 bp, Homo Sapiens
gcactcaactaccatgcttttttagtgcttacacctctatgttagcatctttcaaggtctgtcttaggtcttagcccatggtccggggtgtcccaacccactttatctatgtccacacatctgtgagctcccgaaaaaaccagaagtgtcatctgtgcattcccatggcacctcataccaggtggacagcacatggtaagcacgaagtggaattcgtcaattgaagctccttgccatcatgatggcagtgatttctgtactgctgcaccatccagaacacagggacaatttctcctgcaggagtctgcttaactcttctaccaggccttggatgcactggctcaaagcctgccagaagcccagagcgggtagtacgacttcagtgagaaattctggtttgtgagatgtttatggaaagtagttgcaagatttgaaatggaccttgacagtatttagtcctcttatcatttacgcatgtgttaaaaacaaagtttagatttctga

SEQ ID NO: 413269 - DNA, 167 bp, Homo Sapiens
acttccacacgttgccaggtcccttgccctttaagattccaccattgggcctccgtattccttgcaagaacacggtcccaattactcatggaataaatattgtaaagcaagatggggacaccgtactgtacttaccagcgctccccaaaaaggggaatttaaattgt

SEQ ID NO: 413270 - DNA, 246 bp, Homo Sapiens
cataaactgattaagagccagggacacactctacctacgatgtttaggcgataaacattattcatgcagtcaatttagatacggaaaaccaccattaaactacttggctcctatatattctagagaaagataagggaatgaactaagtcagtaatgttcaatctgaactacgttattgtttacaggacatcatcctgccatcttatggtttaatatttacaaatgccctagttttatggttacaaa

SEQ ID NO: 413271 - DNA, 178 bp, Homo Sapiens
acagacggtgaccacggtgaccccccttcctgctagtgttgtcagaggggatgggggtgacctccttatatccgtccgatcttcatttctgatcggtcaagggctctgagggccgactggcccccaggtccagggtatttggtacaatttccttctgaggacccatgtcttgatgtgt

SEQ ID NO: 413272 - DNA, 321 bp, Homo Sapiens
  misc_feature (206)..(237): n is a, c, g, or t
ggatcatacttcttttaggtaacatcatggtttactctctcaccttattcaggctctaataaaataggaccaaccctattgctgtctctttccacctttgctttttgttttcatagcatttatcaccagctgatgtagtaaatatattatttttgattacttattttcccccaccagactgaaacttcataaggactaacacttcnnnnnnnnnnnnnnnnnnnnnnnnnnnnnnnngctgtatactcaatatgttttttgttgagtaaataactacagagtcagccttaggaactaagtgtggtactttattggtctgtt

SEQ ID NO: 413273 - DNA, 235 bp, Homo Sapiens
aatcatacacattgctaagaaggatggaggctggatataaaccgaaggaaccttgtagcaaccataaggacaagatcatgatggccgaacccacaaggaacacgaaagaggggactatattcccgaaccccaagtttgctaggaggtacaaaatggggtgaaccataacgtctaaagcataacccgcggagactaggaaatttctacaacaccatcggaaatgctctgcagacag

SEQ ID NO: 413274 - DNA, 482 bp, Homo Sapiens
accacctcaaataaattagaagttcgaaattcatcaaacaaaactaattctttatttgggcaatatgataacattaatacacagataactttgaattctagcaactgtaaaatctaaacttaaatgttatttaccgtatatttagtgaatttatttttccctaccttcacgggacattaaaataggaaaggaagttaggttcaaaggagaaatggggctttgtagtcatcgctgccacctgaagccacctgcctctagccatggtcaacgccactgtgttcttttgacatcattgttgatggtaactcctttggcccatgcagctccttcgagctgtttgccgacaaagctccaaaaacagtggaaaactttcgtgcactgagcactggaagaaaaggggttgggtataaggggtcctgctttcacagaattattcccagggttattttatctgccagagtgctgacttcacacaccataat

SEQ ID NO: 413275 - DNA, 212 bp, Homo Sapiens
agatgggttcattgaaccaagctgggacattctcttaaacaaatcgtggccaaagggaagagggaacttaaattttacctttaaataaaagccagaacacggcgacaccgttcatgacacactcgaccactaaggcggcatcttataattttcttggtatggcgcttctcttcccctacaattcctgatgctgaaccagtggccccattctg

SEQ ID NO: 413276 - DNA, 385 bp, Homo Sapiens
ctaataaagaaccattaattcatctgtagattctcatacattatttgcatcaataacaattgtccctctcctgctgcaaaggaaaccacaaaaaacctgacagatgtacgtacacagctgatagcgaaggttgctcaattaaaataccattgatgagggctacttgataacagaacatttgtccttttatctaaggatatctacgacattgaaaacgccctttggaccggctaatgaccgggtgcaaagtgtgtcccatggatggacctgtgagccctgtcaccactgatcaactgtgttctctgaaacaaatctgtccgtgagtgactcctcaacatctggcggcatgaagggccaccaacacaggggttccctgcgcctcctt

SEQ ID NO: 413277 - DNA, 298 bp, Homo Sapiens
  misc_feature (67)..(87): n is a, c, g, or t
  misc_feature (96)..(194): n is a, c, g, or t
cccaaacccggggttttttttaattaagggggaggggatttgggaaacccccggttaccaggggccnnnnnnnnnnnnnnnnnnnnnccgggccgnnnnnnnnnnnnnnnnnnnnnnnnnnnnnnnnnnnnnnnnnnnnnnnnnnnnnnnnnnnnnnnnnnnnnnnnnnnnnnnnnnnnnnnnnnnnnnnnnnnagggggggaaagggaaccggccccacccccggccaattttcccaggggattttccagggagggcccgggccccccggtccaaccaaaccacccccaaaaccctt

SEQ ID NO: 413278 - DNA, 223 bp, Homo Sapiens
cgggtccttcacgatgccgaggacctgttaaagccctctgtagggtaccatgccggggcccgtgagggttcacagcgcggcctcaacgctatccgcgagcgcctgttgcccctggtggaccagggtcgtctgcgggccagcactgcggtcttcttggacggtcagtcgttcaggaatggtaccaggtactggttgctgagcgtctgcgtgcgctgatggagga

SEQ ID NO: 413279 - DNA, 405 bp, Homo Sapiens
gatgtttgttgttcagatgaatgacacactcaagttacaaaaatggggccttaaaagaagcacattgtacaatgaacaagcagattggagttaagaacactgaaacactaacccgctaccacgagaagagacggagggggtacaggaagggaaggaaggggctaccaacacaggggtcagacggaactgaaagggaggctaacttggtaaggatggaggaaaggcaggtctactccagggctgatttctggatgccggttcctgggcacccttgccttgtacttgccaccccctccaacttcacccacccccattccaacctggtcattctgggtggtgaaagacacccacaccagaatgggctgcgccaatcaggtctttaccaagtagggtggtcaccttgcc

SEQ ID NO: 413280 - DNA, 151 bp, Homo Sapiens
acagacgctacattaaaggaagtattctcacgtttggttggtcccgcgaatacagttacacacagcaaaagcgacaaaggcgctaaaccacaacaacacatcgaacacgcgaataggaaacaacagatctacatcttcccaatatgcaatg

SEQ ID NO: 413281 - DNA, 339 bp, Homo Sapiens
  misc_feature (328)..(328): n is a, c, g, or t
ctctttactcaggtgggtatatatgccactaatttgtttgattgtgtttttcccttgtttcattttgttttggccaagtaatatcctattgattgtatgattatcacacaatttgatatccatttttctgatgggagacaggtttacttgataactactgtgcataagtaactatgaatattctcatacaattatttctgtgaagatacatacttattttcctgggtatctatagctagggatggagttgcttggtgaatgggtagaaaatgttggacagagttttgcaaagtatttgtattgttttacatttctatgaaagatgtangccatttccag

SEQ ID NO: 413282 - DNA, 470 bp, Homo Sapiens
ctcaaggaaacatccttttataatcaccctcacgcacgccggcaggtcagtagcagtcagtccatttcaacaagacaagattaagtgctggaagggatggctgtggcctcagacactggggaagggtctcagcttctgaatcacggatactccctatcctgcctcgtcaggccagcggctccggccagagcccgcgggccctgcacgcccagcacagtggtcaccaagaggcaggctgggagactggagggagtcggggaggcctgttttcccttcggttcatgaacaaacggaactacagtgaacaaactcattcataacctgaatcgtcctggtctaaagcttactttgagttcatttggtgtacaatacgttatttttttaaaatgaagaaaaatgatttcaattgcacagagcttttacacatagtcatctaattaagtgctttccgtttaaagcaaagtacaaaa

SEQ ID NO: 413283 - DNA, 192 bp, Homo Sapiens
  misc_feature (65)..(103): n is a, c, g, or t
aaccctaaaggaccgaggagggcccacccaacccctagaagcatccccctcaccaaaattggccnnnnnnnnnnnnnnnnnnnnnnnnnnnnnnnnnnnnnnnctatgccgaaaaccccttcccaaaaagggggccaagccccggccttgaacaaaatacccggccaaaccataatttccaaaagcgccttg

SEQ ID NO: 413284 - DNA, 472 bp, Homo Sapiens
gagaattttattaagaaataaaattgtgttgattttgaaagtatggaaacatttagaacttatacccagtatttccctattgctggaaagtttattaaactaagctatttttatcattagacaagttatttgatgcaaatatattctactaaacttttgaaaatagctttctcttcaacatagttgaaccctgccccttctgatgtaattaccgctattaatttgcttaagaattaagacaatctacaaaaccagctgagttgcttttatccagtattctggatatatatccccaccaccatcactgcgatggatttgaaaggcctctcctctttcatatcacaagcttctgattcccactctggggcatgtgtatctgactagtggaatgtgtatgctctaccacaatagcaagggaggctgggagagctagtgtcagatatttttaacttcagttgtgaggggctgaccc

SEQ ID NO: 413285 - DNA, 166 bp, Homo Sapiens
tggccttctgtgtgatgtgctgttttcgggggataactctcttctgggtgggggggcctcgagcctgtggtcccatgatcgctacctcctaattcgacagcagtctaacctaattcctctcagtgtgcgggtgatttacagctgtgtcctttgtttggaactctcg

SEQ ID NO: 413286 - DNA, 242 bp, Homo Sapiens
  misc_feature (92)..(155): n is a, c, g, or t
  misc_feature (179)..(187): n is a, c, g, or t
ataacccccaaatttaaaaatcaaagccaattttgggggaaaaaaaccccatcaaaatcttccctccagcaaaacaacgaggttcactcccnnnnnnnnnnnnnnnnnnnnnnnnnnnnnnnnnnnnnnnnnnnnnnnnnnnnnnnnnnnnnnnnagggaacaaaaaccacattctaannnnnnnnnccagggcattaagcagtcttcgttgggcggtctaaccatccttcagcggactttc

SEQ ID NO: 413287 - DNA, 250 bp, Homo Sapiens
  misc_feature (55)..(67): n is a, c, g, or t
  misc_feature (125)..(177): n is a, c, g, or t
gggggggaaaaaccccccgctttattgcccgggccctaagggaaaaagggggggnnnnnnnnnnnnnaaacccgggaatccctttaaagaacccgggccgaacggcccccctcctgggggggttnnnnnnnnnnnnnnnnnnnnnnnnnnnnnnnnnnnnnnnnnnnnnnnnnnnnnaatggcccgggatgtcccggccctgggggaaccaaatttgttgaaaattgggtcccggccccggcaggggggg

SEQ ID NO: 413288 - DNA, 344 bp, Homo Sapiens
gactgggtaacaattaactttattatcagtagtaactgtcagtttcaaccagcagcagttatcgctcccaccctttgagggtgggggccccgtggctaatgctgtctttaagaatacacatctgtgtacttcctgtttcttagctgagagaggaggcctcaacaatataaagcgcagggagctggggagcggcaagccagtgggaatgggcacctggccataagtcaaagaaggggaaggagagttactttattctcttctggtgccagtaagaactttatcaaggtactagtgccatcagctcctgcccaagggcacccagggccccaggtcagcatgacgga

SEQ ID NO: 413289 - DNA, 134 bp, Homo Sapiens
  misc_feature (99)..(99): n is a, c, g, or t
tgcttaaaaaaggataagccaaagccccccccggaaaaaacccttagggtcctgaaaggggggaattcaaagggatttttctccccccaaggcacaccngtaaactttggaaaagacaaaagctttccttttca

SEQ ID NO: 413290 - DNA, 475 bp, Homo Sapiens
tttaaaactaaattaataaggccttaaaatgtgaacgagtaattagagacataatagatgttcaaagcaatcactataaatagtatagccacaacaaagcttttgtgagcatgaaagaatgcaattctaataccatgaaaaagctaacagcaaatgataacacaattattaagacaaaatgagaaaatgttaagactaataaacttgacatgttatagttatttttccttaaacaattcagaaagttcctagagtcagtttaaaccattggagtgctcaaggccaaggtcctggataaggaggtgggaacaggactggagaaggtcacagggccctgtggaactgcactcattcatcccagggacctagcacttagggtggccctaaggctgggctgcacagaagctctgtcatggggtagctcagcctggagagaaggcaatgacacctctgtgctatatgctgggagggatga

SEQ ID NO: 413291 - DNA, 112 bp, Homo Sapiens
tcttccaaactcttttgtctgccttgttgtgttcctgggatcctctccataccatgcccatcatggagcgctctgtcagggcacctgccacgatgatcgccagttgggcatt

SEQ ID NO: 413292 - DNA, 467 bp, Homo Sapiens
aagaaagaaaatgtgtttagtttcctttccaacagccagatggtgaaccaggccagctcatgggaattgaagatgaagagacctccaagaaagaggtagggaacaacacaacaaaacaatgtttgacttttcattatgttgatcgtcacatgctctttgagcacacacgagtcacacacctttcaagttagaatcagtggagcgcttttctacatgcaacaactgggagctatgctatgggaagaatgttaggcaactgatctgtgacagggcaatggaaattaagggagtgtgcctctgttgtacttccttagagtaaaatcccaaattgcattgcagagtaatttgttaaacctcaggagtatttaaattcaggagtattttgacttgtggagttctgcccacagaactgcacattcgatcttactaaatgttttttaatgattcaatttggggcgaggagagag

SEQ ID NO: 413293 - DNA, 301 bp, Homo Sapiens
gcagcccccagaacctctttaagggtcccaaaaagtcctcgggctaaggaccggggccgcatctgccgaccaaggtggacaatctcatcaaaagggatatccccacggggttaaaggtttttcggttcctttcggcctctggggggtcccttgagggctttgatgaccagggcaaaggcaaaaggccccacctaaatcgggccctgtctgttctgaagggccagtttcactgaaatcctcaggcccttccagtcacccgtggcctgggaaaggtcatcaccaacttttttgggagacagac

SEQ ID NO: 413294 - DNA, 179 bp, Homo Sapiens
tgctactatattattgcacgaggtggtggcgtatgcaccgtgcactgggcctatgatacccagaatggcaccaggaaggccacaacacctacctgagcaacatatgccaactgctgcctactatgtctgaattctgatgcagccacaaagagggacctacaccatggcggcgaccacca

SEQ ID NO: 413295 - DNA, 394 bp, Homo Sapiens
caaccagctgaagcatttattgagtcatgtgacttggaagcacatagttggaataaatttcagggatcccactaatttgcccatacttttactgggtttttgtgggtgggcctcgttgccttctattgtaaactggttcttccaaataattggtaaaggggagtagttgcagggcagcaggcagctccaagtgtacagcattgcctttggggaccccaaataaaagagagatcttgtctcaggcttcatgtttaacattccaaagagggaccctgattgacccagctttagtaagaggtttatcactgagcagggttctgagcaactgtgactgatgcacctggggtcatataaaaggtctgtggccaaaagaggcaaggcccacccaaaagga

SEQ ID NO: 413296 - DNA, 160 bp, Homo Sapiens
cgcacccacccacgcaccgactcccctcgcacgaaccccccacctccctcggctcgacccagacacgctattcttcctcactcacacccgatactacgcgagatactcactgccctccacccctctcgcgcaatctcgctctacacactatccaccttcc

SEQ ID NO: 413297 - DNA, 135 bp, Homo Sapiens
caaacccatcaaaggtcattacaaatttattaaccctgaggtaaaaagacattaaacagaaccatctccaaaaagcataaaaagagcccttttattcagtctggggcttggaaaagctaaatatattttaatcat

SEQ ID NO: 413298 - DNA, 355 bp, Homo Sapiens
agatgtatctggcatattactacgttgccctcgcaccggatttcggaacagctggaggcatgtgatcacactgctcggcatcactgctggaaggcctgctgttcccatcagatggactccgatgtgtctggtaggctgtctgaccatgcctctagtgagtcacatcttttgcttcgagggcacaacctttccatttattctacgatcatcatgtatctgtctatgtagatgaaagtgtcaacaccataaggacccattctacacagagctggactgcacagcgggctgtaccactgagctcagcattgcacaccaagcagcgacagcagataggaccactgatgatgctattttg

SEQ ID NO: 413299 - DNA, 520 bp, Homo Sapiens
  misc_feature (448)..(460): n is a, c, g, or t
aatcgcaaacaccttattttctccaaagttaattcccgtcttttgagggaagttagcaggtagcaaataaagcaaggtgcaaacagaggctcttgtaggagaggttggcacagactcacttggctttttctttctgggcattgaaaggtaggaaggttagaacttcagctaagccagtctttcccaatggttgcagtcagagattgatacaaaaccccagaactgtttgctattttatccattctctgctggagatgcagattgattggtggaaggaacagtgaactaggaagccaggttgttggattcctagtaactctcacactacccgcgaaaacttgagcaggccctctttttctgggctgtgtatccaaatggcggttactctagaagacataagtgaaaggtccttctcagcagctcaaaacggctaccagtaaccgggtcnnnnnnnnnnnnnaattaagcttaaatggcatttgcttaatcaataatacagtttcactagaactaatgctgc

SEQ ID NO: 413300 - DNA, 433 bp, Homo Sapiens
ccatcctgaagttttatattatttgctggctctttaaagtttacagaggaaacaaaaggcagcaatgttggaataagtctgcatttggaaaacaacatgtacacatgtactaatgcaataattattaagcaggtactatgtgctcaagagtacaatataaagcactgtgctgggcataacatattatgtgatttaatccccataacacattggaagttgatactaagtgttcagtaattctcaggatttaaataaagggcccagcattattacttcttcctctgtttctctgttattgattttttaaaaaaatgtacagaataaggctaaatatagacagaggagggggcatagaaagagtttaagaaatttttttctatttatatttacttgtctgtgacttgtggagcaactactggatctgcaagaatag

SEQ ID NO: 413301 - DNA, 238 bp, Homo Sapiens
aaaacaaaaactttcttgaatatttcagtttgttcattttaagtttgtgctgctggtatttgggaagaaaaatcaatcagttaagtgctaccagaaagtgtaccaatttttataaaaattaagaatgatataaatttcacaatctaaaattttaattttgtgcaatattttcatttaatgcatgtgtatttgagtaattgtaagaaataatctcgcacacttcttttaaatttttttt

SEQ ID NO: 413302 - DNA, 133 bp, Homo Sapiens
gaattggcggttcaaataatattttttcaaaaccagtggggggcgttagataaaactcactgaacggccattccaaaattgcacgtgtttcaacataaacaactgtatacacagccccctcgtatactgtgat

SEQ ID NO: 413303 - DNA, 197 bp, Homo Sapiens
agcatgattcttcagaggctctatcatgttctactctgtcattgcgacagtcgtctcagtccatttgcggaggaacacaggagcgacagctgcggcagatactaaggaacctgatcctatacagaaactgtttgtggagcagattagagaatactaatatgagcgacatgacatctgcatgacctgcagatgctagt

SEQ ID NO: 413304 - DNA, 124 bp, Homo Sapiens
aggaaaacccggtaatgatctcgggggtgagggataggaggagaatgggggattggggtatgaacatgagggggttctctcgttccaacgggggttttatgccgctaatgaggtgggtgaggct

SEQ ID NO: 413305 - DNA, 143 bp, Homo Sapiens
  misc_feature (41)..(79): n is a, c, g, or t
ctcccgggaaaaacccaaaccccggccacctgggacccccnnnnnnnnnnnnnnnnnnnnnnnnnnnnnnnnnnnnnnnccctcctttccccaagggcccaaaaagcgcccccacccagggctggctggcccaacccttgaac

SEQ ID NO: 413306 - DNA, 238 bp, Homo Sapiens
gaggggcctggcctcatccactaccacagccccctctaaactggaaccccgtcgctgacccctccccaaccatagttttttagtccgttccaggggaacaagcactcccgcggaagggaatccccatccctccccctctcgaaaatctcaaagggcgaaacccctccagacctttaagacgaagcctgccaaacctttgacggtaccagagaagggaggccggcccaatacctccggg

SEQ ID NO: 413307 - DNA, 103 bp, Homo Sapiens
aaacagaaagaaacgcatcacaacacacacacgaggcgggggaggcacaaccagcggaggacgcaagggggggcctacgggccaaggctatacttgacggcag

SEQ ID NO: 413308 - DNA, 142 bp, Homo Sapiens
ttagccttttgtatcttttgtggtggggcaggtctcttctgtactacagaccctcgaatggtatcattctgagctgctatcccattatgcctaagtgccaatccctaaaggcccttcatcccagcatcaccctgccgtacct

SEQ ID NO: 413309 - DNA, 123 bp, Homo Sapiens
ggattgatggagggaatgagccccttgctgagcaccaaaggccgcctgctgcctctcctgatagggtccgggtgcaagctcatggagagaccttacccaaagcatgggccaccagcccagggg

SEQ ID NO: 413310 - DNA, 223 bp, Homo Sapiens
tgctactattttattgtgaggaggtgggggtgtatgcacccgacaccggggctttaataagcatgaaggaaggagggaggtgcatacccccttgctgagcaacaaatgccgtctgctgccttctatgtttgtctactggtgcaagcacattgggacaccttacccaaggcaagggccatcagtccaggggtggtaatacatggtggggtaggagggcataaga

SEQ ID NO: 413311 - DNA, 119 bp, Homo Sapiens
ccccccaaaagaaagatttttttattaataaataccagaaagggaaaaacccccaacacatgcacatttgaaggctcacacaaaagcgcagagataaacatataaaatggcattgaaat

SEQ ID NO: 413312 - DNA, 281 bp, Homo Sapiens
cccaaaaacacgggattaataaggataagcgggggggaccccggatccctttaccccaaaagggaaacaaagggcccccgaaaacagaaaccccccggggaggggacggacccacagggacaaaacaaccccaacagggggctgggaaacccatcgggaccccaacagggtctatgtaaccaatggggaaaaggaacggaggcctgaagggtgggggcggccacgggctacggggggaatttttcggaaaaaagcttttaaggcaaaaaccccattttgga

SEQ ID NO: 413313 - DNA, 163 bp, Homo Sapiens
ccggcacagcctgcaccggcggcacctcctcgagggagatgacctgcagaagcgcccggcagggcaccacgcaggggcccgggacgccccgaagcgcggccaggagcccagacgcgaccgactaaggccccccgcagaacaggccctcggacgccccaccacc

SEQ ID NO: 413314 - DNA, 399 bp, Homo Sapiens
cagcttcccagaaaccttcatgcttgattagttagcagctcagttaagacaataccttccctttattccccacaagtgggaaccaagatgacaggtttttagttctccccatacataccccaagtcacccttctctttcctcgaaggctcaaggttttcgtgatcttttcagctgtactttatggagtatgttcttgagttctgcaaagattagcatcaaactctctcacagctgccctgtctgtattactgatcaatactcagttcgtttcacatgactaacaatttaaaaaaacaccttcatctgctgggccattctttaaaatcagattccaaatagtctagaggtctgctgcgagctctagactaaaggctcttgtcaatcctggctgcacatca

SEQ ID NO: 413315 - DNA, 216 bp, Homo Sapiens
tgctactattttattgcaagaggggggggtgtaggcaccgtacaccggagctatgaaaagcaccaaggaaggagggaggacacacccccttgatggagaacaaacgccgtctggagccttatatggctgactcctgccgcatgcacaaggagagaccttccccaaggcaggggccaccagcccaggggtgacaagacaccgaggcgcgaggtgtgc

SEQ ID NO: 413316 - DNA, 121 bp, Homo Sapiens
ccgcctgatccgttgactccatattttcatatgtgacaaaagcacactcttctgctgcgtccatagaaaagtcctctctgttccctaaaggaataatgccccccctcatgaccactgcact

SEQ ID NO: 413317 - DNA, 232 bp, Homo Sapiens
gcacctggttgtccagcagcaaggccagtatcaaagtgaacttcttcttattcatgggtctagaggaagactgcaggatctggtccacggcactgacctattccttgatcaggtcctccgacaacgggttgatgtctatgggctacactggcaggccgtgcactagacccagatggatgcgtcagctcatgctgcccacgacctgagcgatgtgcctgacaatatcacgtag

SEQ ID NO: 413318 - DNA, 142 bp, Homo Sapiens
caaaaagggaaaagtttatggcgggtgggggccccttgaaaaaggcaaaatctaccaaggaaaccaaactatagggccccccagttaaaaaaatgaccgggtaaaacaaatccccggtttatgcccaatttttaaaaaaacc

SEQ ID NO: 413319 - DNA, 213 bp, Homo Sapiens
gtgtgagcccccatacctagcccttaaactgatactctgtaaggatcttctaattcactaattaggtttactgcattatacagtctgctagctaccatcttcattatcttcattgggggttttacttgggcaattgcatttttcacctctaagaaagttattttcttattggtccttttttatgatagcttattcttgttttatcagcaaggc

SEQ ID NO: 413320 - DNA, 296 bp, Homo Sapiens
  misc_feature (116)..(134): n is a, c, g, or t
caccttttatcaatttattcgcgagaacaaatgtgagaacgtgagaccattgtgcaaaaagtagtgaggaatgcagtccaaagaaaatttgacgattaacatcctcagaactgagnnnnnnnnnnnnnnnnnnngactgaattcttgggcaggtagtcttatatcttgcttaatgtttttactgttaatagaaatagaactgataggtataaagattatggcttgctggtgctgtgataacagtatttatatttttatggctttcctaaattccacttcaactttcaaatgcttca

SEQ ID NO: 413321 - DNA, 634 bp, Homo Sapiens
  misc_feature (320)..(445): n is a, c, g, or t
  misc_feature (454)..(462): n is a, c, g, or t
  misc_feature (513)..(513): n is a, c, g, or t
  misc_feature (515)..(515): n is a, c, g, or t
  misc_feature (523)..(523): n is a, c, g, or t
gcagtttaaaatgatttaattgacaaattcttgtgatttacatttcagtaatcaactgcaaaagtgaggaagtaattcatgggcctgtagtgcttttgaaaataatatttatgactcataaaaatgtacattcataatagtatgacatggacatattttaagaaagttcaagcatatacaagcattgtttaatctcacaaaatatattaattttgttgggaatatgtgcattataaaagggtctttagtttaccaaagggttcaacactaagctatttttaaagttgtaattattttttccaatctaaagaggggttaannnnnnnnnnnnnnnnnnnnnnnnnnnnnnnnnnnnnnnnnnnnnnnnnnnnnnnnnnnnnnnnnnnnnnnnnnnnnnnnnnnnnnnnnnnnnnnnnnnnnnnnnnnnnnnnnnnnnnnnnnnnnnctactgctnnnnnnnnncacacttgtattcagctactcgcagctgagccagagatactacccgagggngnaggttttnatgaccaaaaaatcgcccaaaacttcagctggcacagagcagaattttctaaaataaaaagaagggggttagatcactgctgcttcccatggcctgccactgttgggaccg

SEQ ID NO: 413322 - DNA, 183 bp, Homo Sapiens
gggaattaaaaatttttattggaaaaaaatcaggggaaagggaaaaatccctggaaacccatttcccaccctttaggaaccccccgggaaaatccaaatagaactaggggctttggggaccaaatgggcacccaatgccctgggcaccaccaaaaggagaattttgtttgtttggggggccgg

SEQ ID NO: 413323 - DNA, 212 bp, Homo Sapiens
tcctatagggcttgtatattggaccctgagacatagcatccagtggtgcatgtactgcccaaagctgcttctgtttttcaggtaaccgaggagcccttacttcctctgagtgtgagcttggaatctcttgttactactcgcactcctcattttcctcctcctcttactcagaggagctctcactgatactttcctcactggaggactctgaa

SEQ ID NO: 413324 - DNA, 238 bp, Homo Sapiens
attcaggcgatcctcccaacctcagcctcctgagtaggtacgactacaggcataagccaccatctttgtattttttgtaaagactgtttcgccatgtggcttaggccggttttgaactccagggctccagtagtccacccacctcagcctcccaaagtgttaggattacaagcatcagccaccgtgactggctaaatattgtcttttattagatattcaagtatcataaaagcagaaa

SEQ ID NO: 413325 - DNA, 100 bp, Homo Sapiens
atttagcagagacctttttgggacaaccaattagcgacattttcaacaggccacgcgggggcgctcttttttgtgaaaaaagattcagcctaatatttta

SEQ ID NO: 413326 - DNA, 396 bp, Homo Sapiens
  misc_feature (50)..(96): n is a, c, g, or t
  misc_feature (195)..(203): n is a, c, g, or t
  misc_feature (220)..(232): n is a, c, g, or t
ggcttttaacccaaaaggaccccatttttgccccctttacttgaggggcnnnnnnnnnnnnnnnnnnnnnnnnnnnnnnnnnnnnnnnnnnnnnnnccccccccagggcaagggcaaaaaacaggggtggttttgacttgagtctggaccccgggcaccatcaccaggggaaaaaggcaggtttttgtttggaannnnnnnnnagaagccccaaggggannnnnnnnnnnnnttgccccaaaaaatggcctgttttccctgaaaaaaccccccccagggggttttgaaaaaacggggcatgaagggcccacccttgcccacttcaaaggcatccccgttgaaaggctggccgttggcaaaaaccaagagggcatcacccccaaactcctttgagct

SEQ ID NO: 413327 - DNA, 110 bp, Homo Sapiens
aaaaagttcccctcctttggccaaagctttatgaaaagccacattctggagcaccaggctccacaaataaatccccagggacctttcaggccaaactgctgtgtagggct

SEQ ID NO: 413328 - DNA, 310 bp, Homo Sapiens
gcttccaccgaagagtttcactgagaccaccatagcggcatatgaggcacaatgaatctcaactatgttcgctataatgcatccacaaggttttccttggatatgttaacactgtagacaatatgagtcttattgttccggaggcaacccttaaggctgtaatggacagcgagggatccccatacagacttgcccaatgcgacattcagcatgcgcctgatttccgccctactgacgactttgagctgtacagacttcacctgtgtcctcgtgacctacattacgagccgactcgctcactccatctttt

SEQ ID NO: 413329 - DNA, 204 bp, Homo Sapiens
ttaggatatcttatggaactgtattttatatccaactgtgaataacaggtaagtagaaaacaaattgcaaagattcatttatggtcatttttaaatttgattacccatttaaatccagcagccaagtggtttcaacagactttctacttgaggtgaaaataataacactacaaacatatggcagagccttcgtacaagcatttc

SEQ ID NO: 413330 - DNA, 277 bp, Homo Sapiens
  misc_feature (71)..(79): n is a, c, g, or t
  misc_feature (81)..(140): n is a, c, g, or t
  misc_feature (150)..(168): n is a, c, g, or t
gggggggaataaaatctttattaggaaccaggttccaaaccagggaaaaggccgggccaaaaggggtccannnnnnnnnannnnnnnnnnnnnnnnnnnnnnnnnnnnnnnnnnnnnnnnnnnnnnnnnnnnnnnnnnnngggctgaaannnnnnnnnnnnnnnnnnnccaagggccccccccaaaggacccaacggggccagcgggtggggtttcggccaaagggaaccccaacatcccccccctttttggggtaacaaaaaaattaaagccccag

SEQ ID NO: 413331 - DNA, 100 bp, Homo Sapiens
agggggcgggctttccttttaattttaaaaaccccagggccctcaaccccaaaaaaggcccttaaaggggaaggccccctggggcaggccaaccatattt

SEQ ID NO: 413332 - DNA, 376 bp, Homo Sapiens
ggctttactctagtctttaaagacttcattcctcagagttggtgcccaggaaaattaccgtgtgttggtgtccactgctaacacgtgtctgcacacccctgtctgaatgacaatcctgctctcagaagtgctctccctggccatgcatgccaagtcaggatccccagagtggcttgaggctgtgtcaggccaagagagggcccatggtccagttagtttggaagaccctcggctgaatagaattcagcagatttcttggctgtgtgacttttcgaagcttttgatacacacctgggcactgcaggcatggggcatttccacggaggtgggttagagaatgtagaaagctcccaatctggttgaccttaggaccctt

SEQ ID NO: 413333 - DNA, 428 bp, Homo Sapiens
  misc_feature (294)..(294): n is a, c, g, or t
ttttttcattttaagggcttgatttttaatcgaagcaaaagcaatacatgtgtatagtttttaaaaatcaaacagtagaaaaaggacatataatgaaaagtaatagaactgtccctccttctcaacttttgcttccccaaatcagaaacacaaacttttacacgtgcttgtttagagattacaccccctttttcaataacatgcctttattactatttcttgacttaatgacatgaggcattttctgctgacttcctgccgcccccctcagctctccttccccctgaatatagncatatcactaatttttaactcttctgttggctacctggttcaatgaatagcaaaggggaatgctctgattggattttctcatcaccgactccagagtcttgatccatgtgccaatattcaaacagattcccttt

SEQ ID NO: 413334 - DNA, 270 bp, Homo Sapiens
tgcacggagcgtcgggcacccgaggaagcagagccagttgctagagcatcacactgtacacaggttccagatgggcccatatgaaacagacggggacgcttgtgatcagctcctccaaataataatgctactccaaaggtaccagacatggcacctggaactgcgtctcttagccaaactgggaaggcagagtggccacaacctcggtcacactctccaatgagattggtctattgtgcgggggaccctgggttctgcgctccctcgtgg

SEQ ID NO: 413335 - DNA, 178 bp, Homo Sapiens
ccaaaaatgaggccttcagggggccaaaatttcccattacccgggacaagtttttacccgaatggggcggggaaacatggtgcaaccccaacccttaaccccgggtttaaaggtgaactgggaagctgccccaccctttgggcaaaaagacttgtatgtggcctctccggggacacac

SEQ ID NO: 413336 - DNA, 123 bp, Homo Sapiens
ggaagcttcccacatttttattggaaaggcccagttaaccccccccttgaaacaaaattttccacttttttttggaaaaaacaaacaattgaacccaaaaaaagctgactttttacaaaccca

SEQ ID NO: 413337 - DNA, 122 bp, Homo Sapiens
gccggggcccgcgagggcgcctagcgcggccttagctccatccgcgtgcgcctggggcccctggtgtgaactatgccgtgtgcgggccgattctgtgggctcactggccgaccatccgttac

SEQ ID NO: 413338 - DNA, 555 bp, Homo Sapiens
  misc_feature (131)..(139): n is a, c, g, or t
cctttattgcccaaacccacccctaaattggccttgccctgggaaaccaaaacctccatggccttccccaccgtttcctaaaaacccaaaaactggatgggcttggggggcttaaactccttgttaaactnnnnnnnnntggggaaccccgggggcaggttaaactccataaacccctggtttgaaatcccttccaggggcttgaaaatgcccccaaggctgttcccgggggctgaaaagaaaactcccttgccggccttgatctggggaacaaattcctctttccaaaagggcagggcccgggcaatggtgtccttaaggctttccaagggggggaaatccccgggcttaaagcctgcgaaccgaccctccttgctaatggaattgaaaaaagggtgcttttcgtccatcgggggcggggggatgtcaaaggaacccctccaaatcttcaactgctcctccccggcctgggggcccgttttgccctgttgaagcctgtaaggccccgaatgccccttatttaaggcccaagggccaccaaggcaaccaatttgg

SEQ ID NO: 413339 - DNA, 184 bp, Homo Sapiens
tatggctcagatcatttatttcaatggttacaacagtatacttcttattcataaactcaggcactgacttggttccccggtctatggcatctgtccttacaagcatggtatgtgccctaggggtcatactgattaatctacgtagtgccataaagtctgaacccatgctgagtggcattatgct

SEQ ID NO: 413340 - DNA, 135 bp, Homo Sapiens
gtagagatggggtcttgccatgttgatcagggtggtctcaaactcctaggctcaagcaatccacctgcctcgccctcccagagttctaggattacaggtgtgagccactgcacctggccggaaagaattcttcta

SEQ ID NO: 413341 - DNA, 447 bp, Homo Sapiens
  misc_feature (186)..(194): n is a, c, g, or t
ccggtaacatttaaccccgcgcaaaacacattgcccattctaaaggggtggggggcttaaagagtctcttcccggggttttggaagggtcaattctaggaaatatcccagccaaagagtccccggcgaagggcaatactttgattccctgttttaggaaggacccggataaccccggaaatgattnnnnnnnnnaaaaagttcttcacctgcccttggggattagaatttccttcaaaaatcttggccaccaggggggatttcagcctggaggggttccattccactccctgcccactgggggggaggggatagctctttacatacatttcaaaggacagagacttgccgccctgtgtataattgctggttcttcttgagcttgagaagacaaattctagccactgttattgttgtttgccttggttgccagcataccacggccctg

SEQ ID NO: 413342 - DNA, 229 bp, Homo Sapiens
  misc_feature (68)..(83): n is a, c, g, or t
caccggcccccggtttattgaaattcggggagaaccttccccaaaaaaacccccagggggaaaggggnnnnnnnnnnnnnnnnaaagggccctttggttatcccaacagaaaagggggccctcctttgggcaggatttttataaactatccccgggaagcagttttccaaacctgcccccccttatttttccttaattccccccaaaaaaacccaaaacaaaagggggc

SEQ ID NO: 413343 - DNA, 100 bp, Homo Sapiens
tctgctgtaggtgtatgcgccgctgcctggactaccggacgccggtcaccgttgaattttcctattctgctgacgcgagcagccgtgctgtgccggcctg

SEQ ID NO: 413344 - DNA, 220 bp, Homo Sapiens
  misc_feature (131)..(139): n is a, c, g, or t
aaaagaccaacagcatttaagggccaaaaacagtggtccagttttacagccagccacaaaagctgggtggggggacaaaacccaatccttccccaccccaggcaaagcagtatgggacatgagtgggcatnnnnnnnnncccacgtccttatcccccaggccgggggggaaaccaccttttgaggaaacccaacccctagctcccactttgttttcataa

SEQ ID NO: 413345 - DNA, 121 bp, Homo Sapiens
aaaagctttaaaaaacatttttttgttttaaggaagggcaacagggcaaaaaaacttatgctttggggcccttgtttccctactggtcacattagtttagtttaaaaaattaagtttaata

SEQ ID NO: 413346 - DNA, 292 bp, Homo Sapiens
gagggagcagaggcagttgcctttattgggggccatgggctggctgattataataaaaggccacacattcgatcttgaagccaccgaaacctgccatgcacatgatggcctccaacgagaggcggtgggggaacttgaatgacgtatacatctgaccatttgacgagtcaggttggcctgacccaaggggatgcacacctctgcaacactttcaggctggaagggaaagacagcctaccgttgataggacccccaagccccgccgtacttgatgaagcacacgatggtgttg

SEQ ID NO: 413347 - DNA, 181 bp, Homo Sapiens
gacgtcctctcccgactccaacacagacgccagttcaaccgcatccgtggatttcctccagcctcacatgatctgggcccagagcacgccaggccccaagcggccgggcaacaccctgcgcaagtgagtcaccagccccgctgcggggctcagcaacggctaggacgacgagcacgtgaag

SEQ ID NO: 413348 - DNA, 160 bp, Homo Sapiens
ggtgtgttgtggtcgtaaccggagccggctgctgtgcatgctggcgctgaccttcatgttcatggtgctggatgtggtggtgagcccggtgaccatagagctggcgatgctctactactgcattcacatgctgtcagacgtgctgaagcttgtggtggcg

SEQ ID NO: 413349 - DNA, 316 bp, Homo Sapiens
  misc_feature (84)..(209): n is a, c, g, or t
aaacgggaaatttaaaagggggccattgggttcccatcccccaaaattttcagccaagcctggggccccaacaattttttgccnnnnnnnnnnnnnnnnnnnnnnnnnnnnnnnnnnnnnnnnnnnnnnnnnnnnnnnnnnnnnnnnnnnnnnnnnnnnnnnnnnnnnnnnnnnnnnnnnnnnnnnnnnnnnnnnnnnnnnnnnnnnnntttaaaattcccccggggcgagaaacccttccccaagctggtttttttcaagggaaaacctttgaaccccctccccccttttaagggcagggaactgggaaagccca

SEQ ID NO: 413350 - DNA, 145 bp, Homo Sapiens
gctttggtgtgaggactgacagcacgatgacccagatcctccacttgtacttcatggacgcaagagggtgggtgtaataccgcttgcagcccttctccctctgctacagcggggaatacacaataggaggcacctagaggacctt

SEQ ID NO: 413351 - DNA, 314 bp, Homo Sapiens
  misc_feature (126)..(163): n is a, c, g, or t
gggacagatggggtttagccatgttatccatggctgggtgtgtgtgtgatccatggttcctatttcataactcccaaagcccttgttagtcttttgttacaatgttgggagtgtcagcaccactgnnnnnnnnnnnnnnnnnnnnnnnnnnnnnnnnnnnnnngaacgttgcgagtgttaaacctcgggaaacaaaatctctctgacctttttctgccttctttcacctgcccaaggcaggaccctaatctgattttgggtcataagacccttattccagagaaggctccaccccataccctgggggcagaaat

SEQ ID NO: 413352 - DNA, 320 bp, Homo Sapiens
caaaagccgtgattttatttataaaagcaccctaaccacttttttggtacgaggagtgggacaggctccttttccaatccagggacccccatgaagtagctttattgcaaccaaacacacaggtatgtggcatcacagatctggttaactaacgacaacgatcacgctctctctgctagaccagcaaggtgaacatcaaactatgattgcgtaagaaccctcacatgaggattctccactgccgcttctacaacatctatttggtgcggtttgaaaccaatagatcgaccaactatcagcttgtaattgcaggttccact

SEQ ID NO: 413353 - DNA, 149 bp, Homo Sapiens
ggagtagcccattacttctaaggtaactgtcctgtccaaccccgtgcttcactaaaccgttgtgaggtggacagttgagacatcttactagtctgaggagatgatgaacacagctgaaggaatgatcttgtggtcagaccatgcatagg

SEQ ID NO: 413354 - DNA, 237 bp, Homo Sapiens
aaaaatatcccaggtacccatggtaaagacaggaacccccagaaaaaaccatttaaccaaaaagctttaacatctgtcagttaatctgaaccccaaaatctgggaccataacatgccgccgggccaaaaggaaaggatcatttgtattccctttctttttccttcccctctgtttgaacagaaaccccacccacctcttataatgctttctaaaggcccaccatatattaacgggcc

SEQ ID NO: 413355 - DNA, 187 bp, Homo Sapiens
  misc_feature (50)..(132): n is a, c, g, or t
cccccgggaggtaaaacttttttaaaaaacccccccattttaaagggaannnnnnnnnnnnnnnnnnnnnnnnnnnnnnnnnnnnnnnnnnnnnnnnnnnnnnnnnnnnnnnnnnnnnnnnnnnnnnnnnnnttgggaaagggggcggaagggaaatttcttcccaaaaagggaaaccccccatttt

SEQ ID NO: 413356 - DNA, 412 bp, Homo Sapiens
  misc_feature (161)..(319): n is a, c, g, or t
agaggtgcagtcttactttgttgcccaggctggagtgcagggcgccatcatagctcaccgcagcctggacttcctgcactcaaggcatcctccggcttcagcctccaaagtagccgggatggccaggcgcggccatacatggcaaaaccccatctctaccnnnnnnnnnnnnnnnnnnnnnnnnnnnnnnnnnnnnnnnnnnnnnnnnnnnnnnnnnnnnnnnnnnnnnnnnnnnnnnnnnnnnnnnnnnnnnnnnnnnnnnnnnnnnnnnnnnnnnnnnnnnnnnnnnnnnnnnnnnnnnnnnnnnnnnnnnnnnnnncaacaacaacaaaaatgaagtagccgggaccgccggctgtgtgccatacttggcttaaaagcattttgtttttgagacagggtctcactcagt

SEQ ID NO: 413357 - DNA, 199 bp, Homo Sapiens
tggaggaccccagttgtttggaggccacaaggaggtgggaggcctgactgtaacactccgcctgcatcccacagttggggtgtatcaggctcctgacgtgctccaccagggccaccctgtcctccatgtccttcttgagggcctcctgcttctgcaggaccatggactccaagtgagagacgctctctaagaggacccc

SEQ ID NO: 413358 - DNA, 234 bp, Homo Sapiens
acactgccacttcctttaatacaggggggcctccaccccccgcatccgatgcagggttacacgggggggtggttaaaacatccatcctactggacatacttagtttcggccaacagggggggagcccgaggggaatttccgcttccttggagccaggccctggccaaacctggagctcttccaagctgtggtcccaaccgggggggcttatgggccaaagcatttcctaccggc

SEQ ID NO: 413359 - DNA, 115 bp, Homo Sapiens
gtcacttgctgcttaaggtgggccatggtatgcgtcagccgcacctcgtaggtgctgatgtgggcttagttattcctaatcaggatgtgcagaggttcatctctttgtcgaccac

SEQ ID NO: 413360 - DNA, 161 bp, Homo Sapiens
gggtcctggaaaaaagggttattagcctcaacctcatgacctctaaaaggggacccctttcatggccaaaaagcttgaaacccgggttctccccgggatatgggggggaaaataaaaaatgctggggtcccaaaaggcaggggggcttatttttcaaaacc

SEQ ID NO: 413361 - DNA, 115 bp, Homo Sapiens
  misc_feature (65)..(65): n is a, c, g, or t
aatcttgaaccaggggtacaggggccctcttctcacagaggctctggtttttaatggggctcctncaggggaggcgccaccactcttgcctctcttttggaatgggaaaatccct

SEQ ID NO: 413362 - DNA, 206 bp, Homo Sapiens
ttttgggcagtttttacattaattaaaacagaaaacgggcccatgagctgcctactcattttcttactgcccagcctggcattggggttgggactctgatggccgttgggcagctttttcacgagggcttgcgggttctggagggaaacattggagcgatctcggccagaaagaattgtgcacatcagcagcacttccgctccttg

SEQ ID NO: 413363 - DNA, 202 bp, Homo Sapiens
aaactaccaggattttgcatgttctgggcccccaagggggccccgcgactcgaaggtgaatgggagggggaactatatgcactgcgtggataccttgggcaggggggcccccccggacattgggcccctacgggacaggtaggaggaaacttgggtggggcccaaaccggggggcagcgtgtttttccccgtgaagcaccgg

SEQ ID NO: 413364 - DNA, 149 bp, Homo Sapiens
ccacctcgtccatggaaatgtactttttgtccccaaccagaatcattgaaggagccatgacttggtcctgtgaatactggccggatgtgttccggcacacaaagcaatgaaggcctggatgctactcccccagcgagggggccacaatg

SEQ ID NO: 413365 - DNA, 174 bp, Homo Sapiens
  misc_feature (80)..(88): n is a, c, g, or t
gggcggtaaaggctggccaaaaacctggggtagggttcccccaaaaccaaagtatattagttcttggaaaggaaaggggnnnnnnnnnctcccttaaacatggaaaggccggaaaggccgggattttggaccattctaaaaaacaacccccccggggggggaacctttttttcc

SEQ ID NO: 413366 - DNA, 440 bp, Homo Sapiens
  misc_feature (392)..(392): n is a, c, g, or t
aattggatgattttggacaagtctgtgcatttattcatatcttattccatgtcaggggactcagtacaaaggtgaaaaagacaaagttgctgttctcaaggagtatactttagacacataagctagcaataaacaaacaggatgattttagctcatgacagggctacacagacagtaacagtgatgagatagagtgatggggaagaggtgcttaaaatggggttgtcaggaaaggcctctgctaaccaccagatctcatgggctcatcttgagatttaacccagcaaacctcttctgagccagttggcaccactgatctccctcccctcctttaaactgttgccttccttgatttctgtgacaagatactggtgtcactatctccttgtctnctcctacttccagctccctctttcagccttctatgcaggcacatcttc

SEQ ID NO: 413367 - DNA, 241 bp, Homo Sapiens
  misc_feature (140)..(196): n is a, c, g, or t
  misc_feature (198)..(198): n is a, c, g, or t
  misc_feature (230)..(230): n is a, c, g, or t
ggaggcccagtgttccccaatgcaaaaaggtttccacagcacattatagtccaactgtctaaagtcaataacagagagaaaattctaaaacactaagagaaaagtatccagtcacctacagagaggcctccccccaccannnnnnnnnnnnnnnnnnnnnnnnnnnnnnnnnnnnnnnnnnnnnnnnnnnnnnnnnanaataagtgctgaaagaaagaaatgtcacccanagatactacat

SEQ ID NO: 413368 - DNA, 199 bp, Homo Sapiens
acaaaaaaacaacccggaaattggccccgaactgggccccccacttgtccccggggaggaacaacttatccgtgtcggacaaaaaccccaaatgggggcccccggaaaaccaaaaaatggggccccccaccagggcaaacccgggaaaagccccctgggaaaagcccaaagaaaaacacttgggcaagtggatgccaaa

SEQ ID NO: 413369 - DNA, 480 bp, Homo Sapiens
gcggccgctctccctgtcctccaggagctcacgtgtgcctgcctgtgagcgcctcgacgacagagccggcgcctgccccagtgtctgcgccgggaccatggagtggccagctcgccgcggagacgtcgccgtgctttgtagcagcccctggactcgtatgcgtgggtcttctgatgcagtgtgttttattcggtatcaacatggaagggggagagcatgggatgttccactggtgtcctagggaggaagtaactggggagggaggacggttgggggggattcacctttaaaggatttgagagcttgtttattttgcagaataagagtaaattaatcccctgtgtgtttctgatcattaagaagaccacatcgatgctgttggttgtgggactgtcatttcagagtccggatccgaatgtggtcctggctactctgcgagggttgccgtgggaggaggtggtggagggcacgtgggcgtcc

SEQ ID NO: 413370 - DNA, 220 bp, Homo Sapiens
tgcgggtcttcatgaccatcaaccgtatgtgcaccgtctctgtctcatacatcttgtgcaccaactgccgattatcaccctcatgtggctgactgtatgttttatacactgctttacccaccttagataaatacttacagatttgcgtgcgtaaaccttatagctgggtgcggaggctgtgtattaatgtaaacaccttctactgtacagtcactacata

SEQ ID NO: 413371 - DNA, 157 bp, Homo Sapiens
caaaccacaccagctgggtaacggagcccccacaaaagaagggggcacccgcagggggcaccgccaggcgggacacccactggcaggggggcaaaagcttctaggggagcccccggcgcaccagggggaaaaggcggacgctgcgcagggaagccac

SEQ ID NO: 413372 - DNA, 165 bp, Homo Sapiens
gccggcagcctggggatgtggtctggaggggaggggctaggctctcttctccacctgctattggctccctgcggcgtagatcttagattcttcctttatttttgtggccttggaagggtcaccagaggaacccttgccttaaggcctggttttccctctcaccca

SEQ ID NO: 413373 - DNA, 315 bp, Homo Sapiens
actgaacgtccgtgataaaatacaacccagggccacctgcacaggggagagggccggggacggccccatcgctcttctcatgcccacactgccgaggttcccaccacgggggtccccattgcaccccagttccgggccgaaaaggctgcctgcgaatctctgctgccgggaaagagctcctgaagttgtggggcttggactccgctctggacatggccctccgcgggtttcccacctatagggggtctgcccggaaaggcgtcttcccggccacccttggacctcttccatagctaccccagctgcttctttgtg

SEQ ID NO: 413374 - DNA, 858 bp, Homo Sapiens
  misc_feature (271)..(282): n is a, c, g, or t
  misc_feature (483)..(483): n is a, c, g, or t
  misc_feature (549)..(549): n is a, c, g, or t
  misc_feature (771)..(771): n is a, c, g, or t
gggggaaaacaggaggatatttatgttaaggtacgcaccagctcagtggattcacatccaaaaagctgagccttgaacaaagactaagcaggatttttataagcaaacttacagaagcaaaacaaaggcagttaatcatataatgacaggtcacataatctatagcataactgatgacttggcataacttggggccttgcatagctggtggccttgtagctgcgttgaaagaaaaaaccaagaactggctaaacacagatatttgtcctcnnnnnnnnnnnncttcacccctgctctggaaggggggtgtctggagcctattcctttggattcgacttctcaaacagaacagcgttatcttataactggccttaaagtgagcttgctaagcaaaagaaaacttggtcttcttttctttttaacccttgccttgccacattctgggccttggctttttcttttcttggagggaatgaatgcagnacttattactatttttaaatttctgcctcactttaataatgataaaagggctgaatttttgccacntgtccatctgtgaccacgtcgtgctaaagcacacttgacacaccatagagcctcagatcaaacctcaaaccccagcagcttgttaaaataacattgccctacatcattattggaaggtctcgccagagtagtcccagctgctatctttgtcccttagacataaagacgcgtctttttgtggacagtgccacaaagcagaactgctgcgatctgacacactgnacgagtcaccggagcagacaggccaagcagatagaagcaagcaaactcttttgggcgggaatgatgactgcccgagctgccatgaga

SEQ ID NO: 413375 - DNA, 106 bp, Homo Sapiens
ctgctggacaggagttgatgcttactgcgccgctgaccagagatgctttactgaacctaactgagtgtccatcattcacaaagcgtggtctgcagactgtgaaggg

SEQ ID NO: 413376 - DNA, 123 bp, Homo Sapiens
aagatttgagattttattctaattcaggggcatcaatcatgtaaagagccatgcggttgaagtggtccgctgtggcacgcagccccacagtgatggggcgctttatgccctgttcatgttggg

SEQ ID NO: 413377 - DNA, 418 bp, Homo Sapiens
  misc_feature (138)..(147): n is a, c, g, or t
  misc_feature (181)..(189): n is a, c, g, or t
  misc_feature (221)..(221): n is a, c, g, or t
  misc_feature (315)..(315): n is a, c, g, or t
  misc_feature (345)..(360): n is a, c, g, or t
aaaaaggaaaagccacccccctttttaaggttatcaacttataattaaggggtttccattacccccctactgaaaggaagcccccgtttttgggcaaaacttaaaaaattccttggggaacccccggccggacccttnnnnnnnnnntttttaaaaaccttacaggggggtgttttcccannnnnnnnnaattatcaacccggggggggcaatgggctaanttgccaactgttttttaggagtcccccaagggggccctcaaaatgggggggcccctcagggccctaaaaagggaaaatttggggaatccttttncccaaaagctttaaaaaacttttaaccccnnnnnnnnnnnnnnnnaaagggaattttgcataaaagtcggggcaaactacaacagggttgcgggacccttctc

SEQ ID NO: 413378 - DNA, 262 bp, Homo Sapiens
tgggagtgtccactcgtcttccaccagcatgtgaacgtcatcacagtaacgtcagctgctcagtgactactgatcaccgtccctaggctacattgatgtaactgggaacagccatgagccccatagaaaatacgctgagctgcttgccatcattgatgagctgtggaaggatatcagactcatgtacgcattgagctagagtggtatggagagtcttaatcgtgttaatattcactataaaggactgtttctggagtgcttg

SEQ ID NO: 413379 - DNA, 428 bp, Homo Sapiens
cactcacctatcggtcattcaggagcatattgtttactttccatgtgattgtatagtttcaaagactccttttgttattgatttctagttttattcaagtgtagtcagagaagatacctgatattatttcaattttttgaatgtttgaagacttgttttacaaccaaacatatggtctattcttgagaatgatccaggtgctgaggagaaaaaaatgtgtattctgcagccattggaagaaatggtctataaatacctgttaggtccatttgttctatactgcagattaagtctgatgtttctttgttgattttctgtctggaaggtctatccattgctgaaagtggggtattgaagtctccagctattactgtattgaagtctatctctctctctttagctctaataatatttgctttatatatctg

SEQ ID NO: 413380 - DNA, 479 bp, Homo Sapiens
gcggccgccgggcagagacagggtgcctcagccacctccctccacagtggcatcgtgggtcccccccacagacagcctccttcctaactcctgagccacctggggagggggatgtggaggggctggtttccatccaacccgagggcgtaggggccgcggtgaggcagggctgttctcagtcacccctcacctccgtccccagccttggctgtatttattcacatcagagctctggcttgggcctcgggggcctggcacaccccagctgggctgtattctctcaaaactgcccaccctggagggcctcgaagacctcccggggccaccgggaaggctgtggcagctccctggtgtccctgttccacaactttctcctcctcggggagctctgatcaaccacggttccctgcagctgggcgacaacactccccagccttcctccccggggtctccagtgcccgcgaggaggggcgtgcgcc

SEQ ID NO: 413381 - DNA, 115 bp, Homo Sapiens
gggcaacccttttttgggaaaaatttacccccggggacctttttttggccaagcgattaaaaaagggcccccggaacccttgggtccccagggggtttaaatggaaaccatggga

SEQ ID NO: 413382 - DNA, 143 bp, Homo Sapiens
aaaaccaaaaccggggggggcggaaccccctttttggcaccctttcaaggtagccaaatcccggtaaaaatttttcccccggaaaagaccggcaaatcccccaacccagggttttttaaaagccgggggcctaccctgggggg

SEQ ID NO: 413383 - DNA, 453 bp, Homo Sapiens
tatagaaatgaaatttattcaaaaaaaggacacaaattagtttgcaaaattcagaaatataactggaaaagcaagcataaagtcttacattaagtggttagttgcttatcccttgttgatgcctattttatttgagagatatcccagttgtgctatgctaagttttgaaggtctgtgtagtctttaacttgatctttaaaaacaacagaatttgagtgaatgtcaataaaaccagtgaattataaatattctgtcttctagcatgtttgactagggctgccaataaacaaaattatatttcctaggacttcaggcatgaatactaatctattgaattttaatttaatattctatgaggaacctaggagagtatcaacaatttagacatctgttgagttattctcagaataaaactggacatgtgaacatttcaggaaatgaaataaaattctt

SEQ ID NO: 413384 - DNA, 303 bp, Homo Sapiens
  misc_feature (130)..(188): n is a, c, g, or t
caagatctttttattgttttattatttcctcattacaaaagcaatgcatgcttattacagaagaatcagaaagtacatccagacaaactactataaggaacactaataatcccacccatgagccaaccannnnnnnnnnnnnnnnnnnnnnnnnnnnnnnnnnnnnnnnnnnnnnnnnnnnnnnnnnnctaaaatggagtctggtcataatattgttttgtaaccagtaaattatttaaataccaattgctggatattgttccaaattagtcccatattgttggatgttttcttggggataaa

SEQ ID NO: 413385 - DNA, 103 bp, Homo Sapiens
ggacccttttggttttaatttttcttaaaccacaaggaccggggggcttaaacccaggtcaacctgaggggtccatttaaccagcttccaaaaggtttttttt

SEQ ID NO: 413386 - DNA, 345 bp, Homo Sapiens
gataaaaactttatttaaaacatgtaaagaatcatatagttcaaaactgcaaaaataaaagacaatttcttgtaacttaaaaataaagtatatatctagaaaccaccacattaacatctactatttatagtacaatctccaattcaaagctaatctttgtatttctgtattttgcaacttttgagctagaatcttcctccctatccaactatactgttatgtaaccccattgttttaacatttaacaatacaacttgggtattctctgacaagcaagaatatatactattgatcacttctatacacaaaataaaaacagttcaaatgactagaaactaattttac

SEQ ID NO: 413387 - DNA, 441 bp, Homo Sapiens
aacttatattttatttaattaataatgttttggtgtgttagtaatttctgtaaagtagcactccttaaataagttcctaaaaataatattggagccttgaacatttaatctcagctaaaaaaattattctaaaactgtcatgataaaaaaggttacaaaatttctctttattctagtcctgaattccttctccagaattttaatacaaaacgaattttcaggcacaaatagtcaccagataatgcataccgtaatttagcagacttaaccaaacaataaacacccctacaaaagtgtcactattttatcactttgtgctgtactcttctccctatacatctttaatagtggtcacttctactttacttctagcattcaatttagacatctcaaccccaaatttaataatctgttttatcaaacatttgttttgagaacaaa

SEQ ID NO: 413388 - DNA, 192 bp, Homo Sapiens
aaattttttatttgaaagaaagggaccaaacaaaaaacctaaaggggtggtttgggaccacctaataaaaagggaaagggaacccccacctgccttcccttgctttgggacccaggaaagcacccccccggtttggggaaaataaccccagggttaactttcatttttactggctccccaggggggcttggc

SEQ ID NO: 413389 - DNA, 103 bp, Homo Sapiens
tcgcgattctaaaatgctcatatcagccgatggtgctgagacgcataaaatatgcgagcacactagataagtactcctgctaggagtaccatcgtatggcaca

SEQ ID NO: 413390 - DNA, 481 bp, Homo Sapiens
aaacttaagggcacttttattattttagaaaatgcttacttccagttacaatgtaatccaggaaagacactgttatggcacaaaaattaagttttagtaagagttttgtaaatacatgagctaaatgaacatttacacaccaaacagcttcaaatatggtactttctggaaacagtttgttgctttgagtgttattcaaatccctaacttgtttgccttattataatgttctgtaacgtaaaggggaaaaaatattttgggcagtcagaaaccttaaagtgagtcaacccaagatttgcactgtaatataaaattaggaagaaaagtgccttccctgaccttaaatgtacaatgtccatatgctatattaaaggttatttaggatatcctcaatttgtaggggtggcgggtggtgatggtggcaggactctattcatctttggaaaacacatttactctcttaaatcatgcaatactctct

SEQ ID NO: 413391 - DNA, 253 bp, Homo Sapiens
aataaggggctggagggttttcccctagctgatattttcccattgaaaaactaaagatggttggaaatttcaatctttaagtaaggcctttggggggcccccatccaaaattagcgcataattttaaaacaaccctgtttgccaggacaaaaacttggggggggcaaatctgccctttaggcaaccttagttcgttttctgcacccagaaagggagggctggggcccagggaaagggggacccaaaagggctc

SEQ ID NO: 413392 - DNA, 112 bp, Homo Sapiens
tgaggttgtgccatgaagtgtctatctggcctgcaatgagcagcaagtccattctgacacgcgactggggcggttcgaagagttcggacaggtccttctcagggagcgtagg

SEQ ID NO: 413393 - DNA, 165 bp, Homo Sapiens
  misc_feature (41)..(96): n is a, c, g, or t
aaattccttaaataaaaaagacgggggtttcccttttcacnnnnnnnnnnnnnnnnnnnnnnnnnnnnnnnnnnnnnnnnnnnnnnnnnnnnnnnnggaagagaaccagggcccccaaatttaatcctcccaaatatttccgggaacttttggctttacaatttt

SEQ ID NO: 413394 - DNA, 578 bp, Homo Sapiens
  misc_feature (436)..(436): n is a, c, g, or t
  misc_feature (524)..(524): n is a, c, g, or t
ggccggcttgtgccatacccgcggtaagtggcaggccttgctcgtccaaacaaccaagaactgggggtgccccttggcttccaccttgcccaggctgtttaggcggttcttccgggatgccgatgaccttggataaagcgctggcaattttccaaggcggggccccggaagggccccaattgcggcttaagcgccatccaaaagccctggggccccctgtggtacaaggtcctgtgccggcccgcaattggggcttcctgggccggcaagcgcttcaagagcgggcccaagccttgggcgagcggctaggctcgcggatggaggagatgggcagcccgacccgcgaccggctggacgagggaatgatcaagtggttgatgtgctcgccaagctggatgagcaaggccagcagataactcctgcagccgatgccttncaggcccgtctgaagagctggttccaacccctggatgaagacatgcaacgtcagtgggccgggctggtggaaatgtgcagcctgcgtnggtcacaacgccgcccatggcccaaggaccaacactgaacgccaaacctgcagc

SEQ ID NO: 413395 - DNA, 470 bp, Homo Sapiens
ttatgattaccatgatatttatactgataatatttacaagttctatccaggacccttattttgagcaaaaattgactcttaatgagcaagaaattaaatcaatgatagaagatgaagaggaactgtgaaaaatgcatcctaaaactgtttcgattagacttgtgttgaacgatctaacataatgtaaagagcgatcaacttgagacctttagctcctgatatacatagagaaaggggccattcgtctcctcatgcagagggactaagacacctgaagatctgagaaaaccaatatatctcgccagaagatggagctgaagccaaacgcatgtagctatcgtgcctgggtatggaacactcaacgcatgatatatcccgactattgccacattacatagctgatggtcaaacgcttccagatagctcagaatgcacagaatattataataatagtttatgaatgtaagaaa

SEQ ID NO: 413396 - DNA, 268 bp, Homo Sapiens
  misc_feature (249)..(249): n is a, c, g, or t
caaaacacccacaaaagccacagggggggcccttgatgatgcggcccacttccagtttgtttttgggcccccggaaaaagcaatttctcccaaaattggggtccctgtttttaatccccccgcggccaaccaagttttcaaatttttggtttttccatttggcaaccaggtttttgtcggcctacccctctttaaaacaatattcaaagagtttcctgctggtggctttccctttgtaaaagagggcanaaatgatcggttttttttg

SEQ ID NO: 413397 - DNA, 271 bp, Homo Sapiens
  misc_feature (136)..(177): n is a, c, g, or t
gggcaactgcagctcactgcaatttctctttagcttgactgtacatttccctgagatacattcatgaagcatatgcttttcttctaactgctgtgtctgttctttttccaatgtctttttgacttctagttagacnnnnnnnnnnnnnnnnnnnnnnnnnnnnnnnnnnnnnnnnnnaatgtctccatcgtttctttcagcattcggttcgaactctgcaagtgagataacttggatctgaaaactactgatttactattccaggtcaaaa

SEQ ID NO: 413398 - DNA, 144 bp, Homo Sapiens
  misc_feature (52)..(62): n is a, c, g, or t
gggggacatctgtatttatttgaggcaccaaaacaacaggagggctccaatnnnnnnnnnnnctggggcaagactggctggatttggggcagggcctaaacccggaagggggaaaaaccccaacccccaaagggtgcccttgaa

SEQ ID NO: 413399 - DNA, 188 bp, Homo Sapiens
catgaaaataatattttattcatagttttccttttcaactattctttgaatagctcttgtccacatacaacagaactacaagctcataaataatgagtttcagtttttatgtatagattgtaattattgaagcaattatgagaggaaatctgaggccacaatattaacaccaaatgagaaacataggg

SEQ ID NO: 413400 - DNA, 115 bp, Homo Sapiens
gggtggttgaccaaaagtgatcttatattgtttacaaaaggcaaacccttcacaagaaacaagaggtattttgagttcacaatcagtccagtgaagcaatattatgcctcgtgcc

SEQ ID NO: 413401 - DNA, 151 bp, Homo Sapiens
caatgacgcgatggcgctctacaccaaccatatgctgaagggccccaacgttcgagagctgagttccgtgctgggccagtacacgtgtcccctgtgcggcgccagaggctacaacgcgcacaccatctagtactgtccgctctctaaagtg

SEQ ID NO: 413402 - DNA, 130 bp, Homo Sapiens
  misc_feature (42)..(51): n is a, c, g, or t
  misc_feature (96)..(96): n is a, c, g, or t
  misc_feature (99)..(99): n is a, c, g, or t
atgtgccgtcacacccagccctgcttgttttaaaaggggacnnnnnnnnnncttaatggaaaaaaatgaaacagagagccaaaagctttaactggntgnttttttcttttcttcaatgaaagcctctcat

SEQ ID NO: 413403 - DNA, 252 bp, Homo Sapiens
cttaatgtatatgtttaaaagctctattagttatagaaatctaaggggctcaatttagaagaataagaattagttactaacagtgtaattgttatggttgtaaagttaatttagcactgaaattaatcagtctagcaatgtcaaagatgatttctatatgtaaatgtggtattaaaatagattgtcacatcctttcaaaaacatagtgttgcaagcataaaatctgaatttaacttattcaaagactatcag

SEQ ID NO: 413404 - DNA, 146 bp, Homo Sapiens
  misc_feature (81)..(81): n is a, c, g, or t
caaggggaaaaaaccttttatggaaacccccccaacggaaaaatttgtccctggcataaagcccctttttccttggaaatngggttttttttaaggggccccaggaaggcttttttctcctccatggtttgaaagcggccatggcc

SEQ ID NO: 413405 - DNA, 328 bp, Homo Sapiens
ggagtaaatttattacatctgagtgtaaacagggagattaatgattatggcatttttttaaatgcctcttaaatcacctgacttataccgattcccatatgtaacgctgtgcagggaaagaaatggactaatcaaccacgccatttgttttcaattctgtccattatccacaaggtccaaacaattgaagcaaattctatagtgccctctgggtactggcgtttgtaagaaacccttatatggctagtttgaacctatactacaataccagcggtctattttatcaatgttatggagcagaatacagtatgaaggaaattcatggcag

SEQ ID NO: 413406 - DNA, 107 bp, Homo Sapiens
attaaacgattttaacccacatttaaaagggatttcattgttgttgtttttaaagcatgtccttgttttgttttccacaccgaacccgggaaaatatcaatccacca

SEQ ID NO: 413407 - DNA, 268 bp, Homo Sapiens
ggggaatgcaagaaaaagtatttcttttctttaaaggccaccatgcatgataatacataattaaattaactccagtttcacaattgggctggaagaatttgaggttctagagattccaggattttctaacagttacctttggagaaagagaaatgactgagatgcatacaaattaatagtccctctcccaggacaccaaaaccctgaacttatttccattgccccaattatacacatataattagtgccccctggaatttccaagctg

SEQ ID NO: 413408 - DNA, 319 bp, Homo Sapiens
ggaaaccattttatgaactttaatcatagcaaaggggtttttccgggagccataaaaccaacattcccccatatccaagggacaagacccccgttgggcatacaaaaaacccatattttaaaatggggttcatgggaaaacccaggacgggctaaaaccccatttataacagagagggcaggcaagaaggcttttaaaacattcaaatttataaacagcagctggatttcccctttacaaagccaatattgggcaacattgggacaattttttctacccagcccaccagctcatttatcgggggggcttttgggccctt

SEQ ID NO: 413409 - DNA, 138 bp, Homo Sapiens
aaaggggcaaaaaaaggcctttttttgggaattaaaaaacaccttcgggctggcccttggaagggaaattaaaatgggggacgggtttttttaaaggctttggaaccccaagaggggggcaaaacgtatttttgggtt

SEQ ID NO: 413410 - DNA, 215 bp, Homo Sapiens
  misc_feature (77)..(87): n is a, c, g, or t
aggggaaaatccaacccccaaaccaaaaattccggttccccatgcaggaaaaactacccaagttggggccgggcccnnnnnnnnnnntgggacccctggaaatttacaaaccccctgccaaaaaccttgggtcctgggttttttttcccccattggaacaaggaaaaaaaggattgggttgtttccccctgggtggaaccccctcactttggccc

SEQ ID NO: 413411 - DNA, 160 bp, Homo Sapiens
  misc_feature (60)..(60): n is a, c, g, or t
cgtatcggcccatcctggggagacgtggaccatcctcataccgtgtacttgcaatcatanggttgataccagcagctgagggtctagaagactcgccgtacatgttcagcataacttcattaacgggggtcaactggtcgatgatagcaggttgtttggt

SEQ ID NO: 413412 - DNA, 482 bp, Homo Sapiens
  misc_feature (287)..(287): n is a, c, g, or t
  misc_feature (316)..(316): n is a, c, g, or t
tggtggcaagaatgttaacccaaagctttgcttatggtgggggtgggattggggtctaagcctgatgtcactgagcaaacacatacatggcttcaatgtacatgatgacaaatgagtcttaattacatgaatacagatagtaagcttatactgtgcgtggtttgtgacatgcctgaaaacatgagtgtattgagtagatgaagactaaatcattaacagtcaaccattgtgctccttgaattcttttttccttaaaaaacaattttttaaggggattaacacatctngttttgtgttgaaatatctcttaacgaanatttatggtcttgaaataaagaccagggtgagaaaaaggagtcatctattttttcttattggctaatttattaatagccccatgggaaggacatatgaccatcttacctaaattgatgttttcttagttgtgtggcagtgtatatttttgagccccgagactacca

SEQ ID NO: 413413 - DNA, 570 bp, Homo Sapiens
gttttattgttcataaattggaaatggaaaaatgtttcagccttatatcagtcccctaaacactaaaagaaaattgactggtctttgaaatccaaaaatctgatcaccagaatgtaaatatcctttcatcaaatctctacttcccatatctatttgaaacttcaacactgtttcatctttacaactaattttaaaagaatatttgttacagcaaatataataaagcagaaagtattaggaggcaaaattatagaaaaggtgactagcaatcccaagagaattaattgataatctatttgagaaccatagagttgattagatacaagacagtttttaaatgaaaaataacaacaaaaaggtaccattcagagaagttgccaaattttagaggagtaccttataggcaataggttttatgcccttttcttaactctgggctattttgtcacctagacctttgccaacagcttctgtttctcactttacccttgtggattcaacatggtccaaggcacagggcaggcagggaacagatattgttgcatattattctctccatatctgagacat

SEQ ID NO: 413414 - DNA, 542 bp, Homo Sapiens
  misc_feature (91)..(472): n is a, c, g, or t
acatcttttatttaaggtagatatgccatgtggattacatttcagaaaaatagttaaaataaaatataaaatggagatgccttgttgctgnnnnnnnnnnnnnnnnnnnnnnnnnnnnnnnnnnnnnnnnnnnnnnnnnnnnnnnnnnnnnnnnnnnnnnnnnnnnnnnnnnnnnnnnnnnnnnnnnnnnnnnnnnnnnnnnnnnnnnnnnnnnnnnnnnnnnnnnnnnnnnnnnnnnnnnnnnnnnnnnnnnnnnnnnnnnnnnnnnnnnnnnnnnnnnnnnnnnnnnnnnnnnnnnnnnnnnnnnnnnnnnnnnnnnnnnnnnnnnnnnnnnnnnnnnnnnnnnnnnnnnnnnnnnnnnnnnnnnnnnnnnnnnnnnnnnnnnnnnnnnnnnnnnnnnnnnnnnnnnnnnnnnnnnnnnnnnnnnnnnnnnnnnnnnnnnnnnnnnnnnnnnnnnnnnnnnnnnnnnnnnacctgtcaataattttttgattgcaagtgacaaaaaatccaaattggtacaaaaagggactttttgactt

SEQ ID NO: 413415 - DNA, 252 bp, Homo Sapiens
ccagaacatgggcacgggcaccctttattcgggaccctgccacggggagggcaaggatctgcccgaaagggcgggggggacaaaaggccacgcggactgggaccagcccgctgcccgggcccacctattggtaaaagggataaaaccggggggcttctgaaacctaaggggacccccgggccccaagacgccttgtcgcggaacaagaaatgcctccccgggtagggtgaaggattccttttggacccttcc

SEQ ID NO: 413416 - DNA, 236 bp, Homo Sapiens
  misc_feature (92)..(102): n is a, c, g, or t
  misc_feature (129)..(137): n is a, c, g, or t
  misc_feature (158)..(168): n is a, c, g, or t
caaccaaaccagggggggttaattggaggggttccataaaaaaagccaccaagggaaccaaccggaaccccaagccccatcttcccaaaagnnnnnnnnnnnaaggttggggcaaaaggcccaataacnnnnnnnnnaaaaccccccaaggtgggaannnnnnnnnnnattttaaccggggcccttggtaaaaaaggggggggaacccttttatattccaaaaggttttaaggggg

SEQ ID NO: 413417 - DNA, 344 bp, Homo Sapiens
  misc_feature (64)..(73): n is a, c, g, or t
ccttggaggaaaagattaaaggaattatgacccatggatcattacaaactttaagcctaaatannnnnnnnnncctatgaaaaaccaggaaataaaaacagccggtctaagtaggacaaaaaaccataggggggaaaaaagaaacgttggtttccacattggctggcttggttaaccaaccaaaaaaggggctccgggtttcccaagtcaacaaaggatactcagttcccctttcccggaccatactaggaatggaaacaaaacactccttggactttaaatagcccttttaatccacggcccaggccctttcccattattttctcctttaccctaaatatcct

SEQ ID NO: 413418 - DNA, 295 bp, Homo Sapiens
gagtttggctatttattgatgccacacagagggaggttatgattacagtctggttttaagtactgaaatatccaccaaggtaccccttgaggaggctgggtagaaggggaaatggcaaagcagcacaaaaatgcagggagggcaatgggctgggccgtgtatgtcatacaattattttggaggacaatgatgggtaggattgtgctttacccaccatgttttttagtaacataacttaaaatactacttgaataagcagtacagacaacaggagtagcatcaaatatgttagcta

SEQ ID NO: 413419 - DNA, 271 bp, Homo Sapiens
  misc_feature (45)..(106): n is a, c, g, or t
gttcaaaaatcaattttaatgcttcttgggttataatgttagcannnnnnnnnnnnnnnnnnnnnnnnnnnnnnnnnnnnnnnnnnnnnnnnnnnnnnnnnnnnnntcaattggaaaggtacacaccccttgacacagcaaatctacgtttggaatttcatcctgtatttatactcctacttgtaaaaattgacgtgtacaaggatattgattgcaacagcattactgacaaaggcaaaagatagcatacaaactaaatattcatgaaaca

SEQ ID NO: 413420 - DNA, 110 bp, Homo Sapiens
aaggggggcccttttattcaactgggctcaaatcaagggacagggaaaccctggctgcctcccccccctcccagggaaaccaaaagcctttattcattttaagttggggg

SEQ ID NO: 413421 - DNA, 438 bp, Homo Sapiens
gaatgtgctgggatgagtacatctgagaatgggatgactgtagacaagcggccagaaagagaaatgggttttaatggacaagaatttaatgaactggcaactcactcttcccctaatctcaggcccttgttataaaaagttatcacagtggcgtaaaacctccatagaactctcattaacctcctcctggttttcattgctgccgctgttcatgacagacatatttctgtaccaaacttgatacaccatttctaccaaacagtatatggacaatgttttgagttatatattccaaatgtgaatggtaggatgtcaggctcaggtgcagttaacaaaggggatatatacttttggacatttctggtgcttacagaccaatcacaattttccaggacctaacctttcagcctcacatagagaaatttacaaacttaaatg

SEQ ID NO: 413422 - DNA, 545 bp, Homo Sapiens
tcaaagtttttaattttattctaagaccataacaatcccatgagacagatttttaatgatcttctgttttacagaggagaaaacgaagcttggactaaataaaataccttttctaggcaatatgttagcaggtcaatcaggactgataccaaattctatgacttgaggacctgagtcctcaattgtcttcatgggggcctcaggaccagggatgtggctgaggcattcatagaagatcttgtagaagacactggtgaaatcttggaccatatctttggacctacgtgagttgtctgcagccataggggacactatctggccaaactaagagtatagggcatggcagctgggctccacaaggtttggtattgagttgacagtgatgtgcaggtcttcaccagaagaggtggaggcaagggcaagggcatagcacaatcaaagtcacagggctgggaatgagcagggtgtatttagagaatataaagttagtctggttgggagcccatgaattatctgaaattgtaagcaaaagcaaaattgtgagt

SEQ ID NO: 413423 - DNA, 491 bp, Homo Sapiens
gatgttgcttccaactgttttattgctaaactatcatgatacaagccgtataaaaatactttacatataggaaaaataaactacattaaactggagattaaaaacatttgcataggaatgtgatgtattcaaacgcctttaacagtcaggattttctaaacctaagcctgccagcaccaccatgttggagagacctgtttgttggagaattggttttctctcctctgagggctgtagaggccaagaggggtgagtgaggttctttgacaagatgtccaggatgctaagcttgtcccaacagccatagcctcggtctgctcaggccaatcagaatgctgtgagcacctgctctaatggaaacaacatcatttgcatccattccattcaaagcttgaactcagcagggagtttattctggtcagccaacagctgcataaaggtagaatgttaataaccctttcacttccagctcccaggaccctgatggctca

SEQ ID NO: 413424 - DNA, 295 bp, Homo Sapiens
gtttttttaacaaaaaggctaatttgaaaatggccctgacccaatttttaccttatagtaaaacaggccctttggggagagggcatggggttttttggtgaaccgcccttttttatacccgttccaagggttttaacatgaggaaactttttcctcggtttaccaccattccaatattggtttggtggcccctagtcgccctttccccccattcatttttcacaagggtcataaaggggtcaaatccccccaattttccttggacatgtttgcccccctttaatttcatttttca

SEQ ID NO: 413425 - DNA, 516 bp, Homo Sapiens
  misc_feature (478)..(478): n is a, c, g, or t
gaataaaaacaattttaataaatagatcatatgcatatagtcatgcatgtagtatataaatgtaagaaacttttctgaaacgaattgccctgaacctactaaatagaacatatctttgtttcttccctctatccttcatcttgacctttattccaccgtctgatcatccatgtcttaaaacaaagtgttccaggttcagggtaattaatgtggacattcaaagaagagcactcacaggtagagcggatgttttagcttttccttttttgacacggcttttatatgctacagtttggacaatagactaaagtttgcccaatgatattgtggctcccagggtaggacttgattgtggtcaggtgcatccaattaattacaatctcatgtgttataaaagagtagtatcaaagatcaacagaaatatagataaaagaaccggggattccagtggaatgcggatgggagaggaagtcgggtnaacttcacggaagaggtaacatttgaactacgtcttga

SEQ ID NO: 413426 - DNA, 150 bp, Homo Sapiens
  misc_feature (99)..(99): n is a, c, g, or t
ttttaacctcaaaaggggccccttttttcctttcccggggggggccaaaacaaattattgcccaacagtccttggggggccaaaacaccctaaaccccnccaagcttttggaacccacgggcccaaggggtttaaacccttgttttgatg

SEQ ID NO: 413427 - DNA, 426 bp, Homo Sapiens
aagctggtctcttttattaaaattttaagttgcataagtaaaacttcctcattgtaattaattcaaattatacagaagtatgaaaagtaaggcaaaggtgctgcttctcccctcccagtccctataaccagtgtccatgcttccacaggcacacgcattccccacatgggtccatcggagagatgccttgaaactactcacttagcccaggaaagtcagaatatgtggtttcccttagtgctcatgttccagcaaccacctgcagcatcccctccacaatgatgggaggatttggcatgcaggatggctaggtctggtcaggagtgggttcatgatggcagactctgccacacagcccttcatgtagctgtgtgtccaaggggacagagactttggaatagcttaaagtgaggggggctaaatcct

SEQ ID NO: 413428 - DNA, 153 bp, Homo Sapiens
aaaaaatatattatcatcattattatcatttattaatgtggagaatagccttccaaagacagctgcaaatgtccttgtcacacagaggtagcagtcatcaggaactctgctgaccgatgctttaggtgcctgtttacaaggaagacattctgg

SEQ ID NO: 413429 - DNA, 477 bp, Homo Sapiens
  misc_feature (43)..(60): n is a, c, g, or t
  misc_feature (75)..(83): n is a, c, g, or t
  misc_feature (93)..(93): n is a, c, g, or t
  misc_feature (105)..(157): n is a, c, g, or t
  misc_feature (289)..(289): n is a, c, g, or t
acaaaaaaccccggccccaggctttgggaccccttggaaaatnnnnnnnnnnnnnnnnnnaacaaactttccccnnnnnnnnngaaccaccancggggacgggannnnnnnnnnnnnnnnnnnnnnnnnnnnnnnnnnnnnnnnnnnnnnnnnnnnnagggaagggggaaagggggaaacctattttttccggccccggggaggttaaaacaccgcctttaaaaacctgggcctgggccccaacaggggtggtcctgaaaaacagggaaactggccccaaaaaactcanaacccccccggttgaggggccccggcctgggcaccccaagggttccaaaactgggggagggacccatccccttactgaatgccaaaacccacccctctcggggtatactcgcccggaaaaaatttgtgtgggaaagggcgggccaccttgagaaacccctccccacctttcgccctggagagcgctgt

SEQ ID NO: 413430 - DNA, 618 bp, Homo Sapiens
tagggtaaatgtggcttttatttcctgtcagggaaagaagtaaaagtgtggctttcccaggtaacccagcctaaggaaagatgggtgtgctccggaggctggggctaggattgccagatcattctgatagactcctctgagtccactcgctggagctccatgcagggagggtgtgagtgagagtcattcccctgcagtagcagctcggtttagacagaggcacaaggaggtatgtgctggtgttcacaaaattcaaggcagagctggcaccctgagtgaggagcaggactgggtggccgacccacacccagtgtctgcctggtatgaggcctgaatgctgtgcagctctcctcccaagggccttgggggacatagaagcatcattgcgtcctacggctggtcccttaaatgtccatctcaaattgtgactcttcaccgcctgcccgcttatcttccgggctgctgggcagttggctctggctggcttgcatgggaggctcatcgctggtagggctagtgaccccaggaatggctggcaggtccttttggggggtttggccacaggtagttccgacactccatcagaaatttcccgtcatagataatcctggttcctcc

SEQ ID NO: 413431 - DNA, 279 bp, Homo Sapiens
aaaaggaaaaaaggcctcccaatttttttgatccttcctttccatgaaatttgaaccccccttttcccacataaccctttaaaatgaaaacccaaaaccccgggaaaattgcccctttttatcctttgggtcaccaagggttgaacccccttgaaaaaatttgcctggcccaagggggttttccccaatccttattaattggggggggaaaccccaaaaggcctgtttgtttaaattttttttgccccggctgaccctcccctttttccttttggcttt

SEQ ID NO: 413432 - DNA, 311 bp, Homo Sapiens
  misc_feature (157)..(262): n is a, c, g, or t
tggagacagagtcttgctctgtcacccacaccaaaatgcagtggcaccatcatggctccctgcagctttgacctcctgggttcaaacgattttctcatctcagcctccccagtagctgggactacagatgcgcaccaccacacctggctaatgttannnnnnnnnnnnnnnnnnnnnnnnnnnnnnnnnnnnnnnnnnnnnnnnnnnnnnnnnnnnnnnnnnnnnnnnnnnnnnnnnnnnnnnnnnnnnnnnnnnnnnnnnnatgagccagcatgcctggctgaaactatttttacagagaacttaggtgg

SEQ ID NO: 413433 - DNA, 209 bp, Homo Sapiens
agcctccaggccccacagtgctacataactcagatttgttgtttttacctgattcactacagattaacacactattatacaaaatgctaagtttttatttccctttgatacttactaaatgaaaagttattttgctgacaaaagcagaagcccacatagagtatgctggtatacctcctataatcaataacttgaaaataatcactgag

SEQ ID NO: 413434 - DNA, 577 bp, Homo Sapiens
  misc_feature (381)..(381): n is a, c, g, or t
  misc_feature (446)..(446): n is a, c, g, or t
gcggccgcgcgcgcgctctgccctcgggcggccctgctctcccccgcccggccccgcaaccccgcaataacttggctgggcggggtccggcactgggctagagaggtcgagcgcggcgtcttgagccgctggcgggaggctgctgcttccccgcctgcatcagtgcgggtcccgtggactcctcgcccccgtccccgcgagctcggggctccacatcaaggaaatcctcagcccgggaagtggcttccccagaaacagcagccccaagcctccgagagtcagtcggagaaaaggacacactcaggcgccctgcgacagggatggcccgtccgacctacaaggaacgcctcgtaacccggggtgatggggagacacggaatnaacacgtctccgctgtttcaagctttggataagcatctcaccctcgctcttaccccacgttttcnccccaatcttgagagggaaccaaaacacgcccccttcgggggggccgcagccacctctggggggtgagggctgtgggtccctctccggggacaaatttttttaaccgcgcttgcaccttggcacgggaggt

SEQ ID NO: 413435 - DNA, 360 bp, Homo Sapiens
cccacacgatccttactacttatcagctcaccaggcagtgggaggagggaataaggaacattctagaaatggcttccttaaaatcttctccaaggagcagaaacttctcatttgtctaagggtggatgaaggccactttacttcataacaagggctgagatgaaaagatggtaataatcattaatagaacagtaggggaacaggtgctgaatattcccagttctcagggctttggggacattaactggttgaatcctcacagcagctccatgaggttttacccacaaggaaatggaggcctgatgaggttatgtaggttgccctgggttccacgactgtggtggctttccaacagatggc

SEQ ID NO: 413436 - DNA, 232 bp, Homo Sapiens
aattcaaagaaattaaaatagggggccaaactggtttgaatttcaaatcctttttttctgccaaggatcaaaacaattagggatgaaaggaaaacaaaatcttggggaattaacaaacgggatagccaagtttaaaatccggagggggtaacgggcaatttcctttgatttccaaaagcttatttcaggggttggtagaagggggattaaaccgttggggttcccttccccc

SEQ ID NO: 413437 - DNA, 517 bp, Homo Sapiens
ccttaaattgtggatatatttcatggtaataacagaagatctaacaaatgaaaactttttgctaatttccacttagcatcaagatagcaaatcagcccacgaatgaagcacacagtatatcttgatatccttcagcaacgaaattggaataatattaagttgtccatgaactaaatggatatataaaatgccaagaggtccagctgaaacagagacctcttttttccctaaaaaagaagaatctcacttcctgggtaaagaacaggctggtctaccctgccaggaccagtcttctcagagtcttctacagacaagatttacctgataagtctgcactggggagaaaaatgcacatcacaggctctatcattctgtttcttaaccacttacaaataagattcctttactactaccaatgttctttacaatataattactcaaggttcatatggattttggggttttttggctaattcatcaagccttatcatgaatttaaaacaaaccattgacttct

SEQ ID NO: 413438 - DNA, 187 bp, Homo Sapiens
tccaaacaggggaagccccccgggcttggagggctttcttgaccacattttcccgctgggcatccaaaatttcccgaacccaggcaggaacccctggcgccggcaggcttactccagccattggccttttgaccaactttacatgatctggggccatgggaataaagactggagtggtcaaccctga

SEQ ID NO: 413439 - DNA, 480 bp, Homo Sapiens
  misc_feature (48)..(161): n is a, c, g, or t
  misc_feature (171)..(181): n is a, c, g, or t
  misc_feature (239)..(295): n is a, c, g, or t
  misc_feature (399)..(399): n is a, c, g, or t
  misc_feature (401)..(414): n is a, c, g, or t
  misc_feature (416)..(416): n is a, c, g, or t
caggggccggcggggtttttttataaaggcgggggaacctaaaccaannnnnnnnnnnnnnnnnnnnnnnnnnnnnnnnnnnnnnnnnnnnnnnnnnnnnnnnnnnnnnnnnnnnnnnnnnnnnnnnnnnnnnnnnnnnnnnnnnnnnnnnnnnnnnnnnntaggcaggannnnnnnnnnncccaaaccccacccggccccaccggggcttcaactaaaaactggggggggaaaggggnnnnnnnnnnnnnnnnnnnnnnnnnnnnnnnnnnnnnnnnnnnnnnnnnnnnnnnnnaaaaaaacagggaacttgggctgttggccccaaaccccaaaaaggaaggggtgctcccctttaaaaacccccggggggcggcccccaaaaatgggggagggtgnannnnnnnnnnnnnnanttttttgtaattccaaccctttttggggctgcattaaaaaaacctgaaaatctgggccctctgg

SEQ ID NO: 413440 - DNA, 430 bp, Homo Sapiens
catgtgtttgtttattattggatgacaaatgatcggaagccgatgcttccagaatgcttggggtatgcatagctgggcagtgggtcacactgaaggctgccagcaccggggccaacccagctccagcaactgcgctaatatcctcattttcacgtgggaatgcccatgattgccagatcaatatgataactaaatgttgttactgagccatctctgggctctacttgggggaggagttaaaagcccacaatgagcattcagagcctgcctcactctgcaaccgtctttgctgtaacatttgtcaagtgtccaattagccaccaagggggaaaaatacaaattgaggggtatgtgtggcttcataggcaacatgatgtcccacgggaagatgtgctttctggtgacacatggcggcgggggtggtgggctc

SEQ ID NO: 413441 - DNA, 457 bp, Homo Sapiens
  misc_feature (145)..(196): n is a, c, g, or t
  misc_feature (261)..(270): n is a, c, g, or t
  misc_feature (317)..(317): n is a, c, g, or t
aaattgcttttgccccccattaacaaaaaacccagaaagaccaacgggacccttgggaaaactgcttaaaaaaaccctcagggctcccctcaggaaggccccggaattcaaaaaactctaaagcttggaaatgctttcgtttggnnnnnnnnnnnnnnnnnnnnnnnnnnnnnnnnnnnnnnnnnnnnnnnnnnnnttggggattttcaaaggctgctctttaacaaagtttaaaatatcccgaaacataagggcttttgnnnnnnnnnnttgccttcagcatttgggaaaccctttaaaaacttaaaccactggtngcctgtcaaaatggaaaaaggctgggggtttttctttcttcttatcttggaccccaaacaacaactcttctgggaattgtaataatgtgaacccttctcttggaaaccccattagggtcaccaaaaaaaggggtcttact

SEQ ID NO: 413442 - DNA, 283 bp, Homo Sapiens
ggagctgacccaccacctggacaaggccaccagcaagtatcccaagtaaatcgaggttcacgtggtctcggacaaccttatggccttgggggattctaactaacagtgctcgatctataatctgaaaaatattagcaagatcggatgggctcataaccgatgctacaactagatattgttcaacctgctggccgagtgctattgaataagatcacacagggtatacatcaactataataacatgaaagtaaccaatgtgagcaggaacaaaaccaacttcacc

SEQ ID NO: 413443 - DNA, 265 bp, Homo Sapiens
ctgaaccccaaacggcccgtacccaaaaaaaggggcggggcccggtatccccccacaaaaacaggggcccaaaacccaaaaggccccgaaccctggcggggccaaccgggaaagggggggtggcccccgcccacctgtaaggggtcaacaagggggcccaaaacaccaatggccccaacaacccctgcaacagggcattgggggccccccaaaacccccaccacccaaagggcaacaaagggcgggcccccaccaaccccaatcc

SEQ ID NO: 413444 - DNA, 285 bp, Homo Sapiens
ggggataatcccctttataagtttttaaacaaatattcttatgcctagaaaaaatctggaaaaatatttgccccctttaaagggggtcttgctcatgggaaaaattgggggaaactttttccctttttgcttctttggggtgggaattcccaaaaacaggggaggggggtccctaaactggtttggaactggaggacctaacagccccactgggtttgctcacccaaatctgacaggggggagggccgtgtttgaggccccctgggatgcaaacccaaaaaagct

SEQ ID NO: 413445 - DNA, 225 bp, Homo Sapiens
gggtttcgctctccggggcagtggctgctgtcagaatcccttctttgaggaggcacctgctcttccgcttttctccagctttccatgagctgtggggagtagcttgggtgtcctctcactcttactagatagaaatcaagaaagcgccttgaggcgagagaagagtcccgtcaggaggcccagtggggtcctccacactccacggtccccgcctccgggaaggcc

SEQ ID NO: 413446 - DNA, 368 bp, Homo Sapiens
  misc_feature (194)..(194): n is a, c, g, or t
  misc_feature (328)..(328): n is a, c, g, or t
gatggctcctgaggaacaccagtcaccccaggaggtcttcctgttcttaggggtatgggcaagccacagcatagcctcagccatgtcctcataccacagggagctttataggcgaggagactatttctcaggattagaaaaggaattagggaaaccaaggtcactttcagactgccattcttggcagatagggntaccaagtataggagctggtaacttagaagagccacgcccagtcctgagcactggcactatccacacttctcccagctctagtcaacatctccttagccctcattaggatgggaagtggagggagccatacttncaaaggattcttcagtgggatggtcgggaagaggtcaacc

SEQ ID NO: 413447 - DNA, 166 bp, Homo Sapiens
cccagcctggccgctgggaggccgcgtccccaccggagggggcagggcgcactcacccggccgccctgaggccgctggcggcctgttggcttctccacaggcgcgctcgccgttcaagcgcgctttgtccccgccccagatcctggggggtgagcggtggagaagg

SEQ ID NO: 413448 - DNA, 442 bp, Homo Sapiens
  misc_feature (361)..(362): n is a, c, g, or t
  misc_feature (388)..(388): n is a, c, g, or t
  misc_feature (430)..(430): n is a, c, g, or t
gaaagctgacatttggctgtgggagcagaagtaaaaagagacacggcgagacggacctgaggaaaaattcccccagcatagactggtgaaaagacagagggctctggaattaatcaagctgggtttctgcttcagttttgtccctcatagttactcctctgggaagctaccaaagggcgctggattgatggtgtcacctactgaccaaaatccaaaccaccaggacacaatcacctcctctctggggctctcaaagcccacccatggagcacatggacagatcagcatggacttcatcccctctgaagcccataaaaatcctggagtcagccgcaacttggggatacgacctgcctgtggnnaggagctacccactctggctctcgtnttggctgtgagctgcacacttgtacggatgacctgcctgtgnaaaggagctgcc

SEQ ID NO: 413449 - DNA, 502 bp, Homo Sapiens
  misc_feature (344)..(344): n is a, c, g, or t
cccaaggaagcaagagagaaactggcacacaagaaacacttctaagtgactgaactctacccacaatagaagtaacgtgacttttaatgtcttaatgatctgtggttaaagtaggatagatgtgccctcacctctgatcaaccgcttgtttttgtgcctatttccctttcaagatgtcacagagattagccttttttttcagctctcctttggtattcaggtctatgcagtactgtgatatttttactgcataaaatataattgctatttcttgaatcttaaatttaggaatttctctcatccatcttttttatttaacattggcatatgaacttaataaaagnactaatatgccttaaaaagactagacacaccacaacatcacagggcatatttctataaagagaggaccttatatgcattctctccctcactcttctttacttgccgagactttctactctttgacttcattttctttaagctatctaggaatcctttt

SEQ ID NO: 413450 - DNA, 457 bp, Homo Sapiens
  misc_feature (126)..(126): n is a, c, g, or t
  misc_feature (378)..(378): n is a, c, g, or t
ccttaaaaaaatcagtaaaacgaattatacccagagccttcaagaaagagtcatgctgggtatcctagatagtcacaggcttgacctgccctggtagacatttttcagctctctctgcccaacatntttttccctcgctcatggacacatctacttctaccctccactcccacttttgctcatccctggcccattctatctccctgcttgggtggagctgacttcaccccatgctccaggaggaagcatgtggtccaagtttggccaatcagaatactgcgcagactcctgcccacatggattggatccaggatgagcatgtgactcaaaccaagctaatcaggtctagctagaggtaatgttccctgctggctttgnggttgactggaggagctcttgtttaccaaaatttggagctgttggcagctatcttgccaccatgagggcacagctagtt

SEQ ID NO: 413451 - DNA, 474 bp, Homo Sapiens
  misc_feature (135)..(180): n is a, c, g, or t
  misc_feature (216)..(229): n is a, c, g, or t
atcagcagaccccctacagaaaacgtagtcccagatgccatgcatatgtctctgagttgccttcttttcccagatcttggccttgtaattcttcactgctttgtttcctgcccaatactctcaattagacttaannnnnnnnnnnnnnnnnnnnnnnnnnnnnnnnnnnnnnnnnnnnnnactttaaaagctgttcaaaatgtcctcccccgcccnnnnnnnnnnnnnnaattttgagcagctttttaagttgtcctgaactgggaatttggtccaaattacccagtccacagttattagaagtagtcctaaaaaactgactttgacgttcccattatatattgggaaaaggctgccactctttgaatttagtgttcagaaactgtggcccagctaattgaacattgtcttttgaaaggagttttgtttagagagcagcacggtaatactggttacccggggatggggtggcac

SEQ ID NO: 413452 - DNA, 480 bp, Homo Sapiens
gccttttgcctatttatgtagaacatcctttttccaaaggctggtggtatggtgtgaaaaacacatgcttttgaaagtagtgagtgcctaattataggttctatatatgaactatacaagagggcacagaaaaggccaagaatgagtaagtgcaaatctgctttaaatagttccttggagataggaagaattaggtgaagccccttgactctaaacttaaggtttcaagggatttctagaaaaagtttaaaaactctgtacttttctccctggttgtagatccctgatacaggagatcctatatggaagaagatcctatataggagaagatgtctttgtggacagttctgggccctatatacctcatgtctttctggcataaaagaataaaataaaccttccttggacaggcctgagctttcaggatgccattactttgaaacgtgaatctcagttgagagtttctaaagcttaatttta

SEQ ID NO: 413453 - DNA, 553 bp, Homo Sapiens
aatttagaaaatatactctattaaatatcagttgattttctttccaggtggcatccattaggacaaacattatgaaaaggccactgaccaaaatgttgatttcctagctgacacctggaagaaaaataaacttatgtttaatggaatagactgtctaaatccctgttttgagaagagttcacattcatgaatatgtattcattgctgaattcaatagattcgagtagtgaaggacatccgtatcatagaaagtcgcatctattcattaacttacaactttccaaagaaacaagcaagaatgcagcttgagatggagtgctggcaatacgcagttcattcctttattatgtgacacgtttatcatgacctgcatgataactaatgaaataaatatgagatttgtgtattatctgtggcctaatttgttgaacttctcattttaagttacagtagcacaatcctaaatcagtattataaatgagctgtttatggttttgtcttattcagtgttctaggtgcattatgtttttttatttatacatttcaaataatt

SEQ ID NO: 413454 - DNA, 163 bp, Homo Sapiens
  misc_feature (16)..(16): n is a, c, g, or t
  misc_feature (62)..(62): n is a, c, g, or t
  misc_feature (132)..(132): n is a, c, g, or t
ccgacactggcctaanagtcaccaccttgatggactgagttgggcttaaaacaccccgcggnggcagagtgttggcaagtaggcttacgtgtctgtgtgtggagtctatctgcaatgtgcagtcatatgtgngctggtctcgcgtatgtgtcccgagatcatg

SEQ ID NO: 413455 - DNA, 501 bp, Homo Sapiens
attacccgaaaaagaagccctatgcttatttgcaattaccccattccccctttctgaggcccctggaaaccattaatctactttctgtctctacagacttgcctcttctggacagtttatataaatggaatcatacattatgtggattctttcattcagtataatactttcaaggttcatctatcttttttcctttttatggccaaataatattccatcgtatggctataacacactctgttcatcagctgatggacatttgggttgtttccacattttagctactattaatcatgttctgtgaacatgagtgtacaagtttttgtgtagacatgttttcagtgctcttgggtgtatacctagcactggcattgctgggccatatggcaactcaatggttaactttttgaggaactgccaagctgttttccaaagtgactgcatcatttgcattctcaccaacgataaatgaggattcagatttccccacatccttgtcaa

SEQ ID NO: 413456 - DNA, 502 bp, Homo Sapiens
tgttttatttgactctggttcaaaccagactatcagaggttttcggggtgggagaactctgatcagggtcatagtccagaataataaaattcatatttgagttggcttcctcttgggagttatctgatgggatggctcactgccatctgagggtcccagtttggctcaaatttctgattctaggcagagccccaagccctgcagctgacagtgaggtgggtggtataccaaaacctaaacgaatgcaagttggagattatctgggctttcttcatcttcctgcatgagttgacggatggagaatcactttctgctgaagatcctgcctagtgagatgtcctccgcccacccaggactgaaaactgcctctggaattaattatcaggacagtccaaaaactcccccaggcgtggataggtggaagctggaaaactgcccctgtccttgccacacacctcctgctctatggagccaggcagctggcaagggaaggggagatgag

SEQ ID NO: 413457 - DNA, 532 bp, Homo Sapiens
gtaccattaatacgtcaacgggaatacacatttggaaagacccacaaacttcagaccattggccatagaagaaccttggccagcttgatgcacctggtgctggatctattccccctgttatcggataaagtctaaatcctaggcaggggactgttcatgattcgagaacacttcacattgaacataatgtacaggttgaaaagcacattgtcagaacgactgggctttgaactcttatcaaccatagtctaccaggttctaagggagtccttgggattatctatgaatcaaagcatcacgctacataggcagtatatccctagcttcattggatccatcgcccaaagcttttaacagaacatacgggcttgtggatagctattattatctatggaaagcatcgacaggggccagcaattttgatcaggagtacagatggcctaataggacaaatggtaaaaacttcttgagcatatattgggctcgtgtgtgaaagtgttgttcgttaacttagcgacacgatatacgagac

SEQ ID NO: 413458 - DNA, 522 bp, Homo Sapiens
ctcgccaatctaggctttattagtcttatttacagattaggcaactgaagctcggggaagttgagtaacttggcggggatcacatcacaggtagagcgtggagctgatccaccagctgatctgaatcacatctccctgcagagcctgggatctaaatccaccactgaggctggctgcctctgagagctgtattcacaaggaaggattttgcccagtgtcttcacaccctgccagccacatcctctgggacagacctaaaaccctgctaagttagcagaaactctgaggtctgcccagtgagctgggaaggcttatttggactcttccgagccagagcagaaaagcacccagaggcttcccagtgagcagagaggggcctccctccttgattgaggcatgggaagggctgtgtatttgctgagcactctgagaggagacgttcagcactggggtggcatagatcagaattaacagaattaagccagtgcttttggcctcaaagggggtttctccatcccagat

SEQ ID NO: 413459 - DNA, 548 bp, Homo Sapiens
  misc_feature (331)..(345): n is a, c, g, or t
gaaagacagcacagactgttgctactgggcattttctgtgaatctcaaataactaacactaacaaaggaacatactttggggatgcagatctcaagccttacaggtaactgtaatggttgtaacattcacatcttaaaataaaatctcccaggaaaataatctggaattaattccaaccaattctaatgagaattgagagaacttatctctatctcatgatttcatattcttgatatgtgagctcagtaaaattactttaaaaatatgcaaattccatttccataagtcttttatactatcagccttgagacttgattcataaagaaatannnnnnnnnnnnnnnggacagccttgcatcatgatccattcatagggaagtgcagagtagattatttccatgaatagtatgcaaaaagaaaatttatgaaatccttcaagttattttcagtctggcatgggtctatttgttgttaacaatgttgccagtcataccaccactaaaactatgggaaactgggggtcacaaaaagaaaataacacaggtaa

SEQ ID NO: 413460 - DNA, 142 bp, Homo Sapiens
ggggaatctcactgactaagcatattcggtcactgtagtgtggctgcaaactctcaggcagtcccttagacacaccactccatgccgaaaagttcccggggtctttaacaacaagatcctctaggttattcacgccgggaat

SEQ ID NO: 413461 - DNA, 229 bp, Homo Sapiens
  misc_feature (29)..(29): n is a, c, g, or t
cggcgaggagcatcccctgctcggcgcgngcaccgtggagctgtgggtgcgcctcgcctcccacctgcgcaagctgcgtgagcggctcctgcgggatgccggtggcctgcgggagcgcctggcggggggccaggccggggccttcaagggcgccttgcgcggacggagggcctttcttttgcgcctgggtccccgggggggactggggcgggcgcgttcccgcgctgtt

SEQ ID NO: 413462 - DNA, 520 bp, Homo Sapiens
ataaagaaaagaggttttattggctcataattctgcagactgtacaggaagcatggtgctggcatctcctcgacttctggggagacctcaggaagcttttactcatggtggaagataaagcaggagaaggcacatcacatggcaaagttgtgtgtgggggaatgccacatacttttaaacaaccagatctcacatgaactcagagtgagagctcacttatcaccaaggggatgtgccaagccattaatgagggatccacctccatgaccaaacacctcacaccaggccccacttccagcactggagactatatttcaacatgagatttggaagagttacatattctaaccatatcaggcactgaccccgttcatgagcggtctgacttcataatttaatcccaccctaaagtccccacttccaaatacccatgcattggggattaggtttcaacttacaaattttggaaggacagaaacattcagaccatagcacccctcaccagttgagggacattttg

SEQ ID NO: 413463 - DNA, 196 bp, Homo Sapiens
ctagaacattgagctgcatcttgcttctagatatcattatgcgcactagtacagctggtatctcatgtgtggtgtgcgcagctactgtctggcgtggttctttcctgtatgagagcgaatcaccttgcgtggacagcactggtggactcttgactgtgtggcaggtggatgtgaatgaatcgtgtacgtgaaatat

SEQ ID NO: 413464 - DNA, 223 bp, Homo Sapiens
  misc_feature (53)..(53): n is a, c, g, or t
  misc_feature (103)..(103): n is a, c, g, or t
  misc_feature (211)..(211): n is a, c, g, or t
gatgtgtgtgttttaatcgagaagagattccttggtgattgacaacagtgtcngaaatgttagaatgtccttctttcttcagttttactcgcgggtcttctgnttttgctgcctgcggtctgctcaggtctccgctggcttggtgaggagccgcctctgcctctgtgccgttggcgtttagctttggctctggctctctcctgctcccggncgggggttgcct

SEQ ID NO: 413465 - DNA, 543 bp, Homo Sapiens
  misc_feature (288)..(466): n is a, c, g, or t
  misc_feature (505)..(505): n is a, c, g, or t
gcggccgcgcaacgtccggcaccagagggctcgctgcacctcggccggccttccatgccacgcccccgggccaggccacgccccggcccgagcgaccatcgagactccaggacctccgcggcgcctagagggatcccgaaaacgcctgcgaggccagaacggccgaaataacccaccccagcgggccagctcttcccgccactctcccttaccctcccacccctgtcctactttggaaaccttcctcgctccttcctaatcaggagagcatggggactttctagggtnnnnnnnnnnnnnnnnnnnnnnnnnnnnnnnnnnnnnnnnnnnnnnnnnnnnnnnnnnnnnnnnnnnnnnnnnnnnnnnnnnnnnnnnnnnnnnnnnnnnnnnnnnnnnnnnnnnnnnnnnnnnnnnnnnnnnnnnnnnnnnnnnnnnnnnnnnnnnnnnnnnnnnnnnnnnnnnnnnnctgtatggcagggtttctcaacctccactcttgacattntgggcctggataattctttgttgagagggaaggaggct

SEQ ID NO: 413466 - DNA, 205 bp, Homo Sapiens
cgtgatggagacggaactgatgccgtcgggcccgcagcatacttctgtgggctgtgtgtgtaactccaccgcggctgcggtcgtcggctaccatataaacagcccggaccgtgtctagttgcccatgaatgccttcatggtgtggtccctctggcagcggcgcaagattgtccagtagaaccccatgatgcgcaacctggagatc

SEQ ID NO: 413467 - DNA, 286 bp, Homo Sapiens
gcgtgatcatgttatccaactggatccattcatgggacccaatctgatccttcatttgcacgttcttgaggcatgagatggcatcgtagtactagtgatcatctcacatgacatgcacctcgcggtacaaccggtgtgcctcctggtggataagtagcactgtctttgtcttctcttcatctgtaataggccatggtatctgacttgtccggccagggctctcgcacattagaatctccattgtgaagaataagggtctggagatatgtttaaggtcatacatatc

SEQ ID NO: 413468 - DNA, 169 bp, Homo Sapiens
gccccaattgttcgcccatcatgttgccaatatctaatatgttatttttttccacacttgtccccacaatttttaagcggatctcatctttctgcttaatcacaatattctcatccattgccttgtaacatgttccgttttagttcggatcaaacttcattttttcagg

SEQ ID NO: 413469 - DNA, 270 bp, Homo Sapiens
aactcatctacataaaagagggtaagctggattgcagccagcagttatccgggtcaacttcagtacactgtgttttgaaaatttccagtgggaatccttccacacaggaggtatcattgttcccactgggatgccccttcccaaattctctgtttgttccagaataattacaacctgaagagaaatctgcctggggttaaagtcagatgttttgttcagataaaacacaggcagcccgactggcaaagcacaacttattcagtgttcctg

SEQ ID NO: 413470 - DNA, 165 bp, Homo Sapiens
  misc_feature (99)..(112): n is a, c, g, or t
ctaaagttaattttgtccccttggtatgtgatttccatctctttaatattgtaaatctgactgtaggaattttaacgcacttagcctaaaatggtatcnnnnnnnnnnnnnnaaagagatcctgtgttcagccaaggcctaaaggatatcttttaaatttggtca

SEQ ID NO: 413471 - DNA, 513 bp, Homo Sapiens
  misc_feature (491)..(491): n is a, c, g, or t
attgtcttcattataaaatcaaacactgctttacagtatagtaggtatgcaaactggcacacaagttgtcctcaatttacctttcagattgtatacccaatttaatcaccataccttttccaaaagcttttgtttcagtaacactgaaattctcatatgtcctatatggcaactcagagttattttctatggttttacaaagaggcatttcttctgctagtgatatcctttcattctcttcctgcacattcttgttcactattcaaaacacagcaaaaatgtcactttccttgtaaagggcttccggactatctggcagtgcttattctgagaattcatattgactctaactgtccctgcaaactctggaaaaaataatccagaaaaattagtatgatagtatcattagtattgttctcgtaatcattattattatattggattacagtgacttattatatggctatctccctgagcagcttctgagattntgaagagcaagaaccctatcta

SEQ ID NO: 413472 - DNA, 366 bp, Homo Sapiens
aacaagttccctaggtaattctttattcaaaacttttttgatgttgtttatattttgaaatctgtcacacatacagaagagtttataaaccatatatacatagtttctaacataaaaattaaacaaacacctgtgtacccactacccaggttaacatattgaagattgggagctctggtgtgcccagatgtttggtacaccttctcccccatcacagggaactactatcctaactttcgtggctttcatttccttagtcaacctgttaggaatcgactccatgtaacacacgaaaagcagcttgcagaaacactggattcacacatggaggagaaatgccaactcacaggcaagcacagtgatgac

SEQ ID NO: 413473 - DNA, 190 bp, Homo Sapiens
tgatggcgcctcatgagtgatgttaccgggcatatttataaaaggctttatactgggttcccagcacctaaaattgggacaccaagtcatttaatttatcacctagctctaacagagactccatggggttgtgcagaatgatttcggtctcatataaactgacctgcactttaatcatgggatcatcttg

SEQ ID NO: 413474 - DNA, 101 bp, Homo Sapiens
aaaatacaagtaagctctttaatatctaacatagaaatccaatgtctgacacaaacgcaatattatgggcactgggcaaaaattgacaaactgtaaggagg

SEQ ID NO: 413475 - DNA, 434 bp, Homo Sapiens
atactagagatcaacctcaacttgatgactggcagtttttgaaagggatttggagaagatgcatttaggttggtgtgtaagcctgtctcaggcctgagtttgaaaaaagagcctatggctcagccaaaaatgatgagagatgagtgcccactggagctttcctagtttttcgggattccacttccagtgctgtaactccatgctgccatgtggtcaagcaacagcaggtcctctccccataagagaaccttcctctgactgcaggagtgttgccctctgcttaacatttgctagtactctatgtcttccaagtaggatttttcctttccagaggaaagtaatcacaaacaaaaatctttatagcaaaggacactgagaagctctttatcccctttcactagcttctgttgtgagggatgaaactgaaaggacaa

SEQ ID NO: 413476 - DNA, 500 bp, Homo Sapiens
gtcacgtttgctttttattatgttgtacttctagattttatccctgactactcaactatttgtccagggtaatataggagcattacgttagaatatactagctttggagtgagttaaaatgttggttttcagtaagtaaaatttaagtgtcccactagaaagaggactgtgatttttcgcggttggggtcaaaggtaacaggaaacaaggtaggcaaaaaggggtaaagtttaaggctctgcacacaaatgttaggtgttgttactgcaaaattgaacaaagaacaagaatcttgggcttgaaagcctggacttttccctagaaacaaccattcacagtgtagggactgaagggccagctgtgaggcagccgagctagcgccctatcctcacaaagggagtgaaagacggagacgggtatcgggaaaaaaataagtgctgcgtccaagaatttaggagtcagtccatgtcgcagaacagggagaagggctgggaagaaaa

SEQ ID NO: 413477 - DNA, 139 bp, Homo Sapiens
cggcgaggtgcaggccatgctcggtcagagcaccgaggagctgtgggtgcgccttgccttccaactgcacaagctgtgtaagcggttacttcgagatgccgatgacctgtataagcgtctggttgtgttccaggttggt

SEQ ID NO: 413478 - DNA, 131 bp, Homo Sapiens
gtgtaaaacttactgccaaacctttagtatacaaaaaccctgaggccaagattgtactaggcctattaaaaaaagctgtgaacagctacatcatatacacaaaagggatattcctggagtgttctccaccc

SEQ ID NO: 413479 - DNA, 441 bp, Homo Sapiens
  misc_feature (54)..(69): n is a, c, g, or t
aaagttgtgacaaatttatttgggactgtttgggaagaatcaatgatgtgcatnnnnnnnnnnnnnnnngacattaactccaagacaaaacgttgtatgagaatgaaaatgtaagcacattaaattaattcatgagtgaacatacaagtatgatcacagctatgcaaacaggtacatgatctaaccaaaataatattagaaggatgtgaaacaataaaagaaattttcacctgtcttaatagtaagttgacaaacacctaaaaaataaatggctgtataatcatattatttagaaacctaaaaccaaaaactgaaggctgaaagaaccgagctagaaaaaactgaaggctgaatgtctcttgggatgggactgaggaataggaaaggatggagcaaggggctttccttattagccttgaagtaccattaaactatgttcat

SEQ ID NO: 413480 - DNA, 516 bp, Homo Sapiens
  misc_feature (129)..(175): n is a, c, g, or t
  misc_feature (197)..(471): n is a, c, g, or t
aaagtgttaacttctcaagattctgcctgtcatctgtacaatgcagatactgaaatttcccaaaatttaacaaaataggaccgaggttatctggttttctactttctccatgctctttattttcttacnnnnnnnnnnnnnnnnnnnnnnnnnnnnnnnnnnnnnnnnnnnnnnngagacggagtttgctctgtctnnnnnnnnnnnnnnnnnnnnnnnnnnnnnnnnnnnnnnnnnnnnnnnnnnnnnnnnnnnnnnnnnnnnnnnnnnnnnnnnnnnnnnnnnnnnnnnnnnnnnnnnnnnnnnnnnnnnnnnnnnnnnnnnnnnnnnnnnnnnnnnnnnnnnnnnnnnnnnnnnnnnnnnnnnnnnnnnnnnnnnnnnnnnnnnnnnnnnnnnnnnnnnnnnnnnnnnnnnnnnnnnnnnnnnnnnnnnnnnnnnnnnnnnnnnnnnnnnnnnnnnnnnnnnnnnnnnaacttaagtaatacaactttactaaagaaaggttgggtaaaaaag

SEQ ID NO: 413481 - DNA, 223 bp, Homo Sapiens
actcaagctttatgccggtgcccatatgtacattttccatacaaacttctaaatcccatgcggttccttcgccaacatgcacttcaaagtaacgtaaaaactaaggtgaagccttcacaacccaagacacaccgagaaggcacttaatccccttggagatgccaccttgattctacttggtgtatacacgagtcacttgtctgcgatccttatagagaactag

SEQ ID NO: 413482 - DNA, 331 bp, Homo Sapiens
cccattcacttgctggctccattgcctcataatccctaggaatatttctggacatagaacggtcatccataaccatcagggatttgaacactcttccctcttgatccaacctggtgcgacataactgtctttccagcattgcggcagtcatgttcaggagacattcgctatctttgacaccaagagatggactgcctgtttgtgtcagagagctgtgccaaccgtcggtgtaaggataaagtataagtaccagttcttggtgtcagttgcacaagacatcctctggctgtagactgaggagcatggtcctacggacatgcatcgtatgcca

SEQ ID NO: 413483 - DNA, 477 bp, Homo Sapiens
  misc_feature (50)..(58): n is a, c, g, or t
gctttgatggggaaaattatttcaatgaccagatattctcattctaaagnnnnnnnnnctcatatacactgttctgaaaactttagcactgcttctgcttgaggacactacaggctgaaaattgaatgaagaattagaaaattcaaaacatgaacagaaagctcagagctagtcagccgtgcctagctcagtcgcttgtcttcctgctgtatacatgttctcacggctgtgattttatgctgcatacatgtgacagattcaacttttcagcttgtgaaaccaatccctgttcaaagtacacaacaaagcatgttgacatcttgtgtcattctgcaaagagcactatgacttctgggtttccctgagtcaaactggatcatcgtggcctaattagtgtggtgccagcccattcccaaccatctgccagatgcctccaagccccaatgtggcagtcacgtaaccataactcaatagctg

SEQ ID NO: 413484 - DNA, 163 bp, Homo Sapiens
gcgggcccaggcctaaggcaagcagttgtgcgcacggatggaggagatgggcagtcggaccctcgaccgcctgaacgaggtgaaggatcaagtgacggatgtgcgctccaagctggatgagcaggcccaagaaatacgcctgcatgccgatgcctatcagcca

SEQ ID NO: 413485 - DNA, 244 bp, Homo Sapiens
tactaatcccctgatgacaaatgagatccgagcccctactaaaagccttcccacattccttacagtaataagggctttcaccagggcgaaatctcagatgtcaagtaagggttgaacatttatcaaaagccgtctcacatcccttacatgcatatgggacttccatccgcatgacttctctcatgctcagaaagtagttagttctgataaaggccctcccacattcaatacattcaacaggttc

SEQ ID NO: 413486 - DNA, 273 bp, Homo Sapiens
  misc_feature (18)..(18): n is a, c, g, or t
  misc_feature (151)..(151): n is a, c, g, or t
  misc_feature (247)..(247): n is a, c, g, or t
acctctgaaagactttgnatagatcaggcaagctagcaagctgcaggatatttccatcttaagtgaaatggctaggaggcagaatgtgtgagagcaaggctgtatatacaatgggctccacaggtcacttccaggagattggaatggatcnaggcaccttactctgatggcctgaaacggacgactcctcacatatgtcctgctccctgggggaatataacatatagcattctttactgaggctctnaaaacattgcttatacttcccccaat

SEQ ID NO: 413487 - DNA, 512 bp, Homo Sapiens
gctatttctacaataccaaatctcacttgtggtagatggagttccatcctccccaatagcctcatagaccaggtgtcctctgagtgtccttcctgcagtgatctactcttatcagtaggaaagcccataattgtaaaggctttagctccacaccaagtttattgaattcctggcacactttttcctttgcctagtgtctctgacctctgtttaggacttttttcttagctcagaccctcttcttcagtcccagattctgtttcccagtttcctagtgttaaaattaattaatcaggaggccataagactgaggggacccagcatcctgggatcctatgtaagcaaactgaaacccaactcagtgtaacaatcacattttaggaaaacgaaaattaagtgtaatcaattcgaaactaatctctaactggggacttttcatttgaatgatccaaataaggctaccgctccacgttagccaatcaaactattttctttgccttgcttctgtattc

SEQ ID NO: 413488 - DNA, 403 bp, Homo Sapiens
gtgtgagccacccctagaaaagcacaagagtagttctgatacctgacttattaatggatttttagatataacacacttgtaagttggggtcagatacatacagagtgaggacagtgttgttcattacaggaagtggggtgagagacagagatgaataaacgtgggcaaggggccatggagaactcggaggaaggagagcagagagagaagtgggctgtgtgggaaaagagagccagggcaggggcatgggagggcaacctttactgagtagctaatatgtgagggtcactgagctagagatttctcatgttgctgtagtgaatcctcatgagtccaacgagggaggtcctcttctgccatttaagagatggctgcttcttagagagtgtatacgacctgctga

SEQ ID NO: 413489 - DNA, 541 bp, Homo Sapiens
ttcagtgttacatagaatacaattcaacattacattgattcctttaggcttcgggttagatcaaattctcccaaacagaatagccatggggagcatgatacaatctagtgagcctaaaacacggaagctggttctgtcctttgacccactgacatgaaaagagtcattgcaggtgatgctttgttgcagaaatgtggagtctgacctgggctgcatttccagatcaggtgcatccgtacctcagccttccatggggtaacaggcattggcaaaaaatgtcctgcctcagtgtgaccctggaacctttcctggatcagttttatggcaccccacagaggagacagggatgtcggatgttggtcatcagatcttctcccagtcaaggtggcagggagatgcggaaaccaccatcagcgagtcaggaagaaggacttgaggctgcgtaagaaattcgacttctgtctgtgcttctgtttctttttgatgatgggcacccacaccagcccgcacaccagcatcatgagtcccagggacaggaagc

SEQ ID NO: 413490 - DNA, 164 bp, Homo Sapiens
tatttgatgagaatgacctgctcatcccggtaatgtgttataatgaagccacacaactgggggtaaatcctgtccctggccagtttgggcagctccagtactgtctgattcacattcgcatgcaggtgaaaaccacactccaggggatgcacccctatctgcca

SEQ ID NO: 413491 - DNA, 493 bp, Homo Sapiens
aaagaaacaaactcatttatatttattttggtacaggggacaggttctgaacaatgtgtaggcccacctaggggaatgtcaagggtgccctaggaggggataggttttgtgacacaaaggaggccctgaaggggcgatggagtgtctgttcttctctttatgtccattttcaaacaagttgtgagtagaggaagtctgcctccaaatctcaccagactcttccaccaggtgtcctgggaactgagtgatgtgggtctcctgtaaggtaagtggagggggtgccaggttctaggagacaaatagcttctggtattgtgccccagtcctacttgtgcagttcctcatgcactttgggagagctctggaactccctgtaggacagctggacaggatcacagagtcaataaacccagagccagcaccaccaccagcccttcagacttctttgcctctgacaccagaaaggggaacaactgattgtcttttccctgtt

SEQ ID NO: 413492 - DNA, 223 bp, Homo Sapiens
actctcctcctgttcagctttttgtgatgtgcgaactcatgtcctgattggtgacttctcaggcgtaaactttgtgtatatcgttatctgctttgcttaatgtcagggtgctgctaaagctataatagctgttcttgctgcccctctctgttacacttttctgggatattcccgagaggaaggtttattcttatttactctgaataattgtcattctggtata

SEQ ID NO: 413493 - DNA, 220 bp, Homo Sapiens
cgccccccccgcccatggcagggggcacacctctcgggcggggggaccgacgaccacggacgccggggggaaagggggccagaagcccgacccgacggaaaggcggcggccgacccccccgagggggggcagacgacccagaagggggaacctggcgggtggaggggagaaccgacccataagatgcgggaaccggggcgccccccagcgggccagcaat

SEQ ID NO: 413494 - DNA, 235 bp, Homo Sapiens
tggcggcaatttcattcgattttgcagtttctgggcccccaatctgggcccccaactcaaaggggactgggaaggggaactcggtggactggatggctatcttgggcatgggggcccccacggtcatggtgcccttatgggacagggaagaggaaactttggtggggtccaccccggggggcaaagttttttttcccgtgaaacacccggagaattaaccatgctcttcctgccg

SEQ ID NO: 413495 - DNA, 196 bp, Homo Sapiens
aagatattccgcctagtccaaaatagggcgctcccattttgcgcggggtgggaacgccgacacccaattctttgatggcaaccacccgctcattcagggaatgtgtttcgggaaaacctctcaaaaggggggcattcttggcaaaggccaatttgcgcagtttcaagaatgtccgatttacatttatttcccaatg

SEQ ID NO: 413496 - DNA, 519 bp, Homo Sapiens
ctttagctgtataagtttatttaaatatacgtcctctaaacaaagtactctgtttaataggcactttttctaaagtaacttagttattttaattattgaatggcataaatcatgcctggagaggataaatttaaaacatgaatgcatagcaatccacgtatcttaaacatttcatttaaacaaaatcaaaatactattgataagcaagtgtagtaatcaattatgtttccatatcttttgtaatgaggaagcatattcctcaaagcatatacccaaactcactctccagaaaatttacaaatattctgtcaaagtgatgaaaagcagaatgttataacaaaggaaatataggatcaaacacaaatacataccttgaaaacccacatacacttgaaaagagtgtattcataagctctcacatgcaattcacattagaaatgcagcagaagtaattactgccaacatagtagattactcggctatttgaacaaaacatagatagagctcttggcttacaaa

SEQ ID NO: 413497 - DNA, 360 bp, Homo Sapiens
  misc_feature (66)..(66): n is a, c, g, or t
  misc_feature (284)..(284): n is a, c, g, or t
  misc_feature (286)..(286): n is a, c, g, or t
  misc_feature (288)..(288): n is a, c, g, or t
ctttgcatttaatgtacagcaaatctttgaccagatcttcccattgtgaatattttgagggaggtntttctaaacaatgtaatacataaaagatgagaagtgtgcaagagaggaaagaaagggcagagggccttatgagccccacacggtaccttctgtcttttcatgctgagcactggtcttcattaggacctacgtggaaacagactcttgaggatcaagcgttaacatgactgttttttgggtgtttgattaagaactgaagagcaacagatgatatctgncntntgttaccttttagtgacggttttactaacactatcggacgtattgacggttcaatatttttaggaggaatga

SEQ ID NO: 413498 - DNA, 256 bp, Homo Sapiens
ccccaagcccctggccgagctgacggggcgcccgtccatcttctggcccggagtggtgcagggcgcgcccatggtaggacccgtgtatggctggcccagacccagccggcgaagaaaaacacaaggacgggaagaagaagcacttcacacgaccttctgggactaccagatcttaacgctggacaaaacctttgagcagaccaaggacctgacggcaccggaacgcactcttctagcctacatcctggacatgacc

SEQ ID NO: 413499 - DNA, 427 bp, Homo Sapiens
cccttagcattttatttatatccacaatgttgttcttgaaaaacaataggtaaccaaaaaggaaaaacagagctgcaaggtcagggttgagctcaaaatgcggctgtacaagtgtcatgaaggcagctgatggaacgctggaatcaaaacaagatagtattggagacccattttccacagctttgtccaactttgtcctggcccggcaccgccaataggaagtgagaccggttctgaaatcacagctgcatgtgtgtgaagagcccctggtttcagggcccaaggacaggcagagggcggtcattagatcccggccctagctcaggctctgctagctttccctccctttgctcacagtgagaggaggaagacagatccagcctcccaaaggaagaggagtccacttgcgacaaccagaaacgaccag

SEQ ID NO: 413500 - DNA, 166 bp, Homo Sapiens
taattgttgatgaggtcttggagcctcccttctttttccagaggctttttttgctcatttttccaaccacaatattctttcacgatagaatcttggccggaaactgagcctgtacttcacccctttcccaccaacttttggtactggacccaaccattctgggcaa

SEQ ID NO: 413501 - DNA, 544 bp, Homo Sapiens
ggcattagggaaggggtatgtaatttcccctttctacaccctaggcctttcctctatatttaaatatattggctttctctcttatgaattcagtctgaaattatttttcactgcctttattacatccctgcttttgatggcaaaatagcttcctgtgttttgaaaacatctgctttccaggtttcacacgagaaaattgattttacttttctcttaagtccagaaaggtagaaagttggacttgtttccaagtgcaacttttccttttcttgtctttcctgaagttatcccctttcagttctgattcactttctcccttttatttcttctaatcacccctcctctcttcctctctccttctaaagaaccagagaagaccgattgcgtcttatttcagaacacaaaattaacatatattttttgtctagtctatggtatgtgttaaagttttctccatattttcttcattcgtcctctgatttggggggaggtaattttccttcagttaaaaaatctcagatttgcaatttaaagtggtctctat

SEQ ID NO: 413502 - DNA, 154 bp, Homo Sapiens
ggcgaacaacgagacgaagctcctcaaccagagcctgaccgagtggcagctcttgatctacaacccgaccagcggagaattgctggggcgcaccgtcaagagctggggtaagatcttgctgttttacctagatctttatgggttcctggctggc

SEQ ID NO: 413503 - DNA, 380 bp, Homo Sapiens
  misc_feature (136)..(186): n is a, c, g, or t
  misc_feature (309)..(309): n is a, c, g, or t
  misc_feature (329)..(330): n is a, c, g, or t
  misc_feature (342)..(342): n is a, c, g, or t
  misc_feature (344)..(344): n is a, c, g, or t
  misc_feature (358)..(358): n is a, c, g, or t
caaagaaaacaggtttatttgggtcgcagctctgcaggctgtacaagcatggcaccaacaccgctcagctcctggtgaggcctcaggaagctttttctcatggaggaaggtggagggggagcaggtgtgtcacatnnnnnnnnnnnnnnnnnnnnnnnnnnnnnnnnnnnnnnnnnnnnnnnnnnntgccaggctcctttaaataacgagttctcgtgtgaacagtggataactcattcatcaccaaggagagggcaccaagccattcatgagggaatgacccaaacaccttccctgagcccccacctncaacactagctatcacattnnaacatgcgattngnagtagaaaaacatncaaattatatcaagagacccct

SEQ ID NO: 413504 - DNA, 307 bp, Homo Sapiens
tgcccctttccactcatgaatctcgtcagcatcagccagatgccgttcccccaggcactggtgtctaatactccacatggcttgccgtttgcccctgcccctcctacctggtgcccatgtgctgatttctgatcttcaccaccacatcctggtcattcaaagctccctttcacttgttcttagccaacttcttattaatctgctcactgacctgctggtggttattcttatctagatctctaacttctgctatccatggttgctgcaaagcctgctcacagagcattatctgctctgccttcttatc

SEQ ID NO: 413505 - DNA, 428 bp, Homo Sapiens
ctcacacatgtatttaatccccacaatcccttattacctccatcctaaagatggagaaagtaagcctcggggagggtcagtaattgacccaggtcacgcatctagcttgtgttggaattgagccctaagagcaggacatgtggggctggtgggactttctgaagtccttccagagagggccagcatctgtgccagtgcttcccctgggcattggagaccaaactggattttccccaaaccctgcctattcaacagtctcccatagtttgacatcaggttagtctcttgtttggcttgactttggctaacattgaaatcaacttctatcttcatgagtggggctagggggaagggagtgagaagttggtcagagttctagccatgctgggtgccatctggggctgatgattatcaaaggcactcctgct

SEQ ID NO: 413506 - DNA, 157 bp, Homo Sapiens
agtggagcctgtcacttttcacaaaccttttaaagatctgtactggctttctggcctgttagagtttctcaaggaagggcttcagctgttcttttaggcggcctaaaaaggaaaatgtctggaatgggtaggaccattttgctgggtcccggaacat

SEQ ID NO: 413507 - DNA, 487 bp, Homo Sapiens
aaaactttttattcaaattcagaatattttatatttcaactaaattttaaactttctaaatgaaagtttacaacttgaagttcacactgctgtattgctttaaaacttaaaagcaaataaactttgtcaactaaaatcaaagtaaccaatatctggcctgcctgtctctaagatggccatgctgtcaccgcattcattattcacagtcagtgacccttagaccaatgcttacacaagatttctttcaaatatgacactgtggagatggccacaggaggtactacaaaaaccaagtgctcgattaccacttaacatgttcagcttgaaatgactgctacctttgccttcaattccttcccacacacccaggtatacaaatatcttttataccaagagtccttgtgaaagtaaatagagggaactcccagggataagggagggcaaaaaacaggaagcacttgaagccaaaatctggagcaacttttaa

SEQ ID NO: 413508 - DNA, 496 bp, Homo Sapiens
gctctttgggagtgccaattttattccatataaatttgaagtacttttttataaaaacagacatgcaaaatttgtgagaagttttaaaaataaaatgagaccccagagaaatcctaggagctccccttgccctgctctgcagttagggttgctgtgatgagacggtctaaggatcagaccagtgcacacaggtaggtcaatgctgctggccgtgggcctgcatgttagaaactgccggagactttctgtgtacaaagtgctcagtgatcggggcgggatgacaggctccccaggggctgagcatcatgcctcctctttggtggttacaccagaggctaaatatgttgtcctgctccctggcgtactttgttaacaaaagaacagcacaacaggggaactgagtcctagaaaaaaatgaagagggcacagggtccaggtcctctgacgccacgatcagggcttttgaaatgctggttctccctgtccctgctgtgtc

SEQ ID NO: 413509 - DNA, 509 bp, Homo Sapiens
gaattttaaattatccatgttgtattatttcattttccaatttaggaagtagacattccgcacaatttatgacagaattgttaaacattaggctatttgccagcggtttaatccagtgtaaaaatacattattggtgagattcttttattagcttcaaatgtcggcgtttcaataagaaaatatttcttcttattacaaaaaaccaaaactttcactggatttaaatttctgcttgtggaggttgaaaaaagggaaacggagctatagactgtttgccagcagtttaatccagtgaaaaatacattattggtgagattattagcctcaaatattgttggttcgataagaaaatgtttgttcttattacaaaacacaaaactttcactggatctaaattccgtagtggaggttgaaagaagggaaacgaagcaagtaacaaaaagaagttgtggagtttattttcttggaactttccaagattgtttatctaaaataatgatctacttaa

SEQ ID NO: 413510 - DNA, 371 bp, Homo Sapiens
  misc_feature (75)..(166): n is a, c, g, or t
  misc_feature (326)..(326): n is a, c, g, or t
accatataacaaacatttattaataagttttcagtatatgtatgatttctatttctttttttcttgagattgagnnnnnnnnnnnnnnnnnnnnnnnnnnnnnnnnnnnnnnnnnnnnnnnnnnnnnnnnnnnnnnnnnnnnnnnnnnnnnnnnnnnnnnnnnnnnaaacatgcaccacaatgcccaactatattttgtatttttagtagacgaggtttcaccacgttggccaggccagtcttgaactcctgacctcaggcaatccacctgccttgtcccaaagtattgggattacaggcatgagccactgggcctggctggattntatttatatttcctgtataatttttattatgatcataaaaataac

SEQ ID NO: 413511 - DNA, 289 bp, Homo Sapiens
taccttgagcaggaaggagtttgtggcaaacttgaccatgtggatactggtgtaactttacagattgcggcttcaattttgatgagtagccgggatccttgggagggatgaggaagatcgctggatcatcactggatacttgaaatgctaagcatgtggtcaacattctaacacaacctattatgcaggcttgcagaaactgatgtgaaatcaaattataatcaagttgttgcaccgtgtcagagaagccaacttctacactatgggggcaacaaggaattgaaacttt

SEQ ID NO: 413512 - DNA, 277 bp, Homo Sapiens
acacctgcacgatcgcagctctagaagcaggaacgatgaagccctgtgtggcctggagtgcggcgacatcagtgaagactgtaggatgtcccacggacagggactctgggccactacgaggggtggcataacttagggccactttcggcttattcaggattacggggacgactacagagccgagcaacgatctgctggagtaggacacgagacgggaactactacctgcgagaacacatgggaccttactggggagccaagcgcgaaaccctaagtc

SEQ ID NO: 413513 - DNA, 513 bp, Homo Sapiens
gtataaatctgcttttattgaccaaaggttgcattataaaaatgggcaaaggtttgtctcaacatgttaatatctaacactttataatgactgacctcttgttgcttcactgcttgcacaaattattatactctaagttggcaaatcttttttgatcagtgaatgctagcaatctttaaaaatctgttaatatttttcaggttactgtatttgcagtttttaagctttgtagacaacttttgctgacaaactattatgagtgcaataaatactaatacacaatgaaatgcaaaatcgcagccttgcgacatactgtatttgccacagcttgtaaatatcttttgtattgagctttgtctttcagttattgctgtaggattttttgcccacttttcatttcagatgaattctatttccaagatcttcttggggcatctcgcatgtttaatatctaccatcattttttcagtgttgtattaagtcaggggactgcaagggctgtatgaaaacatt

SEQ ID NO: 413514 - DNA, 184 bp, Homo Sapiens
ctttcgcttttttcttggtcagttttttggttagaagttggctcacgccttccatagccacatgatggcgatggaaatagaaccccacacagaggtttttgtaagaagcctgcaagtacaaattgaccagcctcttgacggctaactaaacgccggtggaataatttttacgaatctgcgagct

SEQ ID NO: 413515 - DNA, 163 bp, Homo Sapiens
ccacaactcggtatgggctgcctgttatgcacttgttcttccatttcaccaccaaagtgcacttccacttgtccttgagcatgtaggacacgctaaatagccgtttggccacgggcttctccaagatcttctcgctgggggttcttgctccatctacccccac

SEQ ID NO: 413516 - DNA, 473 bp, Homo Sapiens
gtagaagtattttattatttatttagtatgtacttcttaaatgttttccaccttcaagtattcccacttatttgaagttagttgcagccatatgatttacattggaaaatgaaatgtgagaagtgtgttctttctaggagggatcattaaaagccagtgaataaattcttaggttcccttcattctgctggggaggttctgggagcagatgtgcaggagaaagactgtcagcctggcttcctgagtacgatgatgagcagagcttcctggatgacttactttggacgtgtagcatgagccaaacctggatatctgggtatttgttagtttagcacaactgatcctattcttactgtgtaaaaggaattgaagagaaggtgctcaatgagacttcagagaagctgagagacaagagaactaggaggatgtttcatcccataagccaagtgcacagtaatttcagggacagttta

SEQ ID NO: 413517 - DNA, 397 bp, Homo Sapiens
  misc_feature (64)..(73): n is a, c, g, or t
  misc_feature (190)..(205): n is a, c, g, or t
aggcccaacatttatttttaaaaccccccccaactcccttgtatttaagggcccccaagttaannnnnnnnnnaaacttgaattcttttcccttttgccatttaacgggcaggtggcccttatcaaaggggaacccccccttttccacacttccagtcgggaagggaaaaacaatctccccttttttggnnnnnnnnnnnnnnnngtactttgttttaaacacaaaggttttggccctccccggggcctaaaacaaagggttaaaaaccaaccacatgtttttgcttcttttccccaattttacaaaaaagtttttaggttgaagaaccccctctccttccccctaaaggccccctccaggttgtaaattaagggtgttggctaccaaaccacaacc

SEQ ID NO: 413518 - DNA, 298 bp, Homo Sapiens
  misc_feature (115)..(115): n is a, c, g, or t
  misc_feature (175)..(175): n is a, c, g, or t
caaaggaccgctgattggataggatctactatttcatctgcgagccttctttgatggtgacagaacacgctaatacatgcctgatgaccccacaggatctccactaataatgctnggagcgcacaaacacgtaggacacatccttgtcttcaaacagaagcggcaggatatgaangagcaccaatggcacggcatatacagccatcacgaggaaatcaaaagagaccccgatgactgctcgggaggccccacagattcctttccaaagactgcggtggaatataatatgcataacgag

SEQ ID NO: 413519 - DNA, 436 bp, Homo Sapiens
aaaaaagccggtgactagagtgtttattttgccttatcacaaagaccagatattgtagattcatataaatcactatttggcaatataaatttttaaatcagaaacaaaaatttaccaggtcaacttttactgataaatattccatctgcatgtatcaatttttctgctgctcttatgtattttgtgattgagagacattatggtggcagtttaaagatgttactagctggagactttacagattggaaatgaggatggaaagggattcttccagctaaaaccagtaatcccacaaaaagaaagggttgttttgatttaaacatgcgtgtattaatgtcccccaacctgtgcttgctgtcgatacaatcattatgatattgagctccttgaagcctaggatatgactttagtttgtatcttcacttgacttcaagaa

SEQ ID NO: 413520 - DNA, 310 bp, Homo Sapiens
ttacccattcatttttattcttcacagagcacgccatggccggtgccgccctattaaaaagttcttcccctcgcgatgccttccaaccctcttgcagcttgcccttgggcatagtgaactgaatggcattccctgctgtctcgacctccaataatagcatcccactttttaaaccctgcttccagccgtacacatgcatgctcttgaattggccatagataggctcagcaatcgtgatgctgcacgactggctttgtatcgggaactcctctctctcagactctatgttgaaaacagacttttgagagag

SEQ ID NO: 413521 - DNA, 298 bp, Homo Sapiens
  misc_feature (165)..(165): n is a, c, g, or t
tgaaagaaaaaagggggtggtttacagccttaaaacaccgggggggcctccccccccgctttaaaattctccgggcacggatcccccaaatgggtgttttgcgcttcacccctttggaaaaaacccaatccagggccctcctttctttggcctgaaaaaccatangatcagggggtaggtcacccggaacccaaggctccttggctcccccattaatgggagccttccccggaacaggatgtgggggggctcctctacctaaaaaaccttttcccggggggacataaaaccacacccc

SEQ ID NO: 413522 - DNA, 250 bp, Homo Sapiens
aatcaggctcttacggaggtgggggcttctcatcatcagggggacaatgactgaacatgtccagcatgccagctgtgtcatcctgctccttttcctggagaccttagccctctgtctgtagatacatctcttcttctgcaagtgtctctggagggggctgtaccttgttactcccatcctaaatctcctcttccaactgggttgggggatcaaacggctcttgttccacaaggctcgtgaggagggggcc

SEQ ID NO: 413523 - DNA, 665 bp, Homo Sapiens
agggcctggttggttggtagctgcaaaacctagacgttcctgctggctgcatcttcgcggggagctgggattaggcaaggagtctagggcctggatgcagagcctgggcatgcatgggggtcagggaggatggaccagggaaacctgtgtgctggttagcatggtctatctgcggtttcaaagacagagcagcaccagaagaggaaccctgtctgggtgtgctgaaagtggcccagcagaacataaggttgtggctgggacatgaatgcaccccagggagcactgaactgctctgagctgccgactagggccataggctagctatgtgggcccatattgaggtaggggctgagcagtcccagcggcaccgcccaggctgcctgctctggggtccctgcaaaagccgccgctgagcccacggacttccgggtcgtaagcacgtggggcctgaacatctgcttggctgggtcagctgctatgacaatgcccgggcgatcgtgccctccagcgctgcctgcatgccgaggaggaagcgagtccccacgtgaataatcgggctccgcctgctcacagcggatgtcagaaagtcaagtcgatctgctgcgttagcctccgttgttcctgctcatggaaactctcttcagctgcgagaaaagctggtgctt

SEQ ID NO: 413524 - DNA, 253 bp, Homo Sapiens
gtgtgaggggccggatcttgatcaccgacaactcccagatcaaggcttccggatgtgaggccagacccggatagatgccgaatgcctgagtatcattcacccgctgaatcctgaaccacttctgttggaactcagaatacgtagtccgcaggtcctctcgtttgagcgcttgctcatacacataaattctatccacgtgtgccaggttcttttctcctagcagctggtacaagaagggagtatgtggcaaatg

SEQ ID NO: 413525 - DNA, 505 bp, Homo Sapiens
ttaacacctatactaggcaaagggtagaaaggtaaatacaaaagggtaaagacatggttttttccctggcacataaaactgaggtaaaggctgaggctggatctgccccagttgaacacgctggccaccacctttgggtgacccggcccttaccaggacccaagggccgctctggtatctgtctgcatactggctggggaaaaaagggagcttcaagagctcactgttgagctggcaagagtatccttttttccaaaggttcatttaggtttccctacccttaaccacctgcagatttttccagacacctctttgcccttcctctgcccctgggcctatggaaagggagcacaattgcactcaacccactcaagcggaaaacttgaaaacaaaggaaagaaaacaccctgcgtggaaggtcaagccggggcctgggtctgaatcactcctctctccaggaaaaacatgggggcaagcaggtgagtgaaccccaagtgctgcgggg

SEQ ID NO: 413526 - DNA, 369 bp, Homo Sapiens
  misc_feature (301)..(322): n is a, c, g, or t
gaatgactgaatactggagaaaatatacagaaatgaatttctcttttagaatattagacagggaaggggcacacatacaatggtataaaagagctgaatatttataaaattaaagatttcctaacttcaggcttgacttgaacgctggttatgcttttgctacatattaagaaatttccccaacaatttaaaacattgtttttatacaaagttatatatttctacaaaataagacaaaccatctatgtgtatatagctatgtaatgtgtatctgcatatatgttacacatgcatacatacnnnnnnnnnnnnnnnnnnnnnnaatacattattatcccagtatttggatcatgtgaatattgttttgat

SEQ ID NO: 413527 - DNA, 370 bp, Homo Sapiens
aaacttcacagatgcaggagtgcctcaacttattatggggttacagcctgataaacccatagtaagctgaaaatataattaagccaaaaacgcatttcatacatctaatctaccaaacatcacagcttagcctagcctaccttagatgtgctccaaacacttacagaggtaagacctacggttggacaaaatcacccaacacaaaacctattttataatagaatgttgagtatctcatgtaatttactgaatacagtgaaaaaacagaacggttgtatgggtactcaaagtatacatacagcacttgcaacatcgcaaagttgaaaatttttaagtcaaattatagtttaagtctgggacagtctgtgat

SEQ ID NO: 413528 - DNA, 182 bp, Homo Sapiens
agaacaatggcctttcaaatgaggaagagggaagtgaaaatggactttttggggagatatttagagtcttcaaactctatttcatgcagtctacaatttttaaagttatttttggagtagtctccttaacaccttgcaggaaatttggcttgtaggactgttaccaaataggggtcctgacc

SEQ ID NO: 413529 - DNA, 142 bp, Homo Sapiens
ggatatcttaaggacccttcccgggatttattccggcattggtactggctctggtgccccccgcaaacgcgcgcacgtacccggcgacatcttgaagggccaccttctcatccacgttcaccggcagacaggcccaagcatt

SEQ ID NO: 413530 - DNA, 178 bp, Homo Sapiens
gccagtggcaataggtccagaaggaggtttaataagcagcaaatcaaatacaaactccaggcccccagacagaccctgctggagagcattcacacctctgaggtcaagccaaggtccgggccattgcatcctctgcccaaaggcccgcccaacccttgccccacacagaacagagtcg

SEQ ID NO: 413531 - DNA, 445 bp, Homo Sapiens
ttttaacctagtttcgtcagagctagaaaactttgaactttgatattctctccaaaacttccatttgtaaagctcaacacaaagatgagcagcctggggtttcggggagaatgtacagacacgcaaagcggtcgggccggcctgtgactcgtgggctctgcaaaaggctttcagttgttctccgggagccgattctaccggcttcgccagaccctgcctttggtgacctttagaggctttgatcagggctaaagcgtgcgttgatgctgcccttttctcttgctcaacgcaagtgattttaaagacgcaagttcatccccgtgacccagggattcagctttattgacctaaggaaatgtctctgtgaaaagtataaatcaagcttttgtttgagctgattggttgtttttgaagataaccatgaaagctgtttttaatttcataa

SEQ ID NO: 413532 - DNA, 442 bp, Homo Sapiens
  misc_feature (143)..(143): n is a, c, g, or t
  misc_feature (170)..(170): n is a, c, g, or t
  misc_feature (379)..(379): n is a, c, g, or t
  misc_feature (391)..(391): n is a, c, g, or t
  misc_feature (402)..(402): n is a, c, g, or t
atctcagggagagtaaggcagggggttcggccaggcagcgagtgtctctgcagcggacagagcatctgcagagggtgtggggtggaagatgtagggacaggaaatcgttgctttctctaatgtgatttcagatgcggctcctnagcaaaacctttgcagctatctttaangtgggagtatggggaaaatagttaacagtgaagacccttctgaaaattttgcacatctttctggcagcttaccagggcccgagatatttttagtactcaattttgaagcacagtcctcagctggtttccaaaggagtgtctatgctggcctgacactggcactccagagttctgcattgtgtcagttggaaacatggaatcatttgcangaaaagccctgnccaaccgctgnttccaacccctctctatttatgcattctcttccttttttt

SEQ ID NO: 413533 - DNA, 465 bp, Homo Sapiens
cgagtatggaactggacctgcaggtttacgacttcgcctacttgctgcaggtcagtgactggctttgaggttggtacattccgcattatacccatgttgagacagtctaaaatcccacgtgcttagggtgtgtctcagtccattcaggctgctataataaaataccataaactgagtggctgctaaacaacaaaaatttatttcttgcagttctggaggctgggaagtccaagatcaaggcactggcagattcagtatctggatgcgcctgcagtctagttcatagaagaaacttctccccgtatcctcatatggtgcaaggggctagttaactccctggagtctgttttttaacggcactgatctcaatcctgaggtctctgcttccataatgtaatcacctcccaaagccctgaccttctaataccatcaccttggtggttaggatttcaacatatgaatttt

SEQ ID NO: 413534 - DNA, 454 bp, Homo Sapiens
  misc_feature (441)..(441): n is a, c, g, or t
aggaggatctttctgtgaacttgctttgatgacctccacccaaagccctttgaggaacagttttgtttattcaaggagcccttggcaggtcactcctcccctaccacaaatctaatccaaatgcgacattttcctttgaggccatctatcccttttgggggacaaaacacatcagcttttcccttcagaccacttttgactgaagcagtgatcaacattgcttaattgtgttccagtctgtttccagcggggaaaaaatgctttaggggagtgaggcagttagggatttgaaaacagggatggtgccgcctgaaggtggggaatgacttagatcactgtcttcctttggctcctcaccatgttgtgtggaggaaacgaaaagcagctcaagttcactcctcttggcagtagtgcagaagcctggccttgccacggccctgnagaaccatgtttt

SEQ ID NO: 413535 - DNA, 449 bp, Homo Sapiens
  misc_feature (241)..(241): n is a, c, g, or t
cggaggggaggcgattctggagaagttaaagggctcacctttggacgccgggccagcaaggccagacaccaaacacccacctccgggaggaaccagcagagccgaaaccggctctccccgcctttccgatagggcggagggaggtgagagaagggagcgcgcgcgaggggttcaggagccaggaagccgcactcccctcccgcagggccggccgcccggggccgaagcggccgacgctcanactgcagaaagcggaacaatctcccaggccctggcggcagcaaacgggagcccactccgctcgccgccacctcctcccgacccccggacgtccccgaatgagttcccagttagctgcgaggcatggtcaggagccttcacccgtcctgggcgaaggaggctgtcccgtcgactaaaactctgatattaagacttggcgctgggggtgg

SEQ ID NO: 413536 - DNA, 477 bp, Homo Sapiens
  misc_feature (46)..(89): n is a, c, g, or t
  misc_feature (159)..(159): n is a, c, g, or t
  misc_feature (225)..(225): n is a, c, g, or t
  misc_feature (330)..(330): n is a, c, g, or t
  misc_feature (339)..(339): n is a, c, g, or t
  misc_feature (383)..(383): n is a, c, g, or t
  misc_feature (423)..(423): n is a, c, g, or t
  misc_feature (466)..(466): n is a, c, g, or t
catcaccccatgtctgctgctgctcaggtttctctcactgtctctnnnnnnnnnnnnnnnnnnnnnnnnnnnnnnnnnnnnnnnnnnnncagattaaagagaagcagctgcagcctgaggcacagacaggatgcagagtgactccatcatcccacctanagtcatggacaccacccactttgatacattctgttcacaaccataattcctttcatgctgattcgngtcattgggaatctctcttcttcagcttcaagagagccgaatctgactcaggtgttgagattggggaatggcatttccatttcttcctctctccagtatagccanagcaggaanggcaagagaaaaggggtcctggtacctggtgatgtcaaagtagncagctcctactgctgtgctagcaagagccatgtggactantgtgagaagaggaactctcccaagtcccctactgggtaaccanatacccaacag

SEQ ID NO: 413537 - DNA, 444 bp, Homo Sapiens
gtaacagtaggtatattagtccattctcatgctgctgtgaagaaatacccaagactgggtaatttataaagaaaagaggtttaattgacttacagttccaagtgactggggaagccacaggacacctagaatcatggtggaaggcacctcttcacagggtggcaggagagacaatgaatgctggcaggggaaatgccagatgctgataaagccatcagaactcactcactatcagaactcactcactgtcaccagaacagcatgggggaaaccatcccgtgatttaattacctcccaccagatccctcccatgacacgtggagactttgggaactacaattcaagaagagattttggtgagacacagctgaattatatcagaggggaaaataaagaaaaatgagtatggcaaattagaaagttacaatcctctataaagaattt

SEQ ID NO: 413538 - DNA, 469 bp, Homo Sapiens
gcttgccaacctagtattgagatgggtggtaaaggaatcaattacacaatgccacacatttgcttgcttctgctgaatgccttagtagtttcatgtttattgctggaagccattctcttacagcatctagtgctgtgtaacgagctaccttaaaatgtaaaggcttaaaacagccatctttgatgtctttgcaggtctagaagtcaggaagggtaattattcagctccaagtggcattggctctagttactacctgatattccagggtggtagctggagtggtctcaagggtccaagctgacctcacttacaagctgggtgccttggcagggacagttaggaggctgtgtgtagcagagcctcactcggtctttgtattctccaggcctcttcagtggtttctttggcacttcttaaatgatgtcagggttccaggagttaatgttccaagagacaggaagtggatgct

SEQ ID NO: 413539 - DNA, 349 bp, Homo Sapiens
  misc_feature (12)..(12): n is a, c, g, or t
  misc_feature (34)..(34): n is a, c, g, or t
  misc_feature (66)..(66): n is a, c, g, or t
  misc_feature (74)..(75): n is a, c, g, or t
  misc_feature (96)..(97): n is a, c, g, or t
  misc_feature (122)..(123): n is a, c, g, or t
  misc_feature (214)..(216): n is a, c, g, or t
  misc_feature (264)..(264): n is a, c, g, or t
  misc_feature (266)..(267): n is a, c, g, or t
  misc_feature (276)..(278): n is a, c, g, or t
  misc_feature (315)..(316): n is a, c, g, or t
gccaagcccagncgtccccagaagggctttatgnggccgcaatgtgagccgtcgtctggccggtcnagaagcgnngccggcgtgggcctttttcgnngtgtttttgggtttttcttaccccnnaagtgacgtagaaattttgtaccggcgtcaacgccccggccaggggcccgcagagagccttgtgtctgtagccttcagaggaagagggccnnnccgggtcccttcttcagatcttttcccctttcccccaacagatagtangnncgtttttcnnngttgtttgctttttagagtgttttgaaaaacagcctnnccggcgaacagcctcttattaggcttcttcggc

SEQ ID NO: 413540 - DNA, 329 bp, Homo Sapiens
tgagccattgcactaacccaagtttactttaaatcaatggttctttcagccaactttaagtgcccaccacatgccaagcactaaactggagatataaagaaagttcctagacatccaagaagaagcctggataaaggagttagagataaaaacttcttttcactacaagattccctcaagtagcaagcccaggctcccggcaccctcagggcctcacggccaggcattgcatacatgtctccctagcaaacaggtatcacagcagcacagagcagccaccccagtcacccagggcactcccctctcctcctaccttcctgtctcatgtt

SEQ ID NO: 413541 - DNA, 393 bp, Homo Sapiens
gaatcttcaaaactgtatggggaattgacaaaatcttcctagagacaaggccctgagcacacagagtccgtctccaccatgaaaatattacataagctgtacagaacaaaattagcaatgagtgatctttggcactagaacaggtgattccttagctgttcatgcaatatccaaactgcacaccacatgacattagattgctggttaaccatttaattttacatttaaattatcttaaaaggctggaagtcctagctaagttttcaatatcaatatgctacccatgtcataacacttagtgcctgaggtagagatttctgtaagagatttttttaaaacacaattgagagtataatacagaaaaacatttaaatcttggaagcatatagcctg

SEQ ID NO: 413542 - DNA, 420 bp, Homo Sapiens
gagttctacagactaggttgaggaaggaagggctggaattctcaggaaatgctccccacctgttgacaccagctagctgagtaaaggatggtaaacaaggtctatagctcacctattttgcttctctgttttgcttttcccttcccttcctagtaggttgcctttctgaaaatactggccttgtctcggctcaactcagatgaaaagatgtcactggaagctcccagcagaaaacaagaggtccccagcagagcctctccctgctcacccctcctcccacctgggccaccaccccagaccagggccatgtgaaggggtgtaagcagagcacctcgatggaggctgctacttggtgcatttaaggctaatgcagccccaaaccttctggttttatcaccaggaattggcgatctgggaaca

SEQ ID NO: 413543 - DNA, 321 bp, Homo Sapiens
ggggggcttgtttggtgaaatagacacttgcactcttctgatggttggagttgggggcaagagattgggtaaatggctttctaccactagtattactgttaaagcgaagtaattgcttttcatatgtattcctcttgcctattggacggcactgtaaggtcaagagttatgcacgtactcatttctgtgtctgtgtgttgggctttctttgggagtctgaggctaaaaaaacaaggaagacacagtcccttcacctaagacacaaataactatgatacagtgtaaaaatgttagctccaagactatgctgtttttttggta

SEQ ID NO: 413544 - DNA, 371 bp, Homo Sapiens
ctggcaagtcaatgtttattaagaactgacggtgtgcacagcatcacgccaggctggcaaaaaacaaaataatcccaagcgatcatccttggcctaaaaaaggcctgaatactacattataacgatctaaaatccaaacatcttttagtgtgtcttatagttcattaaatttttgaactgttaaacactgtgacttgactgcttagtctggggaagcaaaaactatgttggcacagcctgaaacgcttgggaaaatttattgcaaagcaaggatgcagcattgagggttaaacatctacaaagcaggaaatgatgtgaattttaacaactggcttagaaagctaacatctctttagaaaataatcctctgt

SEQ ID NO: 413545 - DNA, 313 bp, Homo Sapiens
gatactgttcgaatccagagcggcgacgcggactttaacccaaagcccatacagctaatgtaggggatagtacacgctgaccaagagctggaacctgcaactgactcgtatactgagcccaagactacactgctgaagatgtaagcagatactccaaaggtaactcgtacctgctagcgccgtgtctcaatgatcctggtccacaacgccgtggctaactgtagagaatcagttactagtgaccaccttgcacctggatgactgctggaaagacagcctgaggctctggaaaggtatccgggacagaaacgcc

SEQ ID NO: 413546 - DNA, 477 bp, Homo Sapiens
cttatagagttgtttgaactccttacatgttctggttattaatcccttgtcagatgagtactttgcaaatgttttctcccacccttgggttgtctcttcactttgtcgattgtttcctttcctgtgcagaagctttttaaatcacttgcccattttgctttggactgtgcttgtgggttactcaagaaatctttgcccagaccaacatcctggagagcttccccagtgttttcttgtagtagtttcatggtttgaggtattggatttaagtctttaatccattttgatttgatttttgtagatggtgacagatagggacctaatttcattttttctgcttatgaatatccagttttcccagcaccatttattgaagagactgtcttttccccagcctattttcttggcaactttgtcgaaaatgagtttcctgtagatgtatggatttgtttctctatgtatgtatggatttgttac

SEQ ID NO: 413547 - DNA, 342 bp, Homo Sapiens
  misc_feature (285)..(285): n is a, c, g, or t
gcggggggccggcccggttgttcaatgggtttctgtttgccctacgtgctgagttagttgtggtctctactccgtgtcaggaggctcccaggtttgtctcaggtaaccctcgccttccctgctgaggatcagagatagagaagacccccaaggtcatacaccgatttaagcggcagaggaggaagtttgagtccaggtcaaacccaacgctcttaccacagctctagtggtttccaagcatcgctgtatcactgtgcataaccctctgtggggggtgggaaattngggagtgtcgggtacataattcagatttctgggctctgctctggagattctgaactg

SEQ ID NO: 413548 - DNA, 152 bp, Homo Sapiens
tttattttttttgtttaaaatccctaagttgtagccactgatggggcctgactccactgcacggtaactatgccgtgggtcttgacaaggtggccagtgaactaatgcccgggatactgggccaatacaccctacttccagacgttgggggt

SEQ ID NO: 413549 - DNA, 357 bp, Homo Sapiens
  misc_feature (35)..(36): n is a, c, g, or t
  misc_feature (156)..(156): n is a, c, g, or t
  misc_feature (203)..(204): n is a, c, g, or t
  misc_feature (230)..(232): n is a, c, g, or t
  misc_feature (243)..(244): n is a, c, g, or t
  misc_feature (255)..(255): n is a, c, g, or t
  misc_feature (257)..(258): n is a, c, g, or t
  misc_feature (269)..(269): n is a, c, g, or t
  misc_feature (271)..(271): n is a, c, g, or t
  misc_feature (305)..(306): n is a, c, g, or t
  misc_feature (313)..(314): n is a, c, g, or t
gggggcactttcctgcagcgcgggactctctcggnntcccgtgcagctgccggctgtgggccactgctgcacctttcctcgctgccgctgccggtggctgccggtggtatgtggagggggctggggccctgcacaggctggggggaacatgtgcangggtggaccccgggctatttctcgaggctccaactcgtagggcttcnncgcggctgctttgccatgtatcgttnnnccgcctggggnncgtggattctngnnacttagaggcntngttcagtcatttaattcccaccagatgtggtagnncttcgcnncccattggggctccttttcagccaagcaccatacctaccaaat

SEQ ID NO: 413550 - DNA, 133 bp, Homo Sapiens
ggatgccattctgactgtactggatcatgatgtatgtccgactgctgaagctgaggaagcatttctcaatgagcttcatgatgaaatttgcaagctggaggtcacacatggtggggctttacctgtgctttaa

SEQ ID NO: 413551 - DNA, 121 bp, Homo Sapiens
actgcccggagccgtttggacatgcccggagcgcgcgctgaagcgatacgaggaggaggcgaacgaggcgcttacctgaacggtggacgatatcctcaatgtggacccggcgcagcgcacg

SEQ ID NO: 413552 - DNA, 235 bp, Homo Sapiens
ctccagatgggaatgtagggatacctaatgtgcatactggcaccctttcacaatgatactaacgagtacagctggggagcagagaacaaggaagaaaaatgtgagctattgcaatgatggaacgtacctggggatacaagcaatgtgcgcactgtgcggacatgccaggaagtgctcagatgctcttgcattgcattgcactctacatatgttccggagacactatgagtaaagg

SEQ ID NO: 413553 - DNA, 365 bp, Homo Sapiens
gtagactgggtcttggtatgttgccctggctggtattgaacttctggtcttaagtaatcttcccatctcaggctccagagcagctgagattacagtcaagagccaccttgcccagctctagataaatttctgtataatgttccctggtacaataaaaacaaatccaactgagggtatgtgcatgggtctattatcagttttctaactggtttgtctaacgtctttactcttttattccctctagaaagactaaaggtaaccaatacaatttattataccaaaatgcctgtggacttctcatgactggagtcaacctacttataaaaggaagtaaaacttaattggatgggagttgaaactaaatg

SEQ ID NO: 413554 - DNA, 154 bp, Homo Sapiens
aaaaaccccgggttaaaaactttaaaaagaaatggttccgggaaatgttggtaaattcttccaaaaaattggggaaggggaaattacttaaaccccaaattgggaaattcttgttattcctttaggtggggaaccaaaggtcaaaggtttattc

SEQ ID NO: 413555 - DNA, 101 bp, Homo Sapiens
caactgtttatggaactgttgggcccatttcatttctcacagaaagttccagaggtaggtactcaggctgtggcagttctgctccatagtaccttccagct

SEQ ID NO: 413556 - DNA, 388 bp, Homo Sapiens
  misc_feature (333)..(333): n is a, c, g, or t
gttacaagcagcaaatacactatatatgtgtatacattaaacaccactttcaattcactttaactgtaaattactgtgactttaatatctctgtcatattaaaaacatgacttaataattgtgtaacattcaaagttaatgtgttgagccactcccttattatcaagtttaatttttttaattgcacagaatgcaatgataaatatacacatgtaatttattatgagaatctcttgcttatttccgtctgataaaaatcctacaagcagctgggcgcggtggagtgaaggtcatgagcctctgagctggcctgagttacggccacctgggcgnatagtgaaggttatgggataaagtctgtgcctgggcaaacctagataacggacat

SEQ ID NO: 413557 - DNA, 115 bp, Homo Sapiens
  misc_feature (17)..(17): n is a, c, g, or t
  misc_feature (79)..(79): n is a, c, g, or t
ttgatctctctcttctnctgctgctgctcttgtcattccgaggtttcagaatggtcctctgttccagatcctctgcagntggcctctgactcaacgccctggagagccttgtgcc

SEQ ID NO: 413558 - DNA, 290 bp, Homo Sapiens
ctcttacccagtttctgcacggagctcctgatgcctgatggccaagaggacataaccccacctgttctaagggcatggagtgtatttttagagtgattggacaaaatatgtgccgaacacctacgtcaggtctggcgcatgctggaggctggggttatatcaatgcaaaagccattccctgtatttaacacgtaaatgaattagtctctttaactctcccaacgccctataaattatttgctccattttacatattaaacgctgtcacgaactgagctgctgtgtgaggc

SEQ ID NO: 413559 - DNA, 391 bp, Homo Sapiens
gagcacctttattgagcatttacagaatgtaagggagtaaagtcatatagtcttctagatagaaatactcctggctcacctggagcttacagtctacagagttcagtataagtcagcagaaagtcaccccaaacacatgcaggactaaaagccacaaaacctcgacctagtccccgctcttccactactgagctgtgccatcgtgggaaggtcgcctcactaatcactgtaagccccagctgcctgatctgtaaaataggtttgaaccagtggtaacgaccttcccagctttaagcagtcggagactgcaagcaattttagcgtcccattccactatgtgctctcaacacctagcaagtagtatgctggataaatgaaaggcagcgaaggc

SEQ ID NO: 413560 - DNA, 389 bp, Homo Sapiens
gggagaccagtctgcctttattcctgattccctccatgggtatgtgctaaaacttcccaattctactaaaggtggtggtgtacattttgggaagcgcactacataggatcaagggcttaggtaacagctggtttaacagattgccacaaacttagtggctcttaaaaaaacagaaatctattcgaaagttctggatgcttaaagtctaaaatgggtccacagggctgcattcattacagaggctctcagagcagggaggatcagttcatttccttgctcttttcagcttctaggtgtgggaaggctcgtggctccttcctccatcctcagagcacataactccagtttctgcttccatcatcacattgccttctcctgtagtcaaatct

SEQ ID NO: 413561 - DNA, 354 bp, Homo Sapiens
  misc_feature (274)..(314): n is a, c, g, or t
gcggccgctgcagcgcccacgggtggcgcccagtcacgcccgaggcccgggccggcgcgggccctccgcgctgtcccccggcgctgccgcagcgcactcaccctggcacaggcgcgcgcgcccccggccatcctggcgccccggcatcctgcaccgcacgggcgcccgccgccgcggcgcgaacctcactctgcagacagccagacaaagcgcctgctcgcgggccccttcaccatctcccggagacgggcgtctttgtcacatgtcgctgggnnnnnnnnnnnnnnnnnnnnnnnnnnnnnnnnnnnnnnnnngtccctgcacccacgggcagggccgagcgcaaacccgcac

SEQ ID NO: 413562 - DNA, 162 bp, Homo Sapiens
caccctgaccatgacttttttaaaaaattaccaaacaatccgggaaaaccatggatttgaaaattttaaaaaggctgcttttaaaattaagtgggcaaaacccacttttagcaataaccaggagtttagtcttccttgtaaaacccaaatcccctaaccggt

SEQ ID NO: 413563 - DNA, 237 bp, Homo Sapiens
  misc_feature (56)..(114): n is a, c, g, or t
tgtgcgcctactgaatacctgaaccatggctagtgcacctgagaaactgaaatgcnnnnnnnnnnnnnnnnnnnnnnnnnnnnnnnnnnnnnnnnnnnnnnnnnnnnnnnnnnncatttggctccagcctaactcattccagaatgttcagggagtcacagctagcacctaggagaggactacaaaaggtctcatgcactctgaaacccccggaagcctcttgaggcccaggagaca

SEQ ID NO: 413564 - DNA, 289 bp, Homo Sapiens
cactggacgctcctgtcttactacagctgccccttttggcacactgcttcccctcacagggcaaatgctctatgaccgagcatcctgtggtagcagacgacggacccctgttgctcaggcagctgctggttgcgacagcgaccgcccacaggagtccagtccagccatctaggcatcgacattcaccgccctgatcacaggagccatcgctcatgactgacgctgctctgaccacgcgctgtgcctcacatacatcctctagcgctgctcacggtctcagtccgggacc

SEQ ID NO: 413565 - DNA, 238 bp, Homo Sapiens
tgtcctcaggcacataggccacacaggtgctgccaaggaccagtatgatggatacgcctaacaagactacatggcggatgttccagacatgcaaaacggggtacttgtcataaccatgacagtctggcttcttctcatacacgttttcgtcctcgggttctgggacctcttgccacggtgtggtcgcttctgtgggcctctcatccgtcacagcagacgtagcgaccacagacctgga

SEQ ID NO: 413566 - DNA, 166 bp, Homo Sapiens
agatatgcaccacagtatttctgtgatggcctgacggatttcctgagatgttgtggtacagcgactagacgaacattcgcttatactgtgatatgatgtacacgaggtcctgccttctgcatagcaccatgatgataatcaggggccggtactttgttctgctgcc

SEQ ID NO: 413567 - DNA, 149 bp, Homo Sapiens
aaggggttaaaaaaagaagatgcttatgcccatccccaaacactaattcagtggtctgagtggggctcaggaacctgtatgttgaaaaagtaactccagttatttcttataaacacagaagtttgtgaagttccttggaagatctaatt

SEQ ID NO: 413568 - DNA, 232 bp, Homo Sapiens
gcctatccgaggccggccttgagagatagggatcttcggtaaaggtgtatcccacctcaatctggacactgtgagacaggaaccccaggatagggccctccgcgaccactttgtacatcacacactagataaacttggcgtgctggatgccacacttacgaaacaactgctctgccgtctaattaatgcaagaaccactttctgttgagggctttcttacgggacgctttat

SEQ ID NO: 413569 - DNA, 154 bp, Homo Sapiens
gacagggtctccttagaaggctaatcttaaaaagcgatcttccagaggctcccacatatatcatgggcatctctttggggcctatctacacaagtgtgaagccgcccagggtatccttacatccatagagatacccgatgttctcgtagggaac

SEQ ID NO: 413570 - DNA, 638 bp, Homo Sapiens
  misc_feature (122)..(132): n is a, c, g, or t
  misc_feature (199)..(213): n is a, c, g, or t
  misc_feature (218)..(226): n is a, c, g, or t
  misc_feature (477)..(477): n is a, c, g, or t
aaatcccgggttaaaaaaggccttgttttttttggggaaaaagggccccaaacttagggctgttcccaaaaataccccccggtttcacctttaaaaaacaatttttaaaactttacccctannnnnnnnnnnagggggggctttggacagcccacctttttttcccaaaaaacctttgttcctatttgggtggaactgnnnnnnnnnnnnnnntattnnnnnnnnntaccacccatccttttaactaaaaggtgttttaaagagctccccaccaaaaggaaatggcctttgcggttggggaaccacctcctgaccttttgtttgaaggaaaaaaccggtcctccctgcataccaagaaattttttgggagaccgtgggaaaaacccatccttcctctttttgtgttaggcataagggggtttaaaaattaaaagcaaaatttccgggggaagacttaccaaaactcctggggccgtnaaaggaaaggaaattggactaggccccgggcaatatgatttaatgaacttgggaaagacaaggttgggagaccagggggcctgtcttgaattaccaggggaaaggatttgggaaaaattgttcctaaacaccccctaggaaagaaataatggggaagattt

SEQ ID NO: 413571 - DNA, 115 bp, Homo Sapiens
tgccttgacaaaaaaccatggccttgaggcctggtttacccaccttggttttacctggcacaactaaggaggggcctaggggggcccaaacacccctcccagtcctataccctgt

SEQ ID NO: 413572 - DNA, 411 bp, Homo Sapiens
gcctaaaagtatcagcaatgtgaaataatgctgcttcgaaaactgaagtcctcattttcttaaatcctgagggaatcatttgctcctctgagcgcttgtgtttcaggcgctagaggtatcagcaatgtgaaataatgcggcttcgaaaactgaagtcctcaattttcttaaatcctgagggaatcatctgctcctctgagggcttgtgtttcaggtgctagaggcggcgtttcggtctcgcgaggacgcagctctcacttgatgaacattttgcaactgtcatcgtttcgatcctgatgcttccagctagtgatgaaatcatcagctttcacatccctgccgtaacacatcctatacaatcatgggaacctgacttgcagaggttctcacgccttcagaaccagggagcgc

SEQ ID NO: 413573 - DNA, 483 bp, Homo Sapiens
  misc_feature (79)..(90): n is a, c, g, or t
aaacgtttatacttttatttattaaaactagataatgcatatccacaataaacccacagtttcaaatatagagacattnnnnnnnnnnnnggaatcttttccactgagcctttttgtctttgggaactaaagacagcttgagtaaggtgtccttctgaggctccacctataaccagaacttaggggtactcctgctgtctcggtcatgcccatcaacactgatactaccacactataagtcaccatccatcaagcatggggtccctacacttcctgtcatgttcctgtcaaataataggttcccgcactactgcagtcgcccacttatcatgcccaaggtcctaaaaaaagcctgttcttgcccgcaactcaaaccacacgtcttaggatgccggaccggcgtcacgccccacgtcccgctgttgactttatccaaacaagccgccgccgcctcagcccattctgtggtcccgctggtctggc

SEQ ID NO: 413574 - DNA, 166 bp, Homo Sapiens
tttgatagatggagctgatgaattgcatgtccttgctatccaatatgttagacaagtcctttagttacttcaaggcactccatactgatggggacccctgttctgacactggcccttgcatgaccatcgatagaaccgccaccaggaccgtgagtgacagaaggag

SEQ ID NO: 413575 - DNA, 495 bp, Homo Sapiens
  misc_feature (168)..(232): n is a, c, g, or t
  misc_feature (353)..(386): n is a, c, g, or t
ttttataaactaggatattatatttttattagtagtaacaattattaagattgagagtcttaagaaaggctattggaaataataggtaaaaatgtagaactcagaatatgagaaatagaatgtaaatgatataattgtgtaaaaaatgcctagtttagaatactgaannnnnnnnnnnnnnnnnnnnnnnnnnnnnnnnnnnnnnnnnnnnnnnnnnnnnnnnnnnnnnnnnggatggttaagtacatgaaagaagaaaaacttggttaattttgcctgattattttaaacattggaagcaaaatacaagatttgtatttcatactacaggaccgcttccatcatccatctgnnnnnnnnnnnnnnnnnnnnnnnnnnnnnnnnnnagcgcggcggtgataagtctcccagtgtgagagaaatcggggaggggcgaagaagggtaggcctcttctgttccattgataccacgttcattcacagggagccggctaa

SEQ ID NO: 413576 - DNA, 460 bp, Homo Sapiens
tttagctcattagctatcattagtattagagtatttcatgtgtggcccaagatatttcttgttccaatgtggtccagagaagccaaaagattggacgcccctgggaagtatttacatataacgtacacacatcctcctatgtacttaaaccatctctagattactaatacctaatacaatgtaaatagctgttatactataatgtttagggaatgatgacattttaaaagtatgcacctggaaaaagttctgcttccaaatctattgtacacccatgtgcatgggcaaactatggataaaaattctctgacattctctttctctggagattgagcactattttctttcctgcccatgtctatgatgactatacctaagaagtataagcactagctaaggattccacatactatttccaccactaccacttgactgcttaccatctctaccacattataac

SEQ ID NO: 413577 - DNA, 377 bp, Homo Sapiens
cctttctcttttgaaatttctgaaggaaaacaggtctttttatttcaatgataaaaaggaaaacctaaacaacagccaaagtattggctagtatttcctaggaagccttcttgagctggtaaaaaagcgaagtgtctgcagacacaacatcgaaggaaggaatccaaagagaacatccaagtagtgttagccttaaaagatacacctaccccacccaccactaaggtaggaactcttaaaacaggagacccttacacaaagcaaggacctgaaaagagaggagaaaaatactttctccataaaaatgatcttaaacttggtgcttagtggagggggaggagtatcttcccatataattcatgacaataacatagggc

SEQ ID NO: 413578 - DNA, 478 bp, Homo Sapiens
aagattatgaggctaaggccacagtaagtaaatagcagagccaaggtttgagcccatgcaatctgattccaggaacctagggcttgactgcctctctttacaggtatgaaggagtttctttcctggtctagtaaactttcatcgcaaccagcaaaccaactgatgcatttaagcctctccctttccaggaccttgttagagattgtagggtatagaagagttccaagagatggtctgaaaaatagagagacagagatggtctttgccattaaaaatattgtaatcttgttaggccaagattatcacacattcaacaattagctagtaaagtatgaattatctagagcaggggttggcaagtttttctataaggaaccagagggcaaacattttaggcttgatgtgccacacagtctctgttgtaatgactcaattctgctctggtagcacgaaagcaggtatagataatacatagact

SEQ ID NO: 413579 - DNA, 183 bp, Homo Sapiens
gggggtctgggagtggaaaaacaacgagggtttttcatatcattgggcggggggggagaccccctttgctttatgaaggcgggcgggcatcactggcttttaaaaaggttcccccaccataaaaaccacccaagtaaatgaaaaccctggggatgttagggaatttatgggcccccggttttg

SEQ ID NO: 413580 - DNA, 100 bp, Homo Sapiens
cattgacgacgatgaggcccattctggactctactgccttaagtattcttcggacagattcctgcatgatcacgacagcggactcacactcttgcttctt

SEQ ID NO: 413581 - DNA, 163 bp, Homo Sapiens
gctctcttccctatgtgcgcgaggaatgtccatctccacagaaagccactaatccgccgccagcttgatcctctgcgacctttcggaccaggggtcgcgaactcccgaggaaaggaaactcaccacgtgtaaccgccgaagtgaccaaccctcttctagcatc

SEQ ID NO: 413582 - DNA, 408 bp, Homo Sapiens
atttcataatttaagtttatcaaagagagactttaacatcctctccctccctcccctgaaaacccaacactgataatatagattttatattgatcacaggacactacacaacaaacacaaagacactacacttctagtaggacgagtcacgatttcctttgatgttgggctatggaatagctagaaagttactgctcatcaccacagcagggtaccatgcgagtggatagcttaataaatgcattcattagttaatggctttaagggttagctattatatatatggaatgaggaaacctcattaggaatggccacagtctcagcaaaactcagctctaaatatgcaaagactttgaagtcctgctattaacaagatgacatgaattgtaagaatacatttgacaggct

SEQ ID NO: 413583 - DNA, 385 bp, Homo Sapiens
gttattcttatggggttttatttttcaaggttcaatccattacacaataaacagagtatctagccaagtactccacctttcacatgaagttgagggaacaatctcatttttaacttgttctgccatttatctggcattctcacccagctaatgggtaaaaaaacttttacactgaactctttcagaggaaaataggggaagagaaagactccagttccaactaacccgttcctcagtttgaactgagaaaagaagatgtaccagggaagatggctggccacagacagaatacattaactccttgccgccgcccccatgaatcttattctttggagtccctggttcaaggggcagaagagtcagcattctggaaaacctaacagag

SEQ ID NO: 413584 - DNA, 280 bp, Homo Sapiens
  misc_feature (136)..(146): n is a, c, g, or t
cccgggaaacccccaacacagggggttgggccaagccctaaaagttaacctaaggccccctgttccttttggttggttggaaaacgggctgcaaagggaattttattcaaaatccctttcccggaaaaataataannnnnnnnnnnaaaaccgccccttggggccccctggaaggcgggttttaaaacaaatccccggaaattttggggggaaaattgggttgaatccccagggccaaaacccttttaatccacaggtttgcttttcctttaaaaggggg

SEQ ID NO: 413585 - DNA, 453 bp, Homo Sapiens
  misc_feature (72)..(191): n is a, c, g, or t
gcggccgccgcgtccaatagcggcccctatctggtagggggtgtggccgcggggactcggccaatgcgaggnnnnnnnnnnnnnnnnnnnnnnnnnnnnnnnnnnnnnnnnnnnnnnnnnnnnnnnnnnnnnnnnnnnnnnnnnnnnnnnnnnnnnnnnnnnnnnnnnnnnnnnnnnnnnnnnnnnnnnnntggcggatgagtgatcgctctcagcgcggtggtccctggcgtctccactgcccgccactgcctgtgttcgtccgccaggtggccggcggtttcccgggagcccagtccccctgaggccgtgaggtggcgtcgggaggtcggggaggacgcgggccctggactcgagacggccgccgcgttgacgccgcgaccctgcctttcttacccctccgccgggcgcggctcctctgggcggagccggcaaccgcgcggggaaagcccg

SEQ ID NO: 413586 - DNA, 181 bp, Homo Sapiens
ggttcgtcgggctgccagcaagtatgccccccggatctctctcttgggccaaacctgggggctgaaccttcccaaggaccccttcttgggggcccggagtgaaaaaaggccggtggggcgtgggggggccccaagaactgggccttgtgccctttggcagggaaccttccgaatggaaact

SEQ ID NO: 413587 - DNA, 332 bp, Homo Sapiens
ccttggctggccgctgggggggcctctccgcgcgcctccctggccgggccgggactccgccttcgccgtcgcccgggaggcccgggcgctccccgtcgccggcacgttgtccgagcattacccgccgtcagcggccgggcgcccagcgtgtgtctgccttttttcctcccgccgccttctcagctctcggaaaggtcagaggccaccgcctctgaccaaccggcgccggcacatctaggccctctctccctgtctggcgcggcggggaaacgcgccgcctcggggctcaccactcgagtcatctttgggagctctcgcagcgctgcccgcgc

SEQ ID NO: 413588 - DNA, 323 bp, Homo Sapiens
ccagggtttcctaggccccatttcctaatgaaggggagaaaaaccaaggtttttgggtttttttcctaagggaatggaccctgacttttttgggatctcctgcatgtaaggaccataagggaggtttaaccctcctcgtttccactccaaaaaggagggggttttgttttttaaacccttggcccctaaaaggctcctccttatttccgggttagtaaccactaggctaccaggtttttaggggcctgaaagaggccctttaaaaaatccaggaaaactgggaccccagaagtggcccatttagggtttaattcctccccggg

SEQ ID NO: 413589 - DNA, 292 bp, Homo Sapiens
  misc_feature (87)..(95): n is a, c, g, or t
  misc_feature (194)..(250): n is a, c, g, or t
cgggaaacattacaaatattgtattaaattccttttttggggggagttcaaagtcttaaaacaaagcaaatttacatacttttctannnnnnnnnggggggtaattatcataaggcctacaactaaaacccccatctccggattctcaggctactatactcttttccttcggatcaaactacaggaaacccccnnnnnnnnnnnnnnnnnnnnnnnnnnnnnnnnnnnnnnnnnnnnnnnnnnnnnnnnnaatctgggtcatcatattcacagtctaaacttcgctaaagac

SEQ ID NO: 413590 - DNA, 352 bp, Homo Sapiens
  misc_feature (300)..(300): n is a, c, g, or t
ttcaagtccctacggttaattttgggccccaaaattttccccaatttttaaaaccaaaccccttttatttttaacctttgaattaaaggggagctgtccttccttggtttaataaaaccaggatattttttgattaatttattcagttaaggttactggtgaccagaagttatccgggagctaaggcacagggaggagccaaccctgcacagggccgccatcccatctcagggcacactcacacatatccacactcatactgggaccatgtagacacaccagttcacctaacatgcacantctttggatgtgggaagaaaccagaatagttggagaaaacccacacagatgt

SEQ ID NO: 413591 - DNA, 436 bp, Homo Sapiens
gcggccgcccacagcctggcttcctgcctaccttgaagaccctgtagcaggcagagcaagagctgtagggtgggcatggggtcccagagctgggcgacaaggcaacaggacctggtggggttggtactgggttctgctggctttggagtggctgtggcagccctgggagacatcgggttgggagcaggagagctggggacgggcaggctggatcgcactcaggcgcctcccagtctgaaagcctggcccctcggctcgggtcctccctctagctggtggagtatctgccctccacagagaggaaagacggcaaggagcttggaaagaaaaagaatccttgaaagcaggagagagcgagcctggcccaggaaaggcagctggagtgagaagggacacagctgaagcccccacccagcccacaggagccaggtccggc

SEQ ID NO: 413592 - DNA, 469 bp, Homo Sapiens
  misc_feature (451)..(451): n is a, c, g, or t
gggccgggccggggaactttccccgcctggagccgggccaaaaagacccgcagcagagccgagggggcggagggctgcgaacggccggagggaaacacgagaggcgtgcagtttggggacaggggagaaaggcagagcgcgttgggggaaggggcaggggagatcagacaagtctggggatgtcctggggaccggggagaaatcacgccgcgggcggctgggagtcagccaccaggaggcttcggggatggagaactgggggggccctctggagaggtgggggcgaatggacagccctgggaggtgggaggacctgcaagttacggggagaacggcgagtttagaagggtccggaagggttgaggttgtctttgaccatccccttcccccatgctttacagcccccgggccccccattctcactccactctgcaccccgcgccaagccggngagagaaggtgtgggtgc

SEQ ID NO: 413593 - DNA, 404 bp, Homo Sapiens
ttaagcacattttaccttttgtaaagtggctaaagcttttatctgcaacatgaaaaaaacctatgctgttatcttggggacgggggttatttccaccataccgaaaggtgatgaaagaggggtggaacaagctggcataatgagggctcacacacccacaaggtggctattcactaccacaggctctaatggcgtgacagacgctagcatcgtggcaccaccctacctgcaaaccaaacctctaactgctccatgtcctcacaaggggccattggactgacttatctttcttccccggtaaacgcgaactcctgggggacagggactttgctttgctctttgttgtttcctcagcacctagaagttcactaatatctgttcaataagtgaaataatttaaaagg

SEQ ID NO: 413594 - DNA, 341 bp, Homo Sapiens
  misc_feature (49)..(88): n is a, c, g, or t
aaataaaagcccattatgcaggattggggctctaacagcaaccatgaannnnnnnnnnnnnnnnnnnnnnnnnnnnnnnnnnnnnnnnaatgaactttgcctcaatgggcggtagagctggtgtttaaatccaacacaaaaaagctgctggtggccttaagccaggataaggaaaagtccagcctgggatctgccctgatcacttatccataagactcacccacattactggaaatacaagaagatgagcaagttttagttaacagacttcatccagaaaggatacaatatgtgattcagttgtactgttttttttgaggagcttctggggatagggcata

SEQ ID NO: 413595 - DNA, 285 bp, Homo Sapiens
aagccaaaaacccaggcttttaatccaaccccgggtaacaaaggggcaggggagggaaaaaaacatcgcatcctatggcacatagcatcccccctaaaaatataataaaaaacaagggaaggaccggaaatctaatatttcacataaaaaaggttcatatgggctaacattttaactcattactttaaaagcatatcaaatgaggctctcctgaataaaaccaaaagcctccctgggctaccaccccctggggaaggggctggggttggggtcaaggagggcttt

SEQ ID NO: 413596 - DNA, 130 bp, Homo Sapiens
agctctggccgaaggtcatgtagctgtgcgggcaggcgtatggccgttcaccctagtggagtcgcaggtggtgctgtatgttggagtactgtccgaacgatatgccgcagtgggggcagcgacaggggcg

SEQ ID NO: 413597 - DNA, 446 bp, Homo Sapiens
  misc_feature (148)..(189): n is a, c, g, or t
gagacatgaccccctcaagcaccctggcctctctctgaacactgctctgctgggtgccagctcccagtgcttcccagactttaaagtgagccaagcacctaggatcttgtgaggatgagagtcctgatttagcaggtctaggtgatgnnnnnnnnnnnnnnnnnnnnnnnnnnnnnnnnnnnnnnnnnntggtagggaagctccccagggaacccgtgtgtacccaaggccacacagcgtgggacaatctggagaggccactggcaccagccagttcctgcctgcactgagtgtgccccgcgcggcgctgtgttggtgtgacacctggcaaaggacacatagcaggagcacggctcccggcacactgtggctccaaaacggcggctgtggcgaacaccccaccactgccgccggcacaccttgttcctcagccaggctgacactgg

SEQ ID NO: 413598 - DNA, 449 bp, Homo Sapiens
ttttttttcagggaagagttcttttgagaaggtgatattaaagcgagtttggggaagaacgtcccaggccttgcgctcagggtcgtcaactctttgatttctcttccttttgaagcagggcagggaggtcatcaaacaacagaaggacaattataactgctggtatggcaaagccaggactctgaattcaaactctgctccattctcaggaatcccgtctgttaagcaggttctggggaagcgatgtgagtcatgaaatcacaggtcggaggaggcatcgagaatatggtcagttctcaactttcagggaaatccatagctgaggaatgaaggacaacgggcttctcgtgctctcactaggaagactggttcaccggaggctggaacacttgtctaggtggcacgttccttaaaagcgaaaggaccaggagtttcttcctgcctcgtct

SEQ ID NO: 413599 - DNA, 424 bp, Homo Sapiens
acctaaaaaaagtgctaatctcattttatttactgacttcaggtttggctagttacaatgcaaaaaagatacatgaaacagttccaatatggaggaatccccacaggtatgaggaacaggaacagtccgtgccgctggtagggctactttcttagagaaatgaaatttccagttgacccgtgtgcccagggcattctccaaaatgattcacattctcattcatattcatgaatcctgctctgtttccactcatttgtatgcacaaattcttccctgagttcacacaggtcagtgctacagaagatgtggtcgatagcaattctacagggtcatgagaaaaagcagcaccttgtccacaaaagtccatggaagtttgttcgctaacatgctattaaagcaaaatgtacatcgttcacggcttgct

SEQ ID NO: 413600 - DNA, 164 bp, Homo Sapiens
  misc_feature (42)..(100): n is a, c, g, or t
aaaaaagggccggcctttaatggaaaaaagggaaaaaccttnnnnnnnnnnnnnnnnnnnnnnnnnnnnnnnnnnnnnnnnnnnnnnnnnnnnnnnnnnncccccttaaaaaaaccggggccaacccaaaaacccggggttggggccaaacctaccgggccccc

SEQ ID NO: 413601 - DNA, 136 bp, Homo Sapiens
actcatacagagacaaggaacccctcagtcgctgtttgtgtggcacctatgtgcacgcagacccttggccatgggcactaaattcgttacacaggatggctacccggatgactgatccacagccatgaaagtgagc

SEQ ID NO: 413602 - DNA, 124 bp, Homo Sapiens
gactgtatgtgtgctccatgtatgagatctccaaaacagcggcgatggactgctggagggcgatcagggcattcccaaccatgtctgcaatgtactgtttgatgaggatgatcccaatgtcatc

SEQ ID NO: 413603 - DNA, 347 bp, Homo Sapiens
actttgggcaatgtcattcaagctttccataaaatccttggaaaagcattggtaataggatagggatgttacaacccggctgactcccattcccagtcccgcggttatttgtagtcctaccaaaagggatgtgagttggatggttcatttgtgtctggcaattgcagttaaaggtataatgagggattggttcttgggagctatattaatttcacaggctaaataaacaagtgtaaaggttctagtccaattggctggtaaacataagtaagaactagttccacacaggtaaaaggctcctagtttttcaagacaagaattttctatggtaaacatgtgggttagct

SEQ ID NO: 413604 - DNA, 154 bp, Homo Sapiens
tttttaaagagaaagaatcttactctgtcacccaggctagagagcagtgaaattatagctcagtgcatccctgaactcttgggctcaagggatcctcccaagggaggcacagtactgccttactgggtgacacagtaagactccatctcaaggg

SEQ ID NO: 413605 - DNA, 430 bp, Homo Sapiens
  misc_feature (378)..(378): n is a, c, g, or t
  misc_feature (390)..(390): n is a, c, g, or t
gtaacatacacacagagacaaatagatctttatcctttagaggcacagaagagaatggcttgtggggaacagagattatctggcgcagtagactcttaaaaaagacttcctagatccaggtggaatgaaaactccgaattcataagctccatcgctagcccaagtgggcgagcagctctacttcccctctccaggaccagtgagggagccttttgaaatggaagaacgtatttacctggaatctgggccgaagaggcgatcacttcttcccatcccacagtcctgtgacagagcaaagcttaaattagatgtatttcaattggttttctctggattgggttcaacctgaattgagcccacctgtgagctatgtattgngctaggcactgnggagggatacagggagcaggtgggacccaggggactccta

SEQ ID NO: 413606 - DNA, 208 bp, Homo Sapiens
tctctatctccctattcttctttcttgctattttgctaaatttgctcatcttcctcgatttttctttctggctctgtggaaatagaaatctatgaaatcatttcttatttaatctcattacttctatttattcacttctctttttgcctgaacgctcataggcatgagctatccttttctgttccactttgttttccactatctcact

SEQ ID NO: 413607 - DNA, 234 bp, Homo Sapiens
taaccaaagggttattacacaaacgatgtcagataattgcatacttctctactgtgtacacaattatattgactctccacagaacgggtggttaacttctcatttgggggtggcaaccactaaaatcctgattctaacagacaccttctaaaaatgcgacactgatctaggcagatagacatactctggtccatgcatattgtacccaagctaaggaatgtacaaatgtttttt

SEQ ID NO: 413608 - DNA, 324 bp, Homo Sapiens
tattgactactcttcccaccaccagggacatcttaaaactccacttccaccaggacataggacccctaaacctcccctgggacctaggacctccctgacccaccacttgctctctccagcgatgaggggacccttatttggcaagagacgaacatgtaacctgctgtacgtcggaggaaaagaccaaggcttaaacgtttgaacccccgaacgccgttgttttcctgtccaacttttgaaaggaactccacggcccgccttccatggccttcccactagattgcctggctctgccgtggcagacccacttctgttgaccgcttg

SEQ ID NO: 413609 - DNA, 326 bp, Homo Sapiens
ttttcttttcaggacatgagtttatttcataaaaatcacaacatattttcacaacttagtgtcatcatctttcttctactataaactaaacatttcattctttccaatttcttatttttggccaaattatgtatagataataaaagtactgcagaagccaaaacatagagcctataaataaagtgcatgactttcattcattggaaacaaaaggtttagacaggttttgttcattacttatcttgaaatattagctatatagatgaatacggcaacaattaaaaacaaataattccatctaaactaaagatagttccttacttgat

SEQ ID NO: 413610 - DNA, 123 bp, Homo Sapiens
ccagttctttcctttaaaaaaatttattaagccggttatcccacacagtttgttttataccctgacatacaactccttaataagataaggcaaggccaaaaaggttttttttattaaaaacaa

SEQ ID NO: 413611 - DNA, 112 bp, Homo Sapiens
atttggcctttctatgccccctaaaatttttcaagacaggcagcttaaccttatttcttttgggcttaattttcttgggagtggtgtaagacattttctttcttttcttagc

SEQ ID NO: 413612 - DNA, 205 bp, Homo Sapiens
ccaacctaaaagactgagtgtattgttattatctgctatgaagtatcctactgaggtaggataaaatgatgttggtacaaagaatgtgatttgtttatagttataagaaaacgttgaattttttttagcaaaacattatgtctgtgacacattcttaataaaactgtagcaaaatgtaattccagcaattagtgtgaattctact

SEQ ID NO: 413613 - DNA, 175 bp, Homo Sapiens
gtgcatagtagaaggagtggaagccgttggtgcgcgacatgacatgcggcccctcgtactcgctcagagtccgaagggcatgtgtgtctcccccgatgtaggccggcacagtagcaatagaggcagccggagggtcgaatgatggccatatgtggccaggaccactgaactgagg

SEQ ID NO: 413614 - DNA, 184 bp, Homo Sapiens
gctgtacccagaccgggaccctgggaacccaaccctgcacaggctctttgtggatctgagctaggtatacagggtgctcagacgtgagcagagccaacagagctatgatgaccagctccgttcaagtagttcactaaagtctgtacgaaccacactccatgacaaggctgatcaccatacacac

SEQ ID NO: 413615 - DNA, 146 bp, Homo Sapiens
gttcaagcgattcccctggcacagtggccaactcttcaaggtttaccgaggacttccccagttttaccactgcaagtctcacatcctgggaaatcccccagtcccaggcaagctaggacagttgatcactctaccatgggctcaat

SEQ ID NO: 413616 - DNA, 214 bp, Homo Sapiens
catattcacaggaacagcccagaatactggccacgttaactacatgtacttgcgtgtacgacaactcacttagaaaagtatagtgaatggatggaatctattgtatgaataaaatgctacacattccatttagctgccatcaataagattgttagttgttataaacatactcaagacgctgctattgtgcacacaaaattaccggtgtatttat

SEQ ID NO: 413617 - DNA, 399 bp, Homo Sapiens
  misc_feature (311)..(338): n is a, c, g, or t
taaatattttgtgtgcccttttccatgaactttctctctcttttccttgatggcttgtcatctctctgacacaaaaggcttatcccagcagtattagtcagatggcaaactgaattctcaaaataactatttcttcctgcagtgctaagtgattcttatggctcctggatgtttagatggctctaaggcattggtatatactgaggtgtaatttgtcactatgcttgtcctcagaataaatctcaaagtaacaaaattgttgagtatgtaaaaagttgtacttccctggactatgatcagggtggcatggnnnnnnnnnnnnnnnnnnnnnnnnnnnntagaagtaaagctgcatgggctggcaaagttttggaaatcaagtcattcatgtatttaggg

SEQ ID NO: 413618 - DNA, 184 bp, Homo Sapiens
ccactttaaattattttttttaaataaaaatactgttatccccagggaaatgcggcagcattcctggtccaggggggcataacaaaacacccttgtttactttttaaatttttacaatacctaaaacatacaaacatacatcatggtctttggcaaaaaatgttcacagcccaaaaaatccttt

SEQ ID NO: 413619 - DNA, 471 bp, Homo Sapiens
ctcattggcaagattgttttacagtttccttcaagagataactgggggctacttgtaatagaacactagaagagttacacaggtcttagaaactacgtttttcatagtaattatgttggtttgcacttcctggcttcctttcttggacggtaggtacctggaagccaagtggagcagattccccccacttaaagatacttataaaaataacgaacatagttccgatgaccatgtgcccaacaccgctctgcgcacttcacacagtaatatcatctcagcctgtgaccgttccgagttaggtgccgggattctccctgttttgtgataacttgcccgaggtcgtacagctagccagctatggaaccagtattcaaactcggctacgctgcagcccgtggccctccactttcttgctcgtgctctggagtttaggcggccgatgggggcggggtcctttgggtcaagttgtgg

SEQ ID NO: 413620 - DNA, 451 bp, Homo Sapiens
caatttaagttagtttttattcaccaaaatccataatgttccatgtgtcacaataaaacaaagcagactttgccagcgtgaatccacttttactgaagatgagggtcattcatggacctagaggttacaatagtcaaagtgttctgcacgagaacaaacacacagatgtctttgaaatgtgatgcaaaagtgcagactgctgcctcctactgatgaaaaggaaatgagtgagatgctatgagtcactaattgtgaactagtcagtcgacaactccaagagcccacttcatgctggtgacgaggtccaccaacgatggtctggcatgtgggggccttagttgaaagacaggagaggtggatcagagacagctagaggagcaggcatttcccgagtgctgtaaagggggactcatcccgctaggagaatgtctattagggaattcagaccaag

SEQ ID NO: 413621 - DNA, 424 bp, Homo Sapiens
cccagtcttttacaattaaggttaactcagtcagaatgtgctgatatggttcctggttcagaggaggtgtaagaagtgcttggagaccagtctctccttcccaaaagagaattatgcaggttgagagagctgaagggctcatctgatgtcaagctttaatgccatctctctcatctctctcatcctagaagacagtctcttgctccttccaatgggagggaaaagggaggtgctacagatgagcattcatagctgccactaaaccgagtttccagaacagcatgtaagctgcgagcccgtcgccatccagccctctgctcacattaacactaagcagtatataatttagaaagggggaaatgctatcatagcttttgcccccacattgctatgaaattccagacttttatgtgcaggaagctcc

SEQ ID NO: 413622 - DNA, 459 bp, Homo Sapiens
aatttaggagttaatgtttttcgatatattataaaagataaagtttttgaaacaatttgctagcctcatgacaatattaggtagtctataaaacagctaattatctcatctaatgtactaattatattcaagtcaaattaattgtctcagaagtaactatatctgttagtaggatatacacagttaatgtatacaaccaactttctaaagaaatctgtaatttgtacacagttactttttaaatgtgattatagccactctgacagacaacagtatacaaactaaaaaatacaacagttttgttctattttgaaacagatgtccagactgcattgcaaaataatatttaactagtaagggatagcaaaagctgtaggtatttgtaaataatgtatttatcatgcagaccacagaataagcgatttaaaaaaagcattcttccacaggctttccctcctg

SEQ ID NO: 413623 - DNA, 102 bp, Homo Sapiens
ctgccctcatccgtgccctgagtattctgatacataatgaacgaacataacggtttacttggcctgagtcaatctcactctgaatgaccacaatccgaacca

SEQ ID NO: 413624 - DNA, 479 bp, Homo Sapiens
tgactgtgcaactgatttagtatttattgagctcccacaacatgccaaacacagtataaaccccagcatgtagagcttcacatgtgattcagcaacacatgcattttacacacatagcaaagacatcaacgcatgaaggtaaatcaatcaagaacctgccttgggaaacaaaggtgctcctgacctctcgtctgtgagggacaggccctgtgttcactcccagatctagccacactcttgaggttagttttgtgccttgcatttgaaagactaacagatgttcaggaatgcaaaccacaggacagaggtcgtgggtgagcctacctgagaaaataaacctggaacttagctatcccagtaaaacagcagattgaaaattcacaaggacaaaaaatcagacggttataggaactggaatatccttaccttagcatctctcacaattgctatttccaggtagctgttggagcatgcattga

SEQ ID NO: 413625 - DNA, 460 bp, Homo Sapiens
ggggttaaacagagcccgtcttcaaggaaaggcagtttattgatttagttgttgatttagttattgatttagttatgaagctgtggattataaaaaggctggtttgaaagaaggaagccacattctgtgggggcctatgactgacacccctggggagagttgggccaaggctagctggcctgtgagcctcatcagcactgcagggggcctgggagggtgtgcaggggggtcccaggtgcgccaggagtcagggtatgcagggggctccagggtgtgcaggggttaggagagctgagcaactttctggaacttatcccgggaactcatttccagagaccccataggctcactgcagaaccatgcttggtatatatggggcgtgtagagggcgcttggggaacagaatcctgcgtttcccccgagggagggaagacatgcaggggaacagggaggaaacgct

SEQ ID NO: 413626 - DNA, 462 bp, Homo Sapiens
gaaaaaacacattggttttttttgtgacaaagatcattgtgttaaaaagcctcagttgttgaagagaggacagacccactgtaacatatatactgttactatactcgtggacccagcccattaggctactcttaaggtagaaagtacacatgggatactgttcttactgctacattttaagatcaggtctgctcagtccccttgcagtctacatgctctgtgagattgctgccccaggacgttatagaatgcggtacctggctacaaaccgctctgaggcagatccacagatgaggtcttgctgggtgacgcttgttcactccaagcaattctgtctgtcttgaacctggcttccatgctagaaaatgtttcttgctatttcttcagactagttatgtgggcatactgcctcgctgctggaggagtcatctgtgacagcatagctacaccatgtgacccctt

SEQ ID NO: 413627 - DNA, 112 bp, Homo Sapiens
tacgccgggcaagctccttctctcggagcagaatgtactccaagatggcctcacgctcatacatgtagccatcttgggtgacaactggatagtcgcaaggctgtagtgtgag

SEQ ID NO: 413628 - DNA, 438 bp, Homo Sapiens
cgatctaacggagtttagctaaacagttgggccgcccttgtaggggatgggtggcggcgaccccagcagcagtacgcctccggtgactggcttgaccttggcttgcgggtagacggccagaaccttcttgagcgtcggcacgaactccttcttaaagtccttgtccgggtctttgcctttgtactcctgggcgaactgctcgcgcaggttggcccaatacaacgtgacgccccggccgtggatgcggtgcaaccggtgagcgagccaggcatacacatcgagcgccagcgcggaacctttcagggccaacaaagcgcgattgtcgagaggaactgcactggcccgcagttccgagaagtattcatccgatagggtcatgatgccaggccatagcgcccgctggtggtcgttgttgcctacccatgcatcgaactgctt

SEQ ID NO: 413629 - DNA, 433 bp, Homo Sapiens
ggtttggcaggattctaacacctttaatgagatataagttacatgccacaaaattcactcatttaaagtatataattcaatggtttttagtaaatttacagagttgtgcaaccatcacccccaaaagaaactgccagactgttttctaaagcaagcaaaccatttcacattcccaccagcagtgcgcgaaggttctgatttttccacatcccctccaacactgaccgtgtccttttaattgtaaccatcctagtaaggataaagtactatctcactttgagtttgttggcagtttctcataaagtgaatcagacaccttctccatgatcccagtaggggtcccatgggtgcaaacctatgcaaaaatgtatcactatgcatttaatattagcctactagatacactttgctgtatgtattctatactcatttt

SEQ ID NO: 413630 - DNA, 441 bp, Homo Sapiens
agcgtatgtattttagggctattatgctttacagtgatcattgatcaatggatctctactcctgaaataaattgagtctcaaatgactaggtccttctctcagagaccaaaccttttcactaagggatggacttttctgaatgcctgagaaactctcttaatggctaccagtaactaaaaatggatatcataataaaaactgactcacaacctattttactagacttcacatacacatgtggttcagttaggaagctgacatctcacttagtaaaggtgtgggccagactgcatcacgtgaatgagtcatggattctaaaattctctatttcccatggctttaattacatagggttttcagcatgacactgtattttatacagatcaggtcacaaatgaaaactgaaggaaaaaataatccgctttacaaaacctttatgc

SEQ ID NO: 413631 - DNA, 100 bp, Homo Sapiens
tgtagatctataccaaggctcacgtctgctgttatatagattttacattctcagcacctcagtctattaccaacctacaatcgtgaaaagctatcgaaaa

SEQ ID NO: 413632 - DNA, 263 bp, Homo Sapiens
ctactgagactcttccttaagaacaggatctatagctttaaaatgtcttcttctatgggaaatttcctgccaagccagggcactaaattctttcatcattagagctttcctgaagtccggccatatactgagtacctgctctgagttctgggcagcttacaatatcttaaacagattttcagaaaaataatgcaactatattttctagtgtcaactgtatgcaaacagtgtggtaaataccttttaattagtcctccacccac

SEQ ID NO: 413633 - DNA, 324 bp, Homo Sapiens
  misc_feature (137)..(255): n is a, c, g, or t
  misc_feature (264)..(276): n is a, c, g, or t
cggagacagggtctcactctgacatccaggctggtaaaatcacagctcactgcggcctcgacctctctgggcccaggcgatcctctcatttcagccttccgagtagctgggactgcaaacatgtaccaccacgcccnnnnnnnnnnnnnnnnnnnnnnnnnnnnnnnnnnnnnnnnnnnnnnnnnnnnnnnnnnnnnnnnnnnnnnnnnnnnnnnnnnnnnnnnnnnnnnnnnnnnnnnnnnnnnnnnnnnnnnnatgagctannnnnnnnnnnnnagcccaccggcggacgagctaaagtttctattcaacagtactctatgg

SEQ ID NO: 413634 - DNA, 218 bp, Homo Sapiens
gcaaagaaaacaagcatgacaggattcttaggctggggaggtatctcatctttttttgtttcatttctcaaaggtgataaaaagcagctgttaggaaagggatgaagaggagttagtccatttaacatttagtaaatgtttcctaaatactgattcctaaacagtatttcctaaatactgtttcctaaatactgattccttgagataaaaggaagcag

SEQ ID NO: 413635 - DNA, 541 bp, Homo Sapiens
gacctagctcagttagagaaaccagggaaaaactaccaacctgaatgacaacacccattcttgagatggtaataatgagaaagtaggtcctaggctaatccatgtagatttgagcctactttggccaagagctgatctcacagcacatacagaatgatgctactatgtagaccctcactcccttgggaaatctgtcatctacctaaaagagagaaaaaagatggaacataggcccacctagtttcatccatccacctacataaccaacatagatgtgaggtccactgcactgatagccagactgcctggggtaaaccttttcagggaggacgagaaactgaaacaggttcatcaagtacaagctagcttcctaatacccactttgatggagacaatctgtagataaatatggaaggatagatggagtcaatctggttagtgacactgagtaaagtccctttaagtgataaaatgataagggcacataatataggacaagaatgaaatttaacatttgagtgcctactcaatgaaaggcagt

SEQ ID NO: 413636 - DNA, 295 bp, Homo Sapiens
gcggccgcggccattatggccttggtgacggcaagtgcgttcccagcaaccacagcagacaccatggcctgcgtcagctgcctggcgaatgtgacttacaaacgatgaaaatatccctactatacggtgacacaggcaggctgtgcctgtaaggactgggaaatgagtctctgcgagcccccgcccttcccagtaagaaatttgggttttatgtgttcactcttgggatccctgctcaaggcgggctgacccgtactccaaggagacttccgcactgagcaatgacagtaaaaga

SEQ ID NO: 413637 - DNA, 141 bp, Homo Sapiens
ttatttttgattacagttgagactctgggaattcaatattaacatgacttggccttcagctcgttatacacacctgacaaagtttaaaccttgagaacgacattggtatgctgtgctttgcgcaaatgaacttttatgagc

SEQ ID NO: 413638 - DNA, 238 bp, Homo Sapiens
cagttcacttatcattagaatgtctgaacttttatgtaacatttttgtgtgcatctctcaatgctaacaccacatgtttgcctatgacaagtttatagagtgaaaggtatcttctgggttgaaataattcacaaattggtgaatgtcatcttgcaacacaccctgtacagtcttccttaaaggaacactacagtatatttttagtatctacatgctgaatgactgaatacagacctaa

SEQ ID NO: 413639 - DNA, 331 bp, Homo Sapiens
  misc_feature (271)..(271): n is a, c, g, or t
cattggtgaggagtgatggcaataagaaatctatgcaattgtcttactttaattaaaaaattggtaacataattatgagatctaatttacgtactaattaaaaatgaaaatactccattgtgatgagcatacacttaaacaacaattcctatagaaaagtataccttttatgggtgtaaagacatcagtagatatcaagtgccttaaccactgcatatcctgaaagcacatcctaaaataataatacatatcatcaaagatttacatgtangatatgtttacccatggtactttttatattaacgaactttataaaccagcaaaatatgca

SEQ ID NO: 413640 - DNA, 149 bp, Homo Sapiens
caggaaaaccctgctgttatacaagacccaaacccctttggatattggattgggatcgctactacaaagagggtcaaaggcaggtacaaaggccaatagagttaaaaaagctcagcttagctctggtacttaactcttaagatcacaaa

SEQ ID NO: 413641 - DNA, 142 bp, Homo Sapiens
taaacacatgcaggcatactatactactacacacacaaaaacacaattcaggtcaccatcatatttattgttccaggctctagctggacaacaaacaatattctctctaccacatatattcagcttaaaacatgaaacactc

SEQ ID NO: 413642 - DNA, 274 bp, Homo Sapiens
  misc_feature (134)..(142): n is a, c, g, or t
gggaaaacacatgcggtttaattgggggagggtgaaaacaccttttttaccaaattggggtaaaaatgaaacggggtccaaacgtgtcccctgaccgttcccggaaatttcaaaatccaagccgcattttgaannnnnnnnngaaaaacaaacccaaacaaaccccaaacatggggttggggcccggccccgggcataagggcaacaccccacggggggttgtgcggggggcccctgggtgtggccggcccctgtgtgcctttgcaggggccca

SEQ ID NO: 413643 - DNA, 210 bp, Homo Sapiens
gatatttcaacaaatttttattttgtgaaataagattatttcacctcaagattattcaacattcatgaaaattgtacaaattcaatcaatttggattaagtagggattaaagaaatttggggttgtgatggttttaatgattaacattaattcaacatattaacatcccttctctcctgctcctgagaacacacaaaaatgagagagatt

SEQ ID NO: 413644 - DNA, 428 bp, Homo Sapiens
  misc_feature (45)..(105): n is a, c, g, or t
cagtacaactaatttaaatttgttttgtgtcaaaaatgtattttnnnnnnnnnnnnnnnnnnnnnnnnnnnnnnnnnnnnnnnnnnnnnnnnnnnnnnnnnnnnntgagccactgtgccatgcataaccccctagttctaaagcctgatttagtattgtcagtgggcaacaggcattaggctctatcaagctgggtatcataaccacaaggcctgtgggatgactgtggttacctgcaatgaggttttcccttcaacatttctttataacatttaaatatctgtttcatatccactctacacggataattgatcacgtattatctttccaaaagagactaagtttgtattaaagctaatttaaatttttaaaaagtcttatcatatgaatgatgtgaaataagagcaatgccaggatgtactacactg

SEQ ID NO: 413645 - DNA, 356 bp, Homo Sapiens
aagactatcagtgaaattcccccttaaaaaatatccaacgtggaaaccccaacgcgtgaaacctagaaaaggaataaaacacctgactccataatattttcttactctaaaggttgctaatgagaacaaaatggctgctttgggaaggtaaacattttaaactgggggttacagatggcggctccaatgacatcagacccagatccaactgatttctctattttgctttgttacacggtatagagaaaagtcacattgataaggagttgctaatggtaaccgtttatccgctgctcaccttgaaatctcaagactgtcacttaagcagagagggcacaaaacaggcctagctggcg

SEQ ID NO: 413646 - DNA, 193 bp, Homo Sapiens
ttaattcatactgtacttccatggctctagctactttacattaagatttggctgggcagccttgtgtgtttctaggtactagcagtaagttttctgaccttgcgcacagcgccaggcaaagtacagttatagatccaaatacagatggccagacaactcgactgcactcgacccgtgttctttcccatagatg

SEQ ID NO: 413647 - DNA, 536 bp, Homo Sapiens
aacctatttcagtgccctgttttctcctctatgccctgctcagctacaactctgtgaatcaggataaagatagttcaatttccagaagtgttgccaacagcccccattcctcaaccaaatactcacatctgagaaatgtaatgtgcaattcacatgctatttgcatgcccttatcctaaacaggagaatgacccattgtcgttggactctgcctttccaagtcgtaagctctgaggtctcctttctctcaaatctggccatgcccttgaaatcccagcatgcttctgtcctcagagcataggggctttttgttgtgaccttgaaccaacagtgcacaaaatctgagaattttgaagaatacagaacacaactttatgccaagaagaagctatagttgtgctcataaattcttcctccaaggcttaaaggtcattccctaccatttttcttgcagacttttggtttcaatataaggtgggcctgctcaaaggcaagaattttcctgggcatttttttctcaagcattgcagctgtac

SEQ ID NO: 413648 - DNA, 163 bp, Homo Sapiens
tctcgcacccggcgcctgcccacccccttgtcgtccagccctacacacatggaggtcctatctatcgtctgctcaaccaaagtcatagtcttctcatccaccatgtcagtaacttccatatgtttatatattgaggcctattgccacaagatctcctcttcaa

SEQ ID NO: 413649 - DNA, 457 bp, Homo Sapiens
  misc_feature (120)..(170): n is a, c, g, or t
ctacagttatcataagttccttgaaatcagaaactcttttattttctttgcacagaacaaaatacactataaacaggaacaacactaaattcgctactttccagcccacaagttttactnnnnnnnnnnnnnnnnnnnnnnnnnnnnnnnnnnnnnnnnnnnnnnnnnnnttggtgacagaagagttttgaatgcattttgaactgaagatctacatttttcccttagtggtaaaatgcaccggtaagaattcaggttggcaattacttctgaaaatctgtttatttgcaaagatgattttctcccctccccaagaatcactcttcctctctacttgagtaagttttaaaggatggttcccaatgtccttaaggatctacaaacgtttccaaataatactcaaaagctacagatactacagcaaaatctagtcaactaataagcatcaacataccaa

SEQ ID NO: 413650 - DNA, 529 bp, Homo Sapiens
  misc_feature (383)..(383): n is a, c, g, or t
taggtagatggaaaggcccccagagtgaaagacgagagtcttgggctctagtccccattctgctgagtgaacatggaccagtcgctggctctcctgggaaactgagtttgctcctctctaaaatgagataatggggtgcttgactaatttcatttaggggccaatttctcacccctccctgaacccatgttctttgtcaggtgaccttacaatttctctcactaaagagatagaggccattttgccactccctgaatctgggctggtcttacgacttgctttagttatcagaatgcagcagccagaacaacaatctgccagttctaagtggaggcctcaagaggctctggggtttccactttctcgctaacccagcatcctgnggaatgagagacacatggagcaaagctgagtcaccctggtctccccagccaaggtcagcctttgtcagccaagtgagccccagatacatgagtgagttcagccaagatcagcagtgctgctgaccccaaacacaggagcaataaat

SEQ ID NO: 413651 - DNA, 406 bp, Homo Sapiens
ccagacctttgactaaaggctactcgctatgtcgtccaaggtgccctttcctcttcatctgaataattcctccatgtcttcagaagccatctctcctatgaaactttctctgaccggcgatactgggtttatggggctagagcctcccctctcactagatccaaaacatttccaccactgcaaaaagaaacttcatacttatcaagcagtaactccccatttctccattcccccactgcttacacctgacaaagctctcaatactctatggaagtctattttcctgtctgtctctcccactagaccatagctctttgaagacagggagcataccttgttgagttccccacacctaagaagagagcctgggatgtaatagtcacagttgaccatctgggttaaagag

SEQ ID NO: 413652 - DNA, 520 bp, Homo Sapiens
cttggtgccctgttcttttccttcagaggaaggagattttacacatattacaatccaatatatatgatgcatatgtctattgacttgtttgttgtctagactagataatgtgctttgtgcaggaaggaaccacatctgttttgctccccatcagatttccaatgccaagcacaatgcttggccctggtagatgctcaaatacttgctgaatgacgatcactgttcagtcaatcctttcagtaaaaagatttttaaattctctattttgagcctaaaataataaatataaccatctataagaatacagcccaaaagacagcatgaggtccaagaaaggactgaaaattgaataagaaaacaagccagcttatgtcagctttgaacagcaagagaaatgaaacttataaaatgcatattgggattctgaaaggttatttgcaggagcaatccaacgggtaggttttaatctcaaatcctaaataagcttatgactgaagccagctcctcttgcccagtgctg

SEQ ID NO: 413653 - DNA, 454 bp, Homo Sapiens
tcacccgaacgccgagccgggtcagggccagggtattgatgttgccgtcgggggaacgggagatgatcgtggccaccctgtcctgcgggcggcgcatgaacgagatcatgatgtgctggccgtgccacatcgccgcgatgaacggacccgtcgcgtcgaggcgcccataggcgccctccggctccacggtgaagcggttggtgcgccgcacgagccggagatagcccgcggcggcaacgccgaggatccgctggacgcccggcttgcggccgatggtcttgatgaggcccatgggggttcggacagctctgtcccgcttcgctgatcgtgggctacggccactccccagccgggggcgggaggcttgccggatggccgttgtctagcctcgaccgcgcggccgaagcaacggattggatgcgatccgtaaatgtatgtttagaaatgcggcgtc

SEQ ID NO: 413654 - DNA, 788 bp, Homo Sapiens
  misc_feature (707)..(707): n is a, c, g, or t
  misc_feature (715)..(715): n is a, c, g, or t
  misc_feature (728)..(728): n is a, c, g, or t
tttttgttcaactggtttatttttcgagacccagcctattgaggaaggcttgttcaagcaggcttcgttcctacaaacacacaaacatccttctgtttgcctacaaagaaaaggggaccagcgctggatttgcatgcgaatgaggagccccaggaggagacgtccttgcccatcaaaggccgcggtagcctggcggccccgcagcctttgttccagcacctgctcgcctgcacggcctgacggggcgcgccccgcgctcctggctcgcccatccagggtccacggatcactcgtccctcgcctgccccgcggcccacacctctcgcagctcatacctcacccgccccgcggccctgcttcccccagtctcatcctctcgggagcaggcccgcagggtctgcaaggccaagaacggaaccccaaacgcagagggtggggaggtgagcgtgaggacgcaaaactcggaatcgaggcggcttgggtttacacgttcctttagctctgggctcacgctgctctccacctgtttaaaaacaggcttgcggtctcagtgggggccgtgaagacgatcccaaccccgccccggagcgaggcctgatcgcctatgcttcttgcatctcttaatgcctgacacccctgaggggaccgtcctgcactttgaacgtggatatgacgaagacagattaacagattcccgattcagactncacgctgngcaaaattaaatncccacggttgtcttgttttctgtatattttagactaattacatgctgctacgaagtaccg

SEQ ID NO: 413655 - DNA, 449 bp, Homo Sapiens
  misc_feature (189)..(227): n is a, c, g, or t
aagtagttcttgtaagtctagatgtcagccaaaatccctcattcacctgcaccttttatcaaatatgcaaagaggcactctagggagccttaaaagcatagactctggagtcagtatgacctacattcaaagtctctatccttcactttttatgcatctgactgtggaggtttgatgtcaaagtccttnnnnnnnnnnnnnnnnnnnnnnnnnnnnnnnnnnnnnnnttgtggattagagtgaagaggcactgatttcacttgacttgtgtttccacaacggaaaagaaatttgcagtccatttctaggagggaaatctacaaaatggactcttccagcttctctctataccttccttcactgcactattagaaaggagggggacttaatctaatttgcaaatttgaaaggaatagagtatgcgtctctcctttttcagatgcgcctcc

SEQ ID NO: 413656 - DNA, 482 bp, Homo Sapiens
gtctgagaagtttattcagcaagcagctaattcatggtaacataaagaaagttgatatgaaaactgcccttcccctatatccctaaggagaccaccaagaagaccaggacatgctattacgtatgttctagaaatgatgaaggggagcactggggagctaagatacatgggtttaatctcagattcacttccgatgaaccgccctccttcgtgcatccactctgaaaggcgtggcctcagtacgaatttgggaagcttttgcagtggcagaagtcatgaaattagggggcagcaccttagggccatcaaaagggagggttgtcttgggaatgaaggtttggcgttaacagatctggcttgttgggtctaaagaacaacaaagtattcctccccggctctcggaactcaaggtcctgagctcttcaatactgggcaagttcacgtttgcacatttcgcacaagcaggaggcagggtgagttgt

SEQ ID NO: 413657 - DNA, 278 bp, Homo Sapiens
tttttcccaagcccctacctcccacatggtggccacatttggaagacgacagtgagagacaaaggatgatgaaaacggctgcccaggagtatacctttacaccctggggtcttatgacacctgatgcctaccactcgactcttttacccttagaaaaaggacctcacagagggagcaaaataaattaacattcttgtgaatatatgtggactgacatatgttcatgtgcaatgcaagaacgcacgaggggctgacaccagctaataagtttcccacct

SEQ ID NO: 413658 - DNA, 138 bp, Homo Sapiens
gggaatccaaaagtttcatattttttttcccccaaaaaaaggcccagcttttcaaacttttcaaacccccaaacgggaacagggggggccccccagggacagccttttccctaattttggatcaaaggccaccctgga

SEQ ID NO: 413659 - DNA, 209 bp, Homo Sapiens
ggtcatgttttccagtttttattaggatatttggcatggtacagataacaacttgtcccttaccaccaaacacataatagctggtcaaaatgattattttcaaaggaaactatttaaaataaagccactagtacatataaattaggaaagaaaagtcaagctggagccatcttgatattctaatgagcaggcctatctagttctacatc

SEQ ID NO: 413660 - DNA, 400 bp, Homo Sapiens
gtagagatggggtttacaccatgtttccgggactggtcttgaactcctggactcaagcaatctgcccaccttggctttccaaagtgctggaactacagacatgagccactgcgcctagccctatggttaaacttttaaaacagtctttacagtctgagaggtgactgtgattcatactccaaaataatggcctcaatgtagcttgtcttccagttcaagaattacgttgccgactcctatcgtcagagaatgaggggagggggtgaggcattcaccaggctcagcctctggtgctgcccacaggggcccttctctgtagctcctgaccccagctcagggagggtcccgtgctcacctttgagtgctgtcttcagcagctgctgggtctctgcatcaaagg

SEQ ID NO: 413661 - DNA, 451 bp, Homo Sapiens
taaatgttaaatctcttggggcaagtaaaactgcagcaaaatcaatgctgttacacagggacttcgccacagatcttggagctacggacaaatcaaacatgatttggtaaatttaaatctgctcaggtttaataaaataagactcagtcaagaaactgaaccacttgaggttgtaataatagtacctgatagtaccttggatttctatttcttttattcttattctaagttgtagttcagttgttaacatctaatagatgtgcatgaaagttcagtgttgctttacagccttcaataatgagctctgttcttacagaaaaagcacaattaaaggggcagctaagtaatttcttggtgatggcgaagagatgcctgagatcaaattcctgttttaccggatgttctgcaacattgggtgtgtcacataacctctctaagtctttgttttagg

SEQ ID NO: 413662 - DNA, 408 bp, Homo Sapiens
cctggactcctttgtcttgacggggtcagctaaagacttcgaacctttactcatcaaagctcatcttcggaaactgctcatagcactttaacctcccggtgggagctcccagggcgccctaggtcctgccagcaggcaccgatttcaagtttccaggcacattctgaatgctcctcctggcagcgccacagagggtctgggggcccattcccgacccccggagcgccacacctcaggaggcctgtgattgttcaaaaggggaagtgagaaatgccgaaagacttacgttttcacaaatacaatttctattacctgaaaaaactgttgtgccccacgaagcccgtgttgcgcaggttcatctctcctgctgccacctccgcttcgctgtggtttcttaggtgtgactgt

SEQ ID NO: 413663 - DNA, 450 bp, Homo Sapiens
  misc_feature (345)..(345): n is a, c, g, or t
aattggataaaacctgctttaagcccccacttctaatgtctggcttttttcccccagtgactcctctttgttcctgggcttgtaccaggactcaagggcttacacagtctgggcaaaattgagctgcccacatcagccactctcagaagcttccactacagggcttaccaatccaagaaaaagaggctggccctactggctatatgcactgccccagagcctggctaagcagaaggaccccctctgtggccctagagactgaagtcctagtgcttggtgcccaggcatttacaccatccccacccctagtccaaagccctgctcaccaggggactttatatgagnaagagagcatcagtgcctctctgggcatctgctgctccttcttcttgcccttgggggaatccgacctctcactttgggaggaaggattccagttccttagagttt

SEQ ID NO: 413664 - DNA, 463 bp, Homo Sapiens
  misc_feature (385)..(406): n is a, c, g, or t
ttttaaatcacccattactttttaagattagcaaagagctttacaaccaacccacacctgcttcctgctgcaataaagtgctgcacataaattgccattttaatgaccacaaaataagagcttttaaataagtataaagttagcctcctagcaggttacatctaccaggcgttaacaaaatggaatacagaattactaataacatggaggataccacgattagccagaagatcggcaaaacacaatggaaacttgtcaggggcataaactgaaccataggactaaacagcacctttttgttgcgtcattatatgtcaaagaggttgtggctaaatcttcaaacatacagtctactcattccataaacaaggtacattttcttccnnnnnnnnnnnnnnnnnnnnnncagatgagaaacaaaaactagtgcaagaccatagcactgtgcaaaactgccatttct

SEQ ID NO: 413665 - DNA, 435 bp, Homo Sapiens
ctgggcggcatggcggcggccagctgtaactccgcgggagggcgactggtgtcggcgtggtttcccccggcagttggcggtggtcatggtatggcctccgggtgtagggcgcggcgcagcgcgtcgctacgtttctggtgagcccgcatccgatacgacggaccgtcgatggagaccacaatcccggtgtgtagcactcgatctaaaaccgcggcggccagcatcgggtcgccgaggcgctcgccccagccggcgatgccggtatgcgaggtcaggatggtcgaggacttcaggtagcgccgtgaaatcacctcaaacagcgcggtattggcctcggggtcggggttgcgtcgggcgtacgcgaattcatcgatgaccagtagccgtgggccgcacaagaaccgcatgcaggtggcctagcggccttcgagtgcg

SEQ ID NO: 413666 - DNA, 495 bp, Homo Sapiens
aatatttaatgctttccctttatttaccagctgcctagcatccccctaaggtgaaaaactagttatttttaaatatgtgtgaatcactggatttaaacatgtctgattggtgtcaatccattgcagttattaatcttactggtgctcaaaaaatctcgcctttggctggtggaagtgtattcacgttggctcctgtctccttttgacatgacccggggagtgtttcatagcatcctattttatatgacaggatatttatgactcattccttatatctcctgtccccaaaatgcccagaggcatttttcatctggattgcttgaaggtcagtgatggcaggaggtaagctgactcccagtttgaagacttacagagctacatggacagtgatgtcacttgcagatgtggggtcgacattgaggttgggggaccagagtggtcaaagaagactgagagggtagcggagtgagggcagacatctctggccatcctgca

SEQ ID NO: 413667 - DNA, 248 bp, Homo Sapiens
gcggagacgggggatcgggtggggccaccggcgtctgcgcggtgccacttgggtccctgagccagtcggtgcgctgcgggaagcgcactctcccatcggcccggagccctgccctccccgcgcagggcccacgttttccgagaatcctcagtggcctccacgtgttagcgccgagcgctcccggccgcaccccgcgagggggttctccgcaggccgggactgggggcgccgtcagtcagtattagggc

SEQ ID NO: 413668 - DNA, 475 bp, Homo Sapiens
  misc_feature (83)..(180): n is a, c, g, or t
ctgtcttcacctgtgcaggcgacatggcacctgccaggtagagaccccatctgcataataaaagtttggggtggaatggccannnnnnnnnnnnnnnnnnnnnnnnnnnnnnnnnnnnnnnnnnnnnnnnnnnnnnnnnnnnnnnnnnnnnnnnnnnnnnnnnnnnnnnnnnnnnnnnnnaaccgcaactcgccccaaacccggaaacctgctcagataccctttcaatgcacgaggaaactcttcattcttttgcctattaaacttccactcttaaacccactccttttgcgtccacatcttcaatttccatagtgtgagacaacaaacttctgacatttccctagacaaatgatgctgcttccctgccatctctagcccaagtgccaaatggcatcttgtcactttagcctgatgaatgccacggctgccaccatgctgcttaggacaaacaaggacacaaagatggagtagg

SEQ ID NO: 413669 - DNA, 543 bp, Homo Sapiens
  misc_feature (318)..(326): n is a, c, g, or t
  misc_feature (406)..(446): n is a, c, g, or t
atttagctgttgaattccctgacaagcacagagacagattagtgtacaggatattatttagagagcccttggcctttatatccctgaatcagtcatttgacacccagttcttgatttcagttccaaagttatttcaaccactctcatcatcaagccattctgaaagggagaaaggttttcttaaaaatgatcatggagaagaagtagaaaaaaatgagctctggagttggacaaagctggctccaaatcctgcaatttcctcttactagctgtttaactctgaaaaagcttttaagtttttggaggttcagtatcccnnnnnnnnnaaaatggtgataagaatacttagcttgtaaggtattttggaagtcaaatacaatcatttatattaagcaacttgcatagnnnnnnnnnnnnnnnnnnnnnnnnnnnnnnnnnnnnnnnnngtgataattaggtaaattattgtccttggtgcctggctttctcatttgtaaggtggaatgaataagagcaaacaagagctacccagaaaggtaatga

SEQ ID NO: 413670 - DNA, 559 bp, Homo Sapiens
aactagtgaatattaaattttgaagtgctgaatttattctattctgtggataagactggctgcccaccagtctggaagttcttaaagcagtgattgtgttctttccatgctattgccacttctcacccaatctggttctttgcccccatacaagataaaactttcaccaaccaagttaaaggatgatttggactctgtcatggagctacattaggattagaataatatcagagaatgtgccttgaatgaattagcctggcattcgaggccaatttgatctgccctctgctttcctattttatcccctcctgacaaccttcctgataacactccaagtgtaccaagtgttttcagagcataccttgtactttcccattcatagtccttttagttttattttttcttccccttacaatgatggttcttctgtcttgacattctaacaaatcttcatgactcagaacaattaccattttctcttcctgagtcctcaggtccaaaagaagccacttcattttttgtatacttacaaagcactccattatgacattcaggcatt

SEQ ID NO: 413671 - DNA, 470 bp, Homo Sapiens
aaatagtagatataagtgtaaagtattgagaccagaggttttcttgttgttttggattttctcattcataaatcctctgggcctcacatatccaatgggtgttgtcagtgagaagtggtcactatggggaccatgtacatattccagccatgctgccatgattccggtgtttttacttctgttttggaattatcttcagggtccctagcatgcctatcattccctcactcaatgcatcgcctgaaaggtactgctaggcatgaagcaaatactcagtaacaacctggacagtagcaaacctctgccctccaaggacaagctccatccagagccaaacaccctcggagacacattatttgcaagatgagggtggccaggtgagggacgccttggggctaggtgagaccagtagctacagacatgtctggggtctgctggggtcaaacaggctatacttgatgccccatgtc

SEQ ID NO: 413672 - DNA, 440 bp, Homo Sapiens
  misc_feature (360)..(360): n is a, c, g, or t
cggctgcatccggggggtcgaggcgtcgcatctggaaatcgcagcctgtgactttgtaaaaaagtgaatggggaagaaaaggcgctgagaggggcgatgggcggacgggccgtgcccaccacagggaggtcgcggcacctgtcgctcctggttcccagggcggcctgtcaatcacccacgctgggctcagcttgccgggagcgggggcacgcggggggcttcaaggcccagagctcagaggctcgcaaacaataaactcagaaacgtggcgcgcacccgcagggcctgacacagcctctggagtggcccctgggcctgtctggctgcagggttggttggccgtgggcgtgtgcggctcanggtttcctccacgccctttcacgaatgtccccacgggaccccgcgtccacccaggctgctccaggagagtcccggagagc

SEQ ID NO: 413673 - DNA, 395 bp, Homo Sapiens
  misc_feature (178)..(178): n is a, c, g, or t
  misc_feature (252)..(252): n is a, c, g, or t
  misc_feature (256)..(256): n is a, c, g, or t
  misc_feature (322)..(339): n is a, c, g, or t
cgtgttttgcccgcccaaccactgtgggtatatatttgggtttttttgggggccggggaacgggaccgttgggtaaaaatccaaaatccaatttttacttttaacaacctgcagggtcagtccaggtgtgggtgtgaagccccaaccaaaccacacgaacagggtttggggaaggganaattggaaggccaggttacccttctgaccagaggtgctgtccaaacaccagacccgtttggcactacttgtgcnatgngctggccgacccacagtgcccaagaacgggagggttgcctgccttcccagaaccaccctctccttnnnnnnnnnnnnnnnnnncgtgccactctccggggcctctataggaaaaaggtggtctttgtttttgaggctcc

SEQ ID NO: 413674 - DNA, 166 bp, Homo Sapiens
agcttattttctgaccattgatgtgatggtgtatgacaggcatattatattgcatatttgggactcaattggtcataaacttgattattctctctgcgttgtcttctacatctgttattactgttatgttttgttatttgatgttactgttcataatatatttaag

SEQ ID NO: 413675 - DNA, 149 bp, Homo Sapiens
ccagagccccagttacccggggaggacgcggggagccggaaccccagttacccggtgaggacgtggggaaccggaaccccagttacccggggaggacgtggggagccggaaccccagttacccggtgaggacgtggggaaccggagccc

SEQ ID NO: 413676 - DNA, 226 bp, Homo Sapiens
ggaggaggcccgggcgccggtctatccacgctctccatctccacttttgttcaccacacacagaagcagcgagggctcgccaagtgaccacttttatagggagggaattcttaccggcctggctcttaagggatgctagcccatgaactaacgaatgctcctccagggaaactatccgtgcgtttgattgttattatgggggcaggcatgtccctgagtccttact

SEQ ID NO: 413677 - DNA, 285 bp, Homo Sapiens
gatccccaaattaaagcttgggaacatatgaaacttttaaacatccaataaaagcttttcataataattggttttcctcccaacaaaacttgggggggaaaggaaaagggttaaaagaaatccgggaacatccctaaaaaaccccttccttttttccccaggcaaattctccacgaaaggggtttttcattttaatttttgttccccagctttgaagccactactggggcttataagggcccaaaaacaggggggggagcaaaggcccaggacgggccaaaatta

SEQ ID NO: 413678 - DNA, 374 bp, Homo Sapiens
  misc_feature (81)..(113): n is a, c, g, or t
aatcctgtctctgtaatcagtgaccttgccatttaactgtttccacacccaacaaaaggagacccattcctcagactcagnnnnnnnnnnnnnnnnnnnnnnnnnnnnnnnnnaccaccaggtctcgaacatactaaagcactaaataagcacttttctggctacatctacatcatctgctgaacacctactcactcttcaaaccctactttgaatatcccactgtagaactttcctcaatcctgtgttctatttttttccctgaaagaatcaactgaccacttactcttctgtgtgtcatctggcactacagagaaatgtctcttttaattgcttgtttatgtatctttctactccattataaaatgaacacc

SEQ ID NO: 413679 - DNA, 339 bp, Homo Sapiens
  misc_feature (283)..(297): n is a, c, g, or t
acatttgacaccattttattgctaaaaaatgtgttctggagtgacatttattcttggctttccctcgagactcatgggagtgttttctgtcatggagggactactgggaaggtcacagcaagtgcacacacaccacagatagggacattaagatagtattgcatcacaatacttttgcctttaaaagggtagagaactctacaggacaacccatttcctgagagggtaggccagatggctctgggtgactgagaatgtcattccttgaatgggggacagaacnnnnnnnnnnnnnnnattggacacattcatatataagcatatgcaccccagcaacaa

SEQ ID NO: 413680 - DNA, 460 bp, Homo Sapiens
aaaggaaggcaaggtatcagagaaatgcctcatcccatctccttgtctgccaggacccaagactcccagacctcaccttgggctcctcatcaaacgggctgtaccctccccctacgctcacccacacggattgaggcaagggctgcacttgggagcaaattgcaaggtgggctggggatcagtgggcagtgcttgctgggcaggtgaggcagcggaccggagccaagtgaggcagacggtgttgatttcattcccacactgcacccaagggagctcatctgcccacgctctcaccaagagtgagatccatgtaagatggagttcaaatctagatctcccgattctaccactgcaacccagggctctttcagccacaccgcaaatcacctgtccaagtgctggacacatgcactctctgcttttggcaattgctggaaggaaagcattcgagaacaaactg

SEQ ID NO: 413681 - DNA, 243 bp, Homo Sapiens
ggtcggagcagcgccgtcttgtcccccgttgtcggccgctcgcccgccgaccaccgcgggtacttcagcctgcgcgccgcctcgcccgccccgtgcaggggccctagcacgcgtcctgctaatcctagtcccactcctgctctgcctgctcctcgggctcctcgtgctctgaccactagttcgaatacgacctgctcgacctgtaccgcacttcaaactgtgaaagcatgtacatgggcactt

SEQ ID NO: 413682 - DNA, 254 bp, Homo Sapiens
attggaataaaatctacatactattaaaatatacacattgtagttcacaaatcaatgagttttagtaaatttacacagttatgccactatcactacagtccagttttagaactcctctatcacccccaaaaaactccctcctgcccatctgcagtcaataaccacttgagaagcagccccaggcaactaccaatctgcttcctgctgctataaactatcttttaaaaaaatacattcttttttagatggctttt

SEQ ID NO: 413683 - DNA, 168 bp, Homo Sapiens
caggagtgtttacaggacatttacagtaatcacatgcatgttttatggaaatattccatagtaaaatcagggcccagaaaatggatgttatcccaggttctgattaatagccatataaaaaggaaatcttatttggaattccattattgactggatcatttttcttgg

SEQ ID NO: 413684 - DNA, 166 bp, Homo Sapiens
ggcgtcacatggggcagtgctgctgcacctgctgggcgtgcagccacttaaggttgcagtgcatgtgtaagcagtgttagcactggacccacaccatcgttcatgtcgggccgggcaccttacatttagggcagcatccgtaaaatgccttcctgcagatgccaca

SEQ ID NO: 413685 - DNA, 475 bp, Homo Sapiens
aaaatattgctgttttatttggaccaaaaaacctatcctcaaaccttcagtcttttggccaaaagtttcgatctagtgaggattggatttgtcagcttttaatagggtatgtcaataacaaaagtcctgtctcccaggaggaaatagactatgccctgtgttggtggggggggcctgtcctttgttccctaaaggatacgggggacagtgtaaaaaagatatccaaaactttcctttccccactacctcgagaatctgctccaacgatctttcccttaagggaagtgcttctaggaggagggggcatttgttttgtgaacgccctgttaaccagttcagaagtccgaagcctaaaaagggctcaaaccactcttagacaatccctatggagtagcagatcaaattgatcaatttctaggaccccagttgtatacttggactgagttaatgtccatcctaggcatcctcttttcgg

SEQ ID NO: 413686 - DNA, 361 bp, Homo Sapiens
ttaatcgtgcattgaacaaacactgaagtagcccggagcagacactgacaggggcagtatctccacggtcgaaaagggcgtgcagggccggcttggcgtcgccactgccgggatcgccgggcccctgaaccgaagagctttcccccctctttcgcactcctcttttttgtcttccatagcttgtgagaaaataatttctgagcatttttacttttaaagccatctcgtccctacgaggtttgcgcctctgggcatgtagtctacacaggacctgagaatctgagaaactgcaggtaagtttggcggccttttaatggctctcgcctctgaacaaccctcttttccctcactttctgctctg

SEQ ID NO: 413687 - DNA, 441 bp, Homo Sapiens
  misc_feature (257)..(267): n is a, c, g, or t
  misc_feature (320)..(320): n is a, c, g, or t
attttatcctttgtgcaaatggaaccttgccgtgaaataggcattacacttgctttttcagattaaattccagcttctttaccttttacatgttgactctattttccatcttttaatcattattgtcaccagaattgggacgagaaaaggaaggcgccatttacataatcacttggctaatcatgtacatttatttacataagttataaatctatctgagagaatgagaagcagacccggggggagtgaagagcctnnnnnnnnnnntgggacttcccaaaggtccttcagggagagggaatctgagatgttagctttcncgaagtcagaagagcgtggacagcagacatctgggcttgagggcgctggggcctgcctgcggggaaacacaggccacgagattgtctctggggagagcgagagaagaaagcgaagcaggcg

SEQ ID NO: 413688 - DNA, 371 bp, Homo Sapiens
gcaactgtgccacctcagagaagtagatttttaaacaaacccaattttctcttgctgttaacaacactgaagactagtagcagaggagtgaaagtgtgggttaagagccttaaaaacttgtggaaagggctcgatgccagtggagagcacttagttatttcagtgagaagagagcacctaaacctgggtctgaaaacacatgaaaactccaggccttgctcccggcccttctgcacattgggggcggggccagagctccactgatggccttgctcatgacttcatctagaaactgagcaacaggatttctagatttcaacgcccaaagcatccacccacccacagagaccatcacaccaacacaagcatga

SEQ ID NO: 413689 - DNA, 458 bp, Homo Sapiens
  misc_feature (80)..(146): n is a, c, g, or t
ttttaagtaaaagaacactgttgatgggaagaaggaacaacactactataagatttataatgaaaaagttccctctacannnnnnnnnnnnnnnnnnnnnnnnnnnnnnnnnnnnnnnnnnnnnnnnnnnnnnnnnnnnnnnnnnncatctcccatggtgctgataatcaagaggtgcttacctctctataggaaggatgcaataataatccgaagaggcatgaggggggcattgaaggtgcttgatagttactttgttctgatctgtgtgctgggtataagactgttcgttttgtgatcattcatcacattaccacttaatgatgtgtgtgataatctctattccacacatcaacaaaatgattttttttaatcattctttttatagacagaaattagcttatacttactgctgcctgcttgcagaatctaatccacgtacattgggccagagactt

SEQ ID NO: 413690 - DNA, 454 bp, Homo Sapiens
  misc_feature (334)..(334): n is a, c, g, or t
  misc_feature (442)..(442): n is a, c, g, or t
ttttggctaatgttttgtattttttgtagagatggggggtctttttatgttgcccagtctggtcttgaactcctggcctcaagcaatcctcccatgtcagccacccaaaatgccgggattacaagtatgagccactgcgtccggcaccctcttggcttctgacagtcaccccatactgaggctccagtgcccaaatctaccctctcctctgaagatgtggaaaatgaggcttggcagggggtagggtccaacttggagcctctcaggcttatgcctttttcttctctccagcctcacaaatcccagggaagccaagccagggaggtgatgtttngagggatcttctggaacgtcagagctaagaacactggttcacaatgcagggggcagatgtggccagagaaagaattcacaatacccaggtgggcctcagaatccatgngagagaacagtg

SEQ ID NO: 413691 - DNA, 106 bp, Homo Sapiens
gaatcgtcatgcacgaatactgcactgtggatcgggacgacgcgaacaccatgtgtgatagtgaatctgggtacagcacttgagggttggagtgaatcatcattag

SEQ ID NO: 413692 - DNA, 364 bp, Homo Sapiens
aggcgaatgttcaaagtagcaaactggcaccacaccgacccactagacacatggaaaaaacatagggctcacagcaaacggatcaataaacgcatatcgatgaaaaggcagggaaaaacaaaacagtggcaatcacagaatcaatctaatagatgaagggccggactcaaggcacaaagcaaaattcactcatgatggtcacggggattagagagctcccccataaggatacgcagacaaatgctcaactgcagctcactaaggtcttcacacgtgatttactctcatcacctccatgaatatagccatatcatatgcatctccacaccatcccatcatagatctgcctattgattatggccca

SEQ ID NO: 413693 - DNA, 176 bp, Homo Sapiens
acaacagcagaccttttttcttcctctccttcacgggaggcggtcagaggactgcttgaatcgataactcaaacactgacctgtggcccccctgtgtgatcgccgagcgctccatccatatgacatcaacaaaccacttagacatggttagaccctgcttatatgcgatgggagtc

SEQ ID NO: 413694 - DNA, 287 bp, Homo Sapiens
aatcttagtggacataaatgtgacttacaattaatggctccttagactcaatacaatatgctattaaatgtgaatgtctataagacatcagaggggagatgagtagtaggcatttggatatgtcaatttggagatagaaatgtgggggtcacctgaagcttgctatttaaaggcacaacagtgaatgagattcctttggagaaagaatataaagaagacaagaagatctaggttgcatgtgtgagaaatctcaacatgcagaagcgagtgaaagagaaagagctggt

SEQ ID NO: 413695 - DNA, 396 bp, Homo Sapiens
aaccattcacattatggtttatttaacaggactcaaaggaaataggaaattccaggataaaaaatatatattaatcacactttaaagtccagggaaaactttcacaagctttattttgatccttaaagcaatgcagagggccttatgattatcacttttttacaggtaagggaatcaggacccaaagaggttcagggacttgcccaaaaatacactggtagctgtcggcaaagctgggacttgaatcctaggcccctgacctccagtccgatgtcctttcctagggggggatgggggtgtggaacctgtaaaggcccagggttatttgtgggggggaaagtgtccaaaggacctgaaaggacaagctggggaactgctttgggccaaccccacctg

SEQ ID NO: 413696 - DNA, 314 bp, Homo Sapiens
ccactgaacagcactgcttgataattagcaagtaatatgtttctaattgaattaaaaatacacttaaaggcatagtcatataatacattttatgaattatgaacttatcttcttgcaagttaccatttaagagtaaggaagggccaagaaatccattaagcatatcgttttaaacagctatttcccatctctactgagcacgaaactgacagacaggatggtactgcagaccagctggatagtacaaaaagctccagatcatggatgggagaacttggactccactattagttctgatgcagactgagtgtttc

SEQ ID NO: 413697 - DNA, 442 bp, Homo Sapiens
aattcccatcttcatgcctatggaaagacatgggtaggtggagtgacaactgaggggtgagggaggtgactgagccaacattgactgtctttagcaatacactggccttgatgcagggctctctaaaatgggatcaaggaagaaagagtgatcaatacagaagtttccacagagcagaagatccaagatccacatcatcttctataagaacacttaatctggtaattaagaactggtgatggatgcttagcttgatttgcacatctttgctattgtgaatagtgctgtgataaacgttcaaggcaggtgtctttttgatagaatgatttattttcctttgggtagatgccaagtagtgggcttgctggattgaatgggggtttatgtttagttctttgagaaatctccatactgttttccatagagcttgtactaatttaca

SEQ ID NO: 413698 - DNA, 300 bp, Homo Sapiens
cacagacagatggaaacctcctcgctgaatggggctgggaaccacagcggtgggaccaagagagagaacagctcagacctgagagttacgcctgtgtgtgatccaagctgtgacgtgtgttttattcacagacataaaagctcaaaatgaggtaaagtttatacaggtgtcagccgtggtgcccacgacagggcccacttgtgtatggccccactaacacagcaggatgtagctggtgctcctcggggggagaaaagctcccatgggcaaatcagtttgagaagcactgagacttttttt

SEQ ID NO: 413699 - DNA, 477 bp, Homo Sapiens
tttcccaattgggttttggtttttaatggagtggagtttaattcggcaaacactacccacatgagggttttactgggcctaaatgctaaccactttccaaaaccggggccagccacccattgatgcctttaaggaagggtccatggttggaactgttttttccaccccctaaatttccaaaggagggattttttaagggaggactgcagaagcccttttttaacacctgtcccggccaaccctggccccttttttgtggggcactgggtttggccggaaaaaatccacttggtttttgttgataacccaaaggtaaaggttgtttccggagccaaggtcgttgaaaatgccagttgcaatggtttggttaacaaaattttgggtttcctcctcttcaatgttgggcctaaactaattttaaaaaacagccattgttgccaaggagccaaaacccatgtggacttaaggcaacttatc

SEQ ID NO: 413700 - DNA, 456 bp, Homo Sapiens
atgtccccagtactgttctgggtgcttcatttgtctaattaacagtagaatctcaataaaaacacatcaagtagataaattaacaaccaaaaacaataatcacacaattgctcattatttttatctatttagtttatcattaattcttacctccatttatttcaacaggcattatagggataaaaaatagaacggaattccagccttgaaaacagtaaaagtgtctttagggaagatgacaggaaaatgtacaattaaaaaagactttgaaagcttagaatgccttaagattaagattccgagctattacatgggaaataaggggagggggagagaaaaccatgttttgttctgcttgccagaaaagggcgataatgtagcctaattatgtacaaccagcatgatcaactttagaaatgaggtactcaccaaaaggcttaaatttttaccaacaaa

SEQ ID NO: 413701 - DNA, 301 bp, Homo Sapiens
gttctcgaacctgtgaagattgatcatttttggtgatgccaatgcggatccagatggtcataaacatgtcagtgacagtcttatagacatacaccatgaacacattcgcagatccatccaacttactgatcttaacgggactctgtaccttcctgtacttcatcatgtatcatttggggaacatgtagtacggcattgcattcccagactccatccatatgcccttttgggggacaacatgtgactgaacaagcccaaaagagtttggaggaccagatggggctcatagtttccgctcacg

SEQ ID NO: 413702 - DNA, 404 bp, Homo Sapiens
ttttgggtctaagaaggaggcttcattcagtttagcagccaaagggaagtgcaaggtcagaaagctctgtcatgcatcccccagaatcagcagtgatctgggggtgggtgtgctgtgaagcccccccgaggctgccctcagtgctattgagatgccccagcccctggcttccccaagcagctccctcgtgctcagcaggatggcacaaacatcactcactctccttgtcagcggttgtcacagcacatttgtggcagcagcgttcatccacgcttcaggaagtcggtgaggctgggtgcttcaggggatggccagatttagcgatgcctcatatcctcggatgacatcaggggactcactccctgaccaaagcagtggaaaatgggactgcaaagagccccagc

SEQ ID NO: 413703 - DNA, 438 bp, Homo Sapiens
gctttcaaagagaaataatatggttatagtaaacatacctgacagcaataatttaagcatatccttagaatgactttgtatggcagatgcacctgaatgtgtgttctgagctagggaattcaggagtggccaacccagagattccctccttgtctataaggacatctgagcccccaacctgtctcttggaacacaagccctacaggagactgaggctccaagttttgggtagaataaagagtgccaggtggaggttgctaggtggaagtgctaagtggaaatgctatataaactgcatgcctatggcaggcagttgtggttcttctgcccagcccactgccactggactgtatataaggcagttctcccgtccagcccactgccactgtaccctctcctttgtatgtaagcccccaataaaaccccacatctcttttg

SEQ ID NO: 413704 - DNA, 402 bp, Homo Sapiens
  misc_feature (41)..(64): n is a, c, g, or t
  misc_feature (77)..(138): n is a, c, g, or t
  misc_feature (200)..(242): n is a, c, g, or t
aaataacatcatagaccctcacaaacataaaacagtatgtnnnnnnnnnnnnnnnnnnnnnnnngagacagagtctnnnnnnnnnnnnnnnnnnnnnnnnnnnnnnnnnnnnnnnnnnnnnnnnnnnnnnnnnnnnnntcggctcatcgcaacgcctggttgttatcattgcttctttttggcttcatttttcttgctannnnnnnnnnnnnnnnnnnnnnnnnnnnnnnnnnnnnnnnnnngattccagaacatttggagccaagcagtgagaattgaagcaggttggcaagaagtcacgtggggtgtaaaatggctagcattctaggctcttctcacaaacgcagtatttgcacatttccctcgtctcaggttttgtgtttcagatgactggcccaattg

SEQ ID NO: 413705 - DNA, 461 bp, Homo Sapiens
  misc_feature (186)..(186): n is a, c, g, or t
  misc_feature (234)..(242): n is a, c, g, or t
aaaactttattggacacatctgcgcacagggccacggccccggcggtgagggcggctccatccagaaagtctcaaaaacaggaacccacagggcgactctcttatctaaggtttatatagctgggaaaaaaagggccctccccacaccccagaacagggcagatttttttaaaaaaaccctccggngagaaaaaaggacatttttaaatcttcctatacacaaaacacttttannnnnnnnncccccggggccctgaagggccaataatgtgcccaaatataccaccgcacggggcgggcggaggcaaggccgagcaaacaaacgatggtcactaggacactgtgcatgatcaaaaccacttatgggggcgggcggccccgtccgtatgtggcagcctttccttctgaaaaaggagggggtgcttaacatacattcctggggtgtgggctaggagaggtct

SEQ ID NO: 413706 - DNA, 442 bp, Homo Sapiens
aggatggggggggataggtgggggctgatgtaggaatgcagcctgaggtagccgacacctgaagcagggcaaccaagggaacaggtacaggggaccggagggtaacggggacagaaaggagaattaggactctaaggaagtcctgacgcaggctgtgaggtaaattttcaatgctgatttaacagaaaaatctgaaagttggtaatatgatcaacacgaacagtgacataataaaaaggggggaggtaaagaatagccaagaccactctgaagaaggagggggaggaatgacttgtcccacctgccattatgacttacaaagcagtaacaatggaaacaatatggcggcagtgcaggtacagacagacaaggaaaggcaaaccctacagctggcccaagaggaaagaaacagcctagacacagccccacgttatttgggagc

SEQ ID NO: 413707 - DNA, 443 bp, Homo Sapiens
  misc_feature (13)..(13): n is a, c, g, or t
  misc_feature (217)..(261): n is a, c, g, or t
ttgcatttatcgnacactttatttctattattattacattgcaatacataacaattatacaactcaccaaaatgtagaatcagtgggagccctgagcttgttttcctacaactagacggtcccatctgagggtgacggggaacagtgacagatcggcaggtgctggattctcataagcagcggacaacctacatccctcgcgtgggcagttcacaannnnnnnnnnnnnnnnnnnnnnnnnnnnnnnnnnnnnnnnnnnnncaggaggtggggctcaggcagtaacggaagcaatgggaagcggctgtaaaaacagatgaagcttagcttgctggcccgccgctcacttcctgctgtgcagcctggttcctaacaggccacagaacgatactgatctgtggcccaggggttggggaccgctgctctatgccatacatgaggaa

SEQ ID NO: 413708 - DNA, 515 bp, Homo Sapiens
ataagcgttagaatttattgtaaggatttcaggtaccacggaataaaaaggatactgtcactggttccaccatgattgctaggtactaccagtctctagaaactcgaccaccaagatgaattttaacgtgtctctgtctttgcaccacttgatcaagattcacagttcccaaaaggagaatctcattggccagatcacacgccaccctagctgtgaggggttgggagaccaagtatgtggcccccttatgctccacggtgggaaagaaggtcctaagactctcacagtgatggagtgccccaaatataaagaatgtttgcatgctggtcagccacagaaaaatgagagatgtccaatgcatcacagtttagtagtgtagcatcatttataaagatgggtaaaactcagtctgtacagccacacatccagtgccctaagtggggcagatttatgattaatgggcataggcttgttaggatttcttgctctaaaggctgaaaattggctgggcatgg

SEQ ID NO: 413709 - DNA, 410 bp, Homo Sapiens
aaaaaaggggttatttcataaggcttttaaaaatccaaaaccccgtgttttttggggacctttgaaaccaggactccaccaaaccacttttaaccctgggggccttaaagctttcccaaaatttttgttgcagggaccttggacctcagaaatggcaacctcttccgcttggaagaaacaataacctttactttgggtgggttcaaaatttttaccgggaccttttggcaaacccggaaaaacaagcttaagggctggtttgaccccctataaagggaaataaagacatgggtggtggtgtcctctggccggctcacaagggtagaactttcaagccttttcactgtgggcttcaggggaaagaaaccagagaccatctttacattaaccaacgccatgttggaagcgca

SEQ ID NO: 413710 - DNA, 232 bp, Homo Sapiens
atcacaatcatactacttctttattttggaaagaataaagaatctttattctggaatctcatctgtgattccgtaataaagggtcagttcgtccctcactgggtagtagagaagatctgaggacataaagtagggaaagcccacttcattttgatctgggctgggaagtgccctgccagcgacagatgttagtatcaccaaggaagggaaagcacccacaagcctagcgctc

SEQ ID NO: 413711 - DNA, 426 bp, Homo Sapiens
aaacataaaataggcttaatatattcaaaaccttcatggacccacttaatttatctttcttatagctttgttaaagtgagccctggccgacgaccaaaatagactcctcatggttaactgaggtattcaaagttacaacagaaccaggaagctacagctgggtgagggatgtctgtgttctcagaaagacattgtaaaggtgtcacagcacctctttctataatcaagccaaatcatttcctgttgtcggtgccaagataaactttggccagaaactactactcccattgactgtttgaaataaacatctgacagagacttctggtttggggcttgaaaacaaacaaatcagaattcagctatacagaccaatcagaactatgtgaatttcagtcctttctttgcataaatagacctgattaggaa

SEQ ID NO: 413712 - DNA, 494 bp, Homo Sapiens
ccagtcattcattgttaaaacaaatgaaatacaagaagtgtagtatatctataagaaacaaattcaaaccaagtcagatgccaaccaaaataatccttcattggaaagcaaaccatgcacttgtccttaaaatgtttaagccttggcattcacaatttgtagaagtttcacacctttctgaaggagagagaggtgagctaatcagtgtgggtcctagaaatagttcctcagaatgtttctagacattctagagatgtctagaaacacccagagatgtaaacaacaatcagctggaagcagatatacccagaataaggagcttccaggatttccctctccgtgtgaaagcaatcaactcctatttttaatctccctctgacgcaagcatccaggcaaacctctctctaatcaaagctagatgattcgttactttcaaatagcagttctaaaagtcagattttaatgcaagtcaacacagatttaatgtcaatgct

SEQ ID NO: 413713 - DNA, 262 bp, Homo Sapiens
ggagaggaaactttatttcttataaagggttaaaggcctgcaagggggccatcccacaggccaggaagtacaatctttggcaaaaaccaaaaacaggcccttcaaaggaggagcaggggtaggaacttgatgctgaataggttggctaaacatacatattcaacaggttacaggaggagctatgaataattatgaaggtcatcctgactcatgcttattgaacaaacatgcatgtaacatacaacccatgttcactttgagg

SEQ ID NO: 413714 - DNA, 443 bp, Homo Sapiens
  misc_feature (56)..(168): n is a, c, g, or t
gccaagggttaatatattttatatataagtaaagatatacagttatacattgcttnnnnnnnnnnnnnnnnnnnnnnnnnnnnnnnnnnnnnnnnnnnnnnnnnnnnnnnnnnnnnnnnnnnnnnnnnnnnnnnnnnnnnnnnnnnnnnnnnnnnnnnnnnnnnnnnnatttacttttttctgttttccatttgtgttgtagatttttctctatctctttactttgaatgtgtgggcgtcattgcatgtgagatgggtctcttgaagacagcatacgattggttttgtttctctatccagcttgtcattttgccttttaattggggcatttagcccatttacattcaaggttactatttatatgtgtagatttgatcttgttattgtgtcgttagctagttattatgcagacttgtttgtatgcttgctttatagtgtcactg

SEQ ID NO: 413715 - DNA, 475 bp, Homo Sapiens
  misc_feature (309)..(344): n is a, c, g, or t
atctttatttccaaattctctactaatttcattcaactccacttttcagtatctcttccaacacttttttatccttcttgattcccaaatatcgttatgtcctttttgtaaccctctacaattggaaaccttaaaaaatatgtccacatagctgagaatatgcaattttgtatctaataacccatttctctcatttctttatgctccttaaaactcaatggaaatctaagtcatttcgggattcctacattaaccaaaatagtactgcactaaatatacattgatataaatcctttaattcctcattcnnnnnnnnnnnnnnnnnnnnnnnnnnnnnnnnnnnngcttagagactaatttatccaattatcttaggtctctgctagaatgtttttgaatcaaatattagaaatgtcatcagtcatagcagtgatattattactagatatgcagaatatgcagaatatggtgaact

SEQ ID NO: 413716 - DNA, 127 bp, Homo Sapiens
gggggtagttccaggctataggtaaacctaaacatttcctggctgccaattagttgagttcgcctaaagacctggggccgatagaaaataaatattcaggttaagataaaaggatgtggagaccaag

SEQ ID NO: 413717 - DNA, 485 bp, Homo Sapiens
attaatagtgatgcgtaaagctatatgaaaatggtaacatgatttaaaagttttctgactgtaagagcttccattgagtactcttggttcttcattgacaggagtgtcctcattctaacactgcagggactccagccctaccttccctccttatggtaccagtaaacctcaattgaatcgtataactagggttcccttatcccttcagtgatgccctagattctacaataataggatagggattccttgctgattttctacacttcctctcctcccctcctccttccttcaaacccacaaagattcaaaacaggcacacaggcattagaattctatgctctgcctttggcccgccaagaggatagttctatattagttggttcagttcaaacattttgagcactacagttgtaccaggtactgtgttagatgctaaagacacaaagatgaataagacacagtccccatcctcaagagcttgtcgt

SEQ ID NO: 413718 - DNA, 529 bp, Homo Sapiens
acaatctcaaagcactttgcatgcacccagtacttacttgccttgtattatggtatctgtcactctctcacccactagactctgtgatccctgccagtaaggacatggacagcttggtttatctttgcagcctttgtggagctttggacaaacgaagttctccgtgagtctggcaatacactaaaataaccgaaacaacactaaaaagtctaaggagtgcagataaaagagctctttcaaactgattctccttcccacactcaggatggaccgccatttgtatcctcccagctcggaattaacaaagacttcagaatttattgtctaaaaggcagtctacccagaagaaaaacaagaagcctgaccaccagtgaataagctttccaaacacatacaaggaagatgagtttgacaaagtgggtaatataaatcccatatattatttgcataaaacgaaaggaaatcactttcaagttctctgcaagagagaggttatataaacactatttctttcatgattccaatgacc

SEQ ID NO: 413719 - DNA, 415 bp, Homo Sapiens
ataaattataacacataagaatagacatatttttatttgggtatattgtttcttgcctttaggacattataatgaggtatcacatttaaacataaggctgacataaaatgtcaaaacagatatatgagggatatgactaaaagttgttctttccaaatataggtgcacaactcaaaaatatctaacttataagaactttcaatctgtatgagattaaccagttaacttgttatcatacctaatgagtacactcctggtgtagttaacttttaaaacagctgaactttataatacatgattatgagtagacaatatttcagagatcctaaaaagcttgtttaaaatgtctcttttgattagaatgaaagataaacagtgacagatgatgcctattgtctccatggtaattacacta

SEQ ID NO: 413720 - DNA, 348 bp, Homo Sapiens
  misc_feature (73)..(88): n is a, c, g, or t
actcaagcaatctttcagcctcaacatcctgagtacctgggaccaaaggcacactccaccacacccagctaannnnnnnnnnnnnnnngtagagacagggtcttcctatattgcccaggctgatctcaatctccgggtctcaagcaatcctgccacagcctcccaaagtgttgggattacaagtgtgagtcaccacacccggcctgtgatccttattaacatgtcctgagtactttgtgacaagtttttcaaacatgtgatatcatttgatccttgaaacattttacagataaacagggtcagagaagtcatgtaaattgcccaagatcacacagctagaaagtggtg

SEQ ID NO: 413721 - DNA, 382 bp, Homo Sapiens
tacccaagactgggtaagttagaaaggaaagaggtttaattaactcacaattctgcatgactagggaggtctcaggaaacttacaatcacggcagaagtggaagcaaggcacctctttcacaaagcagcagaaagaagtgtggagtgatgggggaagagccccttataaaaccatctgatttcctgagaactcacacactatcatgagaacggcatggtggaaaccacccctacgattcaattacctccaccaggtctctcctttgacacgtggggattatggggattacaatttaagatgagacttgggtggggacacaaagcacctaaccatatcagccctaaagccatggctggagaaggctcctgccagaagtccacc

SEQ ID NO: 413722 - DNA, 214 bp, Homo Sapiens
cgctgttcttgtgcagcgagtctatgcccgagcccgcagacgagccacccttggagctcgggttcttgaccaggctctggaaacgctcgtggaccgtcaagccacactgatagctctgctgtaggacgtgcagccgcccaacgaagctcatgatgcgcgcggcagcgtcatacgtgaacagaaccagagatgctgcgtgcccagctgtcaccac

SEQ ID NO: 413723 - DNA, 320 bp, Homo Sapiens
atctaatcaatgtgaaagacctgagggtttgttgttccgatggtgtgtttgttacagactagagctccactggctatgactccccacaaccaggaagcctaaccaggggtggggaggtgggagtccaggcatgcagggcaggaaaaacccttgctggtcatccaggccaaccttcaatgcgctgcaaatgtccttgctatctggtccctaacagatggtccttacttcatcacagcctccctggatgctgaatgagtagacggaagctccaaaaacatccaggcaggaaggacagcggccgcaggagtcactggatgggc

SEQ ID NO: 413724 - DNA, 329 bp, Homo Sapiens
caggacccaatagattttatttcaggtggggataagggacaagcaatgtgaagacagggaaggaaagaaggaagtctctatgttctgaaggactgcctaccccactgttgagagtgccacattctgcccttttagcaattttaattaatttttactaggactttggtaacaccacagaaaccctgtggcttcctgttaaaatgactgtgttacatgccttatttttattaaagtggaatttaacaaatacttttattattttgaagcatttcatcaattctcggtggaagcactacatcatcgaatgggaaatcaacaaatgaaaaatg

SEQ ID NO: 413725 - DNA, 385 bp, Homo Sapiens
  misc_feature (212)..(212): n is a, c, g, or t
ggaatgggaatgggcccctgttttgggcaaaacaacttaaaggccggggtttaaggggaagggggtccctttcaacttcgaactttttgaacccaagaaccaaaaagggggcaataacttgttggaatttctggcccaccaacaaagcctgaatcttttccggggtttaaccaatgaaaacaataagttttgtccgccgggggtcctggtantaaggaaggggttcaacgaaaggcttaagttaataattttgggaaccaaaattaatcaatgaacctttaagaattggctctaaagggcctttttggctggaattaagatgagaaaatttttaaagcaggtttcaccagcccggggacatgaaaaatggaatacggattttccc

SEQ ID NO: 413726 - DNA, 513 bp, Homo Sapiens
cttgtcaacattctttatgcataaaatttactatatacctgggactgttatataagatctaggtcaagaatttttttatgggtatggccctaagaaaatctgatttcattgagagtatccaccataattaacagcagacgtctattattacatggctcatcacatacttggatttatgctgtgagtcaaatctctactgcagaacacaacctcatacaataaactcgcctaaaactactatcttgtgtgtcatctttccccatcagcatctaaaaagaatgtactatgtgtatttaacccaatatcttaatattagcttcattaatttaaagcctctgtggcagattctaggaagagcagtaagtaccctatgcctcttagaactcattctttccaacaacccacgtcaatcattttgtattattttatcctgctgattctttgtaacagcttttcagtttgaccctaccagtatgtaggcatcaccttgcacagacagctacaacagccagt

SEQ ID NO: 413727 - DNA, 520 bp, Homo Sapiens
ttcaggtcaatattttaacagctttattaaaatgtgattaacatacaataactgcacatatatagtgtacaaattgaagtcttgacacgttatagccagtgaaatcatcatcacaatccacaaagtgaacgcgtccagtactccctcctgccctcagtaatgactcctgcccccaaccactgatctcttcctgccacacagattagtctgcattttccagagttttgtatcagtggaatcacacagtatgtactgttttttgtccagcttctttccttcatcataattatcttgggttcatctgctggtgtgtcaatggcttgtgtctttgtattactaagcagtgttccattgtatggctacaccataattgttttatccctttactttgtgatttgaggcccttcaatcagctaggaggacccaaagattaaggaaacaaagttaccgaccggtggagagttcaaggcctggctggcatggcaaatttctcaatctggattgtaatgatggtttcact

SEQ ID NO: 413728 - DNA, 193 bp, Homo Sapiens
aaacatcaaatgtattgttagggttgggttaaagaatggtgatattatcaatgctttaacaaaaatttatgaggacagtgttccaaggaaatcagcagttaacaaatgaataactcgtgttgagaagggatgaaacgatgttgaggatgaagcctgcagcaggagaccattcacgtcagtttgtgaggaaaaa

SEQ ID NO: 413729 - DNA, 501 bp, Homo Sapiens
gaaataagtactttttttctggtgtcatcttttgaaaaaacataatcttaattttgataaagtccgatttttcaattttttatggactgtgcttttgttatatctaagaatctttaactaacctgacaaagattttctgatttattctagaagttttgtagctttagctcttacatttagttctatgatacattctgatccatttgcttcagcaccatttactgaaagaaacatcctttcccccggtattcttttgctaaggctgccacaacaaagcatcagagaataggtggcttaaacaacagaaatttacttcctcactgttccagaggcagaagtccaagatcaaggtgtcagcacagttggtttcttctgatggcctctctccttgatttatggatgctcatcttctccatctgtcttatcttctccccatctgtgtcctaatctctaataaggataccacttacactggattagggtccaaccatgtgaccccac

SEQ ID NO: 413730 - DNA, 338 bp, Homo Sapiens
gcggccgccgccagcacgccgggatcgatctcgccgcgcctactggcaccccggtctacgccaccgccgacggcatcgtcagccgcgccgactggtattcgagctacggcctctacatcagcgtcgagcatggcgcctcgatgcagacccgctacgcccacctctcgcgcctcgcggtcgccgcgggcgacaacgtgaagaagggcgacctcatcggctatgtcggctcgaccggccgttcgaccggcccgcaccttcattacgaagttcgcgtcgagggtcttgcagtcaatccgattccgtatatggtggagagcgaagcacagctggcctacgcc

SEQ ID NO: 413731 - DNA, 446 bp, Homo Sapiens
gcttagaaactctctctgggaattagtcattttatatctagcaataaacgtaagacaggatctgactattctcctgaaaaggaagcctggatccttcagcaaataatcttttgtataatttgcccacagtttaacccacagatccagctatggatgtttcatttaacagtgagtgaaaaactcaggactgtcagcatcaggcctttgggtgggaatacccatatatcaaggttgggcaagtgggcattaggagtggtgccggcgatgagagggggtagattagacggctggaaaatggggtcagcggtggggatgtggggcagacgatgtgtctgtggggatatgttaagtgacagcaggaagggaatgccagaacaaagcgaggaaagcaggaggtagcatcactaatgaagacacaaatatgtacatttcatgcctaaacatgg

SEQ ID NO: 413732 - DNA, 390 bp, Homo Sapiens
  misc_feature (240)..(240): n is a, c, g, or t
  misc_feature (286)..(286): n is a, c, g, or t
gggcatggcctcccaactcaaaatgcttttatttctttaaatattcatgatctggatctaaaacaacaaaactcaactcacaggcattcttatttcctttacgtgttgatattttccaccacatcacaggggacttttgcccagggtttataagaaggtcatttgaattgctttacagctaagaaccaccttaggaattaactgtggggcctcctattaatcttgttgtatttatgcagngttaacattggttctgggttccttatgatttttgaatttaaatggnttcttctagttggggattctgctctaacccacagtttctctgaagatgctgagaattaatttatctgctcgtgtttgtaacccaaaataaaagcaaagataaga

SEQ ID NO: 413733 - DNA, 509 bp, Homo Sapiens
  misc_feature (380)..(380): n is a, c, g, or t
ctgtcctatgattcccactgttatgtgactgggtttcctttgatcccctgacagtcctaagggctgctgcatacctcagttaatcttagtgatagaggaggtactcagagaggccagatgacctgcctaggtcacagccaagggcagagccagaggcagaagcccagcccatttcctcaccagccagggtgggatgtctacagccactggtgacttgttatcatggggataccccaggaaaagccacaatcaatcccaatttcttctgaaaaccagatgacattgcgcattaggagctgagactacccttggggaaagagtgggataataagcagcacccttccatcctagcacggccttgagtggcatctctactgtgntgcgtccatcctccactgaggacactgcttgccctcagaggcatcctagcgccctgtccattggaggacagacatatgcatgcacgcagacccagggccacatgcctggcacaccaggcagagacacac

SEQ ID NO: 413734 - DNA, 478 bp, Homo Sapiens
  misc_feature (233)..(410): n is a, c, g, or t
ggcctccggcaggacgcgcccccttcgccggcctgggcctgccgtgggaaggaagggccccgggccgccccggagccactgggaaagagcggaagcccggcagagccgccgagggcccgccgcccgcaccccggccccctcctcaccctcgtagagctgccatgctggagaagcccatgtgacaaagacctgaggctgggccccagttgacatccggctacaactgaggctannnnnnnnnnnnnnnnnnnnnnnnnnnnnnnnnnnnnnnnnnnnnnnnnnnnnnnnnnnnnnnnnnnnnnnnnnnnnnnnnnnnnnnnnnnnnnnnnnnnnnnnnnnnnnnnnnnnnnnnnnnnnnnnnnnnnnnnnnnnnnnnnnnnnnnnnnnnnnnnnnnnnnnnnnnnnnnnnnacagcccaacagcttctgagtgagtgagacagagctgacttgagtccctgggtcacagatgcttacag

SEQ ID NO: 413735 - DNA, 489 bp, Homo Sapiens
  misc_feature (368)..(414): n is a, c, g, or t
aatttacaaaaaagtttatttggctcacaattctggaggttggatggtagcccatttggtgatggtctcatgctgcttcaaatcacagcagaaagaggaagggaaagcaagtgcatgcaaagaggccaaacatcagaggaagccttgttttataacaacttgatctcacgagaaccaacccagtccaaaagaactaacccagtctgcataagccattcgagagggcagagatgccacaaccaaacacctcttaaaggccccaccacctttcaataccgttaaactggcaattaaatttcaccatgagttgtggtggggacaaaccacatacaactcactgcaccatatatatttattctactattttnnnnnnnnnnnnnnnnnnnnnnnnnnnnnnnnnnnnnnnnnnnnnnnttcaaaaataagtatgaggaagcccactaacgaaaatgccagcagactgaaatggtcacaagaaccctgcagcag

SEQ ID NO: 413736 - DNA, 483 bp, Homo Sapiens
  misc_feature (298)..(298): n is a, c, g, or t
gaacaagcaaacgtcagatgggagtggtcctggtctctagttagcaactggctagggaagagttcaattgggaaggactcatcacaggatgggaaacaggcccagcccctgtgaaacacagagttccgatgggccacccaacatctggacaaaagcggaaaacatgtccaccctgaggcaacctcatatgtcacgtacttataggcctgttgccttttcacaatgttttatcagtgaaaggtgaagggttcccgacttggtttcacagattttaagtggtagcactggggatccacanagctccctggtaggatggtgaggactcggcctcgctgctccctagtcagggaggcagtgctggcagatgcctgcttgtatttggacagggggctgtgcttcaggggaagagtggggctgccttcctgtttctgaggaaggaggtcaactccaggttcccagtctccttttgctttgtctggaaca

SEQ ID NO: 413737 - DNA, 451 bp, Homo Sapiens
ttttttggcatgagaacagtctgttgattgccctaatgcctaaaatagtttctaagtgtcctcacaatagcatgtcacctgtaaacaggtttcaagccaatgcaaattaacaaatggtgaacagatggactaagaactgacttttgtcaagagagagttagcaacaaatactttttggctccagtcttatgggaccattagaaagtcttttacttctcgccaaacatcttgcctcagtagacaatccatgcagggaaaatgacaagttacaaggcccattagactttagagagctgaaagttgagatttgcagaatcaccaaatcgacacatgagaaacaacagatagaataatggcccttaagaagcattctgccaaatagtcaaaactctggcttgcatcactaaaagcagctgtccctgtagtgaccttctttttgaaaaatatggcc

SEQ ID NO: 413738 - DNA, 344 bp, Homo Sapiens
  misc_feature (145)..(145): n is a, c, g, or t
  misc_feature (183)..(183): n is a, c, g, or t
caggtcacacagcctgatccactgcagggcagcagctccaggcagggcacccgaggagggtttctctagcagtgacatcggcctcagaggtggggcgggtgcagttaagggctgtggagggacacagtgcatgaggccagtgcanagtgactgtgggcagggggaccaaggctgggggcccanagcacttggtcttggatgtatggctttggatgagaccgtagggccaccaccaccctagggtgcttgcagatggtggggagggcactctggacgcatctacaaatggcatttgcacaggtcacagatgagcagatgctcaaagagtcgatggctcccaaagg

SEQ ID NO: 413739 - DNA, 110 bp, Homo Sapiens
catttgcatgttgaaatttcattgcaacatggccccacggagggattcgaccctgaaaaagctactgtgcttggggcgggggggtcttgctggggcaaaaaaaggaaaaa

SEQ ID NO: 413740 - DNA, 490 bp, Homo Sapiens
  misc_feature (352)..(352): n is a, c, g, or t
  misc_feature (370)..(370): n is a, c, g, or t
  misc_feature (390)..(390): n is a, c, g, or t
  misc_feature (434)..(434): n is a, c, g, or t
gcggccgcgtccgtgacgagggaggtgaccgaggctcggcctccacgcagccggcgccccggggctgccctcgcgtcagcccgggagtcggtgggagatgcgctgggcggcggggtcgcgtccttgcgcgcagtgcccggcccggagcagccgggacccgagcccgcccgacagccgggtccggcgccgccactccaagctgctctgcgggcgctcggcaatgtctgacttcgggagggttccgtgcgaagggaaaggcggtgcgaaaacagaagtcgcagtaggtactgtggtcgcgtcgcggacccggagagaccatctaggacctctccggaggatttgcagccttganactcactgggaatggcanacgtttctcgtttttgcggngctgggtggagagtggtgtgaaataagttggtgcgcccgtttgngcttccttgtccccggcggaggagaccgcgtctgacaggaggttgctagccccggc

SEQ ID NO: 413741 - DNA, 436 bp, Homo Sapiens; identical to SEQ ID NO: 58940

SEQ ID NO: 413742 - DNA, 482 bp, Homo Sapiens
ttgtaaaatgaaggagagagctgaacttcaaggatgcgaatttatttccacacaggggagaaacactgattggagaaaatttacagttgctgtttagacacttgagcctcaggatcgagaaaaggtgcacctcttagatgggccttaaattggagatgatgatatctaaccacctggagatgggaaagtaggtgtcactcaatgctgaacggtgctactcatctgtgagattgtataatgaagttttggagactgagcctgtaccttcatctgttctttaaccaatgcacacttaacaagcacgtcatgtttagctgctcagcagatcttccttcttcagaaacagagacggggtgcggaggcattttacaacccagggggctccagcttcatagactgtcttgtgaggatctatgctgttactctgaggatcagcgttggttttccaagtccttcatgaacataacaagtcaatgataaga

SEQ ID NO: 413743 - DNA, 109 bp, Homo Sapiens
caggaagctcccagtgctgcgagaggcataaggaaaagaaacatatgactgggagctcacacttgatctgaacgcagccacggctgcgcaggaatgaccagggttggta

SEQ ID NO: 413744 - DNA, 158 bp, Homo Sapiens
ggcctggatcgttcctcttcctcccctcgcccccttatgttcagggaacttgctcaaacacaattaccatttcaggtttggcactacagtgagaaattccttcctaactccaagccgaccaaataagtctaagatgggagattaagaaaatttacatt

SEQ ID NO: 413745 - DNA, 363 bp, Homo Sapiens
gacaagcatgagccaccgtacaaggcccacagcacctaaattccaaaataaccttgaaaccctgactttccacccgccctggtggcttccagagatcagttcctcttcctgtgccaaaggtttcttgtctttcgcggcccaggtaaggtcactcaaggtgctccctctgcttctgaaggcctttgactgagaagccactctgggtcctatcccgaccccaaggcggctccattcgtacccgcacatctccgggccggtttaagtcacgcgggccaggctatttccacttcactctcctgtttcttcaatcccatcctctgctgcatcacgttttctttctctgagaacccagccctgcaggaa

SEQ ID NO: 413746 - DNA, 235 bp, Homo Sapiens
ctacaataaagcttaactctgagagataaagatgacttcaaatatcacgcccccaagtatatataacactaccatatccaaaacaaaaaatatgactgtatacatactcagggtgttaactacgtaaggcagtggtcgcaaactggtggcccccaggctcaaacaaatgtttggcccacatggtgttttggacatttttttaattacttgtttaaaaatcatcaagtttcacttt

SEQ ID NO: 413747 - DNA, 127 bp, Homo Sapiens
tgccgatacagatacagatgaagggagggagttgtttattggctccatatctatccactgttgcacactgggcatagatgtccttggacaaaatgtcacgtaccacactgtctttgactttcccaat

SEQ ID NO: 413748 - DNA, 474 bp, Homo Sapiens
  misc_feature (296)..(296): n is a, c, g, or t
ggtcaaatttgttttataggtgtacttttctgcaggacaagtttagatggattgggaattagagaaaaggtaaagaatctaatcactcacaaaatccctttatactaaatgcatgccaattattcacatttctttaaaatttggaagtttcttgttttgtgtgtgtctatacagccttgaatttcactagagggagtgcgaccagaggcccagaatccacactgactgacataaagacagaaagtgtcagggcattgtctatgtcttaggctctaggtagaagggatttccatagnttattcaacaaacatttaggtgtgtgcttttaagcagagcctgatgttttagtgggaacaagacagaaatggccccaggattcagggccactcactgtatgatacaagggtgatgtgtccaatgtcagcagggaaagaattactttggatgaatgaatgaaaacggaaaacaaagcta

SEQ ID NO: 413749 - DNA, 457 bp, Homo Sapiens
gaaatatgatttttaacagaatatgaggtaattaaaaagcaatccaactaaggtgacagtgcatccaccttgggcctggcactagctggaaatcactgctccacttgcattaagcttacccgtggagaagccctggtcccaggattttaagggtgctatgcgctcagtctccacagcacctcctctggaggcgacctctgctgacactctcttcataccaacgaggtgaatttgcccgggttacttcctggtaaactacgaagccacagtgtaagcctaggcctggggacaggctagaatgtaagcctaggtctcccacaagcccgcgctcttagtgcctggggacacagcccctgacctcaaagatctgcagaacgtgaaggactagattttgaaatttcacctcataaaataaaataggttccaataagtcattaggtctcaaagactcatttag

SEQ ID NO: 413750 - DNA, 481 bp, Homo Sapiens
ggtggcaaatttgtagcaatagcccaaagtttgtccttgaatttcaatgttccacccccatgcatacctggggcaaagcaaggcatctgtcagcacagacactagttacatccaccaaagagagaaatccaggaacatcgtgtaaataacctggtcaccctttgaatgaattatgcggaatttgtgaacctactaacaagggatcatccagttggatggcttcagggacatggaaatcactagacttttagaaaccttcttcgaagtggcagtgctcgtgaagttctttacctttaccaaaggcatggctctccagagagcacaggctcctgcacaagaaccagcacttcatcaggagaggctgcaggtactaagtgatgtccttggctcagttttgtttccatggtaactgtatgccacttttcactagcacgtttcaacattttcataacagagttaaaactacatacacagaacacct

SEQ ID NO: 413751 - DNA, 132 bp, Homo Sapiens
ataaagctaatatggaatgcagattgctctaggcagtgcagcctcttctaacctcatcggagtcctctgttaaaagaacaggtagggaaaacaaagagatgaggtggaaaggagggagaacggaatacaaga

SEQ ID NO: 413752 - DNA, 483 bp, Homo Sapiens
actagatttttacttgagacacagattcacagtcttcaacttcaaagctaacccaacaactctatgcttagatagtcagtttcctaacaggagatacgcttctttagtgaagggcctaccccttattcacctttaaatcccacctcccccaatcccccccaatgcttatacagaaaaaatcattcacttaatacaaatctgtggaaggggaagggaggtcagatgaaccttaagggcagggactgaactgataataaaagctttcgtggcactgaaaaatatctgagaagcagcagcacaataactaatgatttttttaaaaatgttacaacacgtcaaaggtgatttcaataaattttatacatctgcaaattaacttatctagttatttggaactaataagaaaatgtcagtcttctattttgctctcatatataatagcaattaaaaggccaattacctgtaataaaataaataataaag

SEQ ID NO: 413753 - DNA, 336 bp, Homo Sapiens
tactaactttagaagcttctgattgtgatgcaagtcaccatccaaagagaagagagcgtgggactgatcaaagcagttccttctataccagatgctcttctacataaaatgtccttgtctgcttactgccattcagggcacactctaaagagaacacctgcacggacgtctggacgcttccaaagcacagcccacgtgcacaactcgaccttgttgcagtgcagtgtgtggtgcttgctgatgtgtgaatgatctctttcctgaaacttcctttggctctatttacacccacccaagaaagacccttggccctctaccctgtgctgaagatgccct

SEQ ID NO: 413754 - DNA, 102 bp, Homo Sapiens
cacacccacatatatgtttttttggggagcccgggccccaaagttggaaattttttttcccttccctttcccgcccggggaaggggccgggggccaaacccc

SEQ ID NO: 413755 - DNA, 447 bp, Homo Sapiens
  misc_feature (144)..(144): n is a, c, g, or t
  misc_feature (184)..(184): n is a, c, g, or t
  misc_feature (260)..(268): n is a, c, g, or t
tttttttaaaggggaccgaaacccccttccggtttcacctttaaaggcaaggaattttaaggaccatttgggggggcccaacaaaaaaaggaggccggttatttcccctcgggttccaccttatttttccaaagaagggaaccnccaaagggttgaggcaaaatggccttgggaaaacggcggnaaggttttggggtcccaacggcccccctaaaggacaaacattttaaagaaaaagggcccttatatcccctcctaannnnnnnnnccggccccaaaccctcctttgggaccctgagccccgaagcggccgggccgggaaccaccgggccctgtgtacaagcggttggggatggtggaccacccttgttcagctccttcctgtggggctaaactgggcttcttgggccaaggggtggggccagccacgaatgacctttggacttg

SEQ ID NO: 413756 - DNA, 132 bp, Homo Sapiens
caccaccaagtacagggcaatccagagttcagtacagggctcagaacctagtaaaaaattagtcctctctgccactgcaaatcaaaatcaaacctggcctgggagtcagatcaagttctgcatcccaattgt

SEQ ID NO: 413757 - DNA, 384 bp, Homo Sapiens
  misc_feature (268)..(328): n is a, c, g, or t
ggggttaaaaacccaacctttttttgggctgaaagggggaaaaaaagggattagtatttttgcccctgacgaaccaaaattagtttttcccatacagagcaacaacccaggcctttaaaccatttacttttccggtttaaatttcccaacagcatccccgaaactacttccccatacaggggggactaaacccctttaaaccccaccgccggaaatggttggctttcatccccaagtcatgggttaaaaacggaaccccctgggcaannnnnnnnnnnnnnnnnnnnnnnnnnnnnnnnnnnnnnnnnnnnnnnnnnnnnnnnnnnnnaccccggttttttaaaatttcaggggaaccttaaggggaaaaaggaaaggataaaa

SEQ ID NO: 413758 - DNA, 103 bp, Homo Sapiens
caactttatcttttttactttattacttaaaataaacacccacgataaagctaaaaaaggtccattttttacccaggaaaaaagtccaaaattccccccaagg

SEQ ID NO: 413759 - DNA, 318 bp, Homo Sapiens
tttggggtcaatgtaacaaacaccttcctcacaaaggagaaaaagttgtgattttgttactggaagtgtgaaagcagaggctgcatgatttttagagacgtaatgaaggaaaccactacatttgtctactctgatttgagattccttaagccagcccagaacacccagagatgccgacgtgcccagagagtaacaaatgtgaaccaacgtcacaaagcctctttgatccaatgcaagacagccttccttttctgctccaaatatgctgggtttctcactcctggctccagctcccattcagaatggtccctgtctttg

SEQ ID NO: 413760 - DNA, 345 bp, Homo Sapiens
atttttgatagtcatatttatatttcaagacaggaagtgtcttcctcctccaaactttacagcaaactttttggggcaactgtcacctctgtaggcaagtgttcaagtgtacatcatttgaattttgtcttgctcttttgcaactattttcttgaataagattgtccataaagaatgcatgctgaacagtggacaccgatgactgggcagagccaccacaggtaggcaacagggaatggccggctggtccgcttcactcccaccatccgcctccagagctagaatttcttgtggctcacaaattgatgagtactgaggaacactaccgactgcaaacgttcttgt

SEQ ID NO: 413761 - DNA, 438 bp, Homo Sapiens
  misc_feature (269)..(269): n is a, c, g, or t
tgttttttacttgattcaataccgcccaatgctcttgagtatgagaatataaggtaaactttatagaaattttcagatataacgtcaaggatatttaagacacttaaataatagtttgtggctatggcataacatcatcatcgaaatgggaaagccaggagcagccaggaattctgtcaaacgcacagctctggcactgtttattagccagtctgcccccatctggggagacactggccaaatctctaggcttgacccaagcccatccncaacccagcttcctttgcaagctacagctgtgggctttcactgggatactctcctcactagggtaaaagacacctttggttggataaacccagagacattacttttactttacctaactaactttcttagatttctgtctttacaaggagaaatgggagagctggccca

SEQ ID NO: 413762 - DNA, 457 bp, Homo Sapiens
gttccatggggtcgtctttatccccaaaccacatctgtcttgagtttctctcagattagtcaggtggatcagtgctccccagggcctgctccagctgaagtattttaatttgactaaacacctgatttattttatctctccgatgagaaaggcagtttgtcttaatagagcctgtcagcccacagccccattcacagcaatttacaggcagccagggacgctggaagagaagagtgccgtgattctgtattttatcctcctccagaaagcacctaaaagcagctattcactgctactgcatgtggcattttagaactgaattagctttttattcaagtaactacacttgttgtgaatagcttatctgtaaaattgctacattcactactgattttattaacctttggctctatcacaaaatggtcttcagttaggaaagacctttaaaattgacaca

SEQ ID NO: 413763 - DNA, 458 bp, Homo Sapiens
aagaaaaaagcttcctcctcagtgacttaattagggtgttcctaattaaggccagcacaacatcaaagaggccaggttccaggggacccccgctccaggtcaacttctggttgcaggatgacctcagtccctccagcggaggctcagacagagggcttggctgtcggctagtcctggctctgctccccgctccctgtttcctattggggtgcctcatccaattattcaggccctcgatcacatcctgctgccgagcgggctttgaaggttcagtaaacagccacttcaaaacaaagaggggccattaaaccaaactcaaagacttccttaatggctgcgtgctcggctgcaggagaggagtccggcctcaaaaagggaggtctccctgggaactaatccctgagctctcccagcctccttctgcaaatatctgcccgcttcctgctctgcactcaatc

SEQ ID NO: 413764 - DNA, 513 bp, Homo Sapiens
gaagcagaaagaccccataggaccatcccttgcaaaatgtgatttttttgcgatggacgtaggagatgaagagcaagctggagatgggctctaatgacagctgttagtactgaaatggaataggcggctcaggaaagtgtcaaccttctgctttaagaaagcacatccctccgcaaaacagagggaaacagcgctcagctcttgttcaacaggtaccagaaaataacagctgctgggctctcacttctatgttcctgctttttcacaacttccacatcagcaatgattggtttgagtttcactaaactgtcaagagatgaaccaggaatacatttgtataacacatgatccaacagcatttatatcccagagtggagaagacacagcagagtgtgtggacctttacttggctcctttaaaagaagttggaactcagactcagtgggaacagtggagcaacaccagatctgagggtgcccgtcagagtcccagaatgggactccacagctgtgg

SEQ ID NO: 413765 - DNA, 452 bp, Homo Sapiens
aaacaatttgcgattgcagcctctccttttgtttccggtattacctgcccaggagcagaattccttactttctccggagagaggccggtccctgggagcgctgcccagccacccgcacgcctagccgccccgagagccgcactcggcggacccggttcctaggctcgttcccggggcacctggcgggcgcccacctcccggggggcacgtgctcccgtacgcagcgcgagggcagcgggtgcctggctatttattaggaaaagccccgcgcggactctccggattgaggagggtgggaaactcggctgcccagcgctccacccgggcggccggggctggcgcttctctgctttcggccggcggcctcatcctgggacaggcaaccatgagtcatccgctccgcgggtcacatgggcaacgtgaccaaaataaagtttcggtattttaagccg

SEQ ID NO: 413766 - DNA, 487 bp, Homo Sapiens
  misc_feature (55)..(414): n is a, c, g, or t
gaatgcctacagcagctttatttgtgatagtaaaaatttagaagcaagtataatnnnnnnnnnnnnnnnnnnnnnnnnnnnnnnnnnnnnnnnnnnnnnnnnnnnnnnnnnnnnnnnnnnnnnnnnnnnnnnnnnnnnnnnnnnnnnnnnnnnnnnnnnnnnnnnnnnnnnnnnnnnnnnnnnnnnnnnnnnnnnnnnnnnnnnnnnnnnnnnnnnnnnnnnnnnnnnnnnnnnnnnnnnnnnnnnnnnnnnnnnnnnnnnnnnnnnnnnnnnnnnnnnnnnnnnnnnnnnnnnnnnnnnnnnnnnnnnnnnnnnnnnnnnnnnnnnnnnnnnnnnnnnnnnnnnnnnnnnnnnnnnnnnnnnnnnnnnnnnnnnnnnnnnnnnnnnnnnnnnnnnnnnnnnnnnnnnnnnnnngctttccacctcatggccacagaccggttaaccatccatataaaacatccattgccctgggtccaacctcctg

SEQ ID NO: 413767 - DNA, 240 bp, Homo Sapiens
tattgcttccaattcttcaaccagaaaatagccgccgctgggaaactgacgggcaaaagggtgtcacgagggctcaagatatgttatatcatacgacctgcctgttcacagggggaaaaatcctaggaccatagctgatgagaaacttcttggtcccatcatacaagacaagcacaaaagcaccactccatgcctgtgcgaacattggaccatgcaccctcgaagaaagctcagccttct

SEQ ID NO: 413768 - DNA, 166 bp, Homo Sapiens
gtacagatgctactggcccacagctgggaaaagggaacctaacctgtggcccgtgcgagtatgcccgaatgaggaggactgccgctaggagtaaagacagcgataggcccactgggccaaacattaagcaaaaggggtcccacatattgcagatcgggattatcgc

SEQ ID NO: 413769 - DNA, 321 bp, Homo Sapiens
gggtttctgcagcatcttgagcttccttaaagcaattattttgattttttttagatatttcatagatctctaatattttcaggttggttagtggaaaactattatgttctgccatagtgttatgtttccttgagtttttgtgttcaatgcagtctttcattacagtcttttcatttggtgaagatgtaacttcctgtagaatttatcatctctggagagaaataccttcaccaatcagcctggatatggattcttggggtctcccagaccttttctatggatgtacctgttccactcctcctgttccctcttgaggaaaag

SEQ ID NO: 413770 - DNA, 384 bp, Homo Sapiens
aaacgcagacttccctttattttgcactagactcctttctaagtagtagcaatggtgatgtttttcatgcaagcaaacacaccacagcttgctgatagtaatgaacaatgggcataatttccagagccagaggcgctcccaacacatacatataaatcttaacttaattatgatactaaagaaagtgaattacaaaagagatagctagagatgtttttgaagatgtttcttattttaaccaagcttgagtttcttggggcagagaaagagattgacgatgctcagagatcttgctcattgtgacaaatcagggacgctggacacaggcagcgcgttctggccactatcctttcaaaacagagcttcaagaacaaccttctgcat

SEQ ID NO: 413771 - DNA, 462 bp, Homo Sapiens
  misc_feature (401)..(401): n is a, c, g, or t
ttttttgggaggtatatgaaaaaacatattttattccctctgggcccaaatgaatcatactttctggtcacaacttttagaggcaggctattatttcagcaggccactctctcactttttctgttccctctctgactccttcatcctttaccaaagtacagagaaacgttatctctagcccccttccgtcacccacaaatcagcgtatgatagtcaacaaaaactgaggaaagacttctagccaagaaaaagacccattaaagagtggtgtttttgttctgatcattctaaactgatcattctgatcattgttgtgtgacaatacaaatggtgcccctctgtacctttttttggtacaccaacagttgttctatgtccccatcatttccttttgagacctngaagtttcaacaacattcttgaccttcttaatttatccaatgttaaacacttgaatgctac

SEQ ID NO: 413772 - DNA, 378 bp, Homo Sapiens
  misc_feature (57)..(275): n is a, c, g, or t
caacggaataaggttttgaaaacttattctttaaaatcaggggttccaatttagatnnnnnnnnnnnnnnnnnnnnnnnnnnnnnnnnnnnnnnnnnnnnnnnnnnnnnnnnnnnnnnnnnnnnnnnnnnnnnnnnnnnnnnnnnnnnnnnnnnnnnnnnnnnnnnnnnnnnnnnnnnnnnnnnnnnnnnnnnnnnnnnnnnnnnnnnnnnnnnnnnnnnnnnnnnnnnnnnnnnnnnnnnnnnnnnnnnnnnnnnnnnnnnnnnnnnnnnnnnnaaatcagatatatgtaaatatagttcatctctggttaactactagatagcaggctatcatataagtacactgcaattcatttatccattattgatggatactt

SEQ ID NO: 413773 - DNA, 365 bp, Homo Sapiens
  misc_feature (300)..(300): n is a, c, g, or t
ggacgcttcgcgagggacagttggggccgagaaggcgcgggtcctgcggggcccggccgacttcagggactccgaggggcgcccgccagccggagcccgcgaaccgcagacttcccgccttccgcagcccggaagggagctgtccgcactcgccgcggcccgcgtgggaagggaccgcgcctggctatcgccccgcgcgggggaaagggaagtggagggaacccagcgtagggcgctgctcaggggtagccgggtcaacgctttgcttggagctcactatttgaccccttcgggttattntgagggactccagtactcaggtccctgatcgcgatttctttctctgcgccccaatccagaaacag

SEQ ID NO: 413774 - DNA, 169 bp, Homo Sapiens
aaagggtggcccacaatataaccagcgctgctagcggggacgggggggacacctttggtctcaaatgaatgctgggaaggaggggacttgctccgagcgcaagtttgtgcggaagcgcggctggacctgggctttgaatccgggggtccggggttttgcacccaggcgt

SEQ ID NO: 413775 - DNA, 510 bp, Homo Sapiens
caatccaaaaagcgtttattgagtgcagagctctgtgctggtcattttagtaaagccaagatgagcaagacttatgatgagtctctgtcatcaaggagctgggagtatgagctgaactaagacgcacacaaattattaaaatatggtgcagggtacttaaaggaagtccaaggagaaataaagctgacattattcaggacgttttaatatgtcagggcagtcacatatattaacaacccttccaaaaattccaggtaggctcagggaggataggtaacttgtcattaacgctagaaagttagtgtagtctggcattgtccctaaccgaggttctaaagctcaggctcctttcagaacactactgttaaagggaagccccaaagagtcgggggaggggactaagttttgactggatgtgtctcggttgccgtggagggaacaagaggtcagaaaagccatttggaggcagcgtgtgcgatgggactataaggatgaaccggagattgagtg

SEQ ID NO: 413776 - DNA, 121 bp, Homo Sapiens
cagatgtctaactgatttagtttacgaaaacgacatcttgattgctgtgagaatgcatctgtctgcatttcctgaagagcgcgaaaccatgctaactctgatcatagaggcatactctggg

SEQ ID NO: 413777 - DNA, 233 bp, Homo Sapiens
ggatatcacaactacaatcgacccacgcaccacacaacattcaggctgctgagtactacacgaatgacgagagcacgggcatcaggaaaggtaatggccagtgaacctggcccttggagaacccttgctataggaagcacatcctactgacaggatccgacgctgaacgcagaccacaaggacagagaggccaggagagctaggtcaagcatcttgatcctctgttaggggag

SEQ ID NO: 413778 - DNA, 464 bp, Homo Sapiens
aactttcaactcagctttatgaggccttctgggaggttactggaagccatactaggtctcaaatatgccctcattttgaagaacaaggactgataggtgtttgatgggtcagatgtggaatcacctatggtgccggtggtaatttatggggagggtgggttctaaaggcctttataatttttataagtagtgctcccactgtttgaaatggatggtggacatttttaaggtctaatgcaatgtgctgtgcaaacacagctttaagataccactccttcccctgcacacacagcctccttccagattgcagtcccagagttgaaattctggagccaccactaagggaggtgctgcctttggagttttttggcagctgtgatgtggcaggatttagggcagcttcttgggagactctgggacccagatggctatgccatacagactccctccttcccccaatgcag

SEQ ID NO: 413779 - DNA, 366 bp, Homo Sapiens
ttttttgaactgcctttactgaattttggtatcagggtaatgttgacatcataaaatgatttgggaagtattattttctattttcttaaagaggctgtcttccatatctcttactcgctcttgttcactgaagtttttatgtatttatttttggttgggggaaagacatttattggaaaatactgcgaactctcagtaatagtatcaaagtccatctccatatattacccacgtggcatacagaggaggctgataaaggcttgctttggggattcttttggtgcaagtcaatatgtggctatttagtcagaactaaaaggcatagaatctttggaaacaaacagaattgaggaattttttgacagg

SEQ ID NO: 413780 - DNA, 152 bp, Homo Sapiens
ataaaaaatatccttttcctaaaaggagcaggcaacagggggggataaacaaagtcccaatcaaaggacccccagggtttggtgatggcagggatggggggagagagaaaaaatccccaatttccatggtcccaaaagcattaaaccaacct

SEQ ID NO: 413781 - DNA, 518 bp, Homo Sapiens
agagcaggagtgaacgtttattaaaatgctttagagcaggaagggaagtaaagtatgcttggaaaagggccaaagacacgacttgagagatcaagagcaccgtctgaccttttgacttggggttttattcattggcatgcttcctgggtcttgcgtcccttctcccgattgttcccttggagtgggctgcctgcatgtgcagtggcctctagcactggggaggtgagcatgcgcagtgtgttcactggggctgtatacatgctcccttgaggcattcttcccttaccagtgggatgcccctagaaggtcatataccagttaaactctgccatttttccttttcgggtgcatgcttgagccaacctgccctacccctaagatcttatcgggaagctgctgatcagtttcaggtgtttgtgtctagtggtagacacctgttccctggggccaactgcaaccaattattattttagagagacatcaagggaatttgggattgctagtgcctctggtggtct

SEQ ID NO: 413782 - DNA, 425 bp, Homo Sapiens
accacacccagccaagactactcaagaagcctctaccaggcattttttcatttggccttgccagagtgaataacaaagacagtggcagcttatttgccaggtacacagttcctagttgtaaatactgttaaagaaatggacataacccttttgtatgctcttgagcagaatttgtgtggcttgagcagaattgaggcagctcagctgctcctcattctccactgattcttcaccctatgactggcatggcaggcctgcttgggggctgcaaggacacgctgggtctggttccaccttgtgcatcactcccagtgctgctttcccctttgctgaaccgcctctgcctggggcttctgtcatttcagctggtcattcaggttccatactttaggttctatctgccagtcatttgcacttgattttaa

SEQ ID NO: 413783 - DNA, 367 bp, Homo Sapiens
gccgcgccgggccaatccgcagccggggcggggcgacggcgcgcggaccggcccaaacctcctcgcgcgcgtagtacccttccccccgcccctcccacgccgcaacccccaggtggagtcgcccccacgccgcgcaggctgcgggaggctgggggcggggacccccactccagctaattacagatcgatgaataaggattaggctgcccaaacactcctcgtccctccggcccgaacgggcagacgcattggcccgcgtctcgcccagccttcagccgttctcggttaacagcaagcctgacagcgagtcccctccactccagattagtatctcgaagttccagagcaggtaccaagcaggcaaacc

SEQ ID NO: 413784 - DNA, 127 bp, Homo Sapiens
ttggtatggctacactctgcaccgtctacacgcacaccttctccagcatctgggcagacctgatgaggtattggttcacatccagcttacccctgtgctccaggacacgagtgcatgcagagatgct

SEQ ID NO: 413785 - DNA, 190 bp, Homo Sapiens
cgtagcatgtagaccgtgagacgactgtcagccctcaaggggcggcctcaagtcagcgtccaattaagtaaagcgacagtgctcggattcgccctaactgatgcacttgaaacgccggttcaacttcagcggttgtggttacagcctgcctcaacaccagcctggcgacatggtgcgccgcaacgagcgc

SEQ ID NO: 413786 - DNA, 248 bp, Homo Sapiens
aagtaatgaccctagagacagacatagtcaaaatgaaaacataaattccaattttgtgtcaattattttcaaactatgttccctctggtttaaataatctgataagttgtaaaacagttttcataagtaggacagcaccagtcattattttttcactgactgctcctggtcctattgtttaggaagcaagtcattgatataaaaggccacttctatgacttatttttctgtttggttgggctttgcca

SEQ ID NO: 413787 - DNA, 317 bp, Homo Sapiens
ttgctttatgtacgtattctcatataattctcaagacaactctggaaggtaggaactactctcccccttttacagaaaagataaaggagggtccgagacatcgcgcgtaacaagcccaaggtcacgggtacacaatcgtttggaagctaggtttgattccaaagctccagctccgaaatccaaaccacacccggttcaaaggacaaaagcacaaacgctcgctcgctgggctctaggaggtgcgaccttttccgggggaggggcgaagccagctggctgcggaaggcggtgcaggaacccctttggcgagctcgcgc

SEQ ID NO: 413788 - DNA, 407 bp, Homo Sapiens
tcataaataaggaatatctgagacatgtatttattaattttatcctcacatctatactacttggcataataattcatttgttaaaaacaatgtttcatgatattatagtcattattactagccagtgaaaaaacagtgtaaattatgcatttatcattttccctgcggcccaccctccatccataaattctcacgactattctcagaaagtctcataatatctgttttaaccttgcaaaagattattctgcataatgtagagagaaacaggcctctgatagactagttaactaatctgggcgcattttcattagctcaagttgagtggcagctgtaggaagttttgcttaccacctagtttgcaggctagcaatgaacacctttgcacaatccctcagactggctgg

SEQ ID NO: 413789 - DNA, 196 bp, Homo Sapiens
cagcagaggaggaggtatcgccagcagtgcagaccacggcctgctccccagtagttccccagtagttccccagtggatgaccagttccacagagacacagctacatctttcccagcctagcctgtgattaccatgtcctgagcttgagacctgaagagcccagcagagcagacccgagggagcctcagcagtacag

SEQ ID NO: 413790 - DNA, 478 bp, Homo Sapiens
tttcttgcatgtgttattttaatgcaagctttcacgagtggtgtctacaaacctttctctgagtcactgaccacataatttaccacaattctctcttgtaggtagtcagctcagccgggtagagaaactgctgtgacttgttttggctgtgtctttttgatcactcaaaaaattggtgattagttagggtacagagatcttgataaacataatttcacaatgtaaacacacgaacaaacccaaactatccactttgagaaggcagatggtaaattccttgtcagaaatggctatagttaaagagactcagtaatagcacggtgtgtaccagtgggctcagtaaacatctatcactgacatcatgatcaagctgttaagtcctagtcctgagactgatggtctcctctgaggagcctgtaaccatcaacattcttggagaatcaaaccagggcaatacatttttccaaaacgttaaatg

SEQ ID NO: 413791 - DNA, 181 bp, Homo Sapiens
  misc_feature (110)..(139): n is a, c, g, or t
aaactatacactctttattattaatgtacatttatgaaaaattctgcacagttacaaaagtgcatggttataaaatcatctccatacaaaggttggcatcttccttttannnnnnnnnnnnnnnnnnnnnnnnnnnnnnagacattagcacattacaggacagtgcttaaaaaaactgaga

SEQ ID NO: 413792 - DNA, 149 bp, Homo Sapiens
tgattataagaggttacactttattacatcactcatctaacattccagaaaatggaaagtactctactgtacagcaaagtaaatcattggttgtctggagaacagaaagaaagcctttataaaaaggttccaagtaaatataaaggtgt

SEQ ID NO: 413793 - DNA, 427 bp, Homo Sapiens
ctgatgcttattcctttactatgggctgaccaccacacaggacacttgaccaggtatcttcattttcctgttccatgactgaagaattcctagaaacagatgaagtgcgaattcctgggccctacccgtagtgcttggatccagaacatctggaaggtggcccactgggcaggaggggtgtttgtctcctatggactggatctacttttctaaaaacagagataagcacccttggccccttaacaaatgggctgctgcttacaaatccctttcctacagtctctccgtaaattctcataacaaccctttccacatgatgaggccactgaaacccagagagggagagttatttgccctgaggtacagacccaggaggaccaggtaggggggtacctgtggccaccactatgtccctttaagaggaagg

SEQ ID NO: 413794 - DNA, 116 bp, Homo Sapiens
caaacctcaaaagtttattataatggggttataaggcatgtgctctcaaaaagttgttacataaatccaaaaaatatcctgttaaatgactggcccaactaaatcagttcccaaag

SEQ ID NO: 413795 - DNA, 101 bp, Homo Sapiens
cctgatgggttctcactatgttcccgtcttgtgcatcttctttatccaacatgaaatgctatgctgttagccttcaataaaatttcctggaaatctagttt

SEQ ID NO: 413796 - DNA, 103 bp, Homo Sapiens
gggaaaggattgcctggcagggccccaattctaagtgacaaggaaaaccctgaccctgtaagttctttaacaaaagggaaataatttttatttttgatttgaa

SEQ ID NO: 413797 - DNA, 435 bp, Homo Sapiens
ttcacgaatgcattcatttattcaatgaacttcgcgtcagccactggctgtcatcagttaccgacctgattgagggcttcatggaagggatttggaggagcattcatctaaaaccacagcacgctgcgacgctcagccctgcagtgggccctcaccagtccccgcgcctccgaatccaccctcccggggctgctcgtggctagcggggggcacctgcggggaccaagccagcccggccgaggcccgggtcccgcccgccacggccctcggggccccgcccgcatctggcagaagccacgccccgtccgtgtgggtggggacggcccgccggaccgaaattcccagactgctgcctcaggcacccggctttccgactccttggcttcttatgtgaggaaaccacagcgcggccggcatccagagagtcggttagtc

SEQ ID NO: 413798 - DNA, 367 bp, Homo Sapiens
  misc_feature (272)..(272): n is a, c, g, or t
ggggttgaagctttgggggatgatccaatagggggcgcttaggcataggggtcagttggtaggctcttgctcagttggggggttcccctgtatttcctcacagttgcagccatgttccctttcaatgctttgaaatcaagggccccttttccacttgagcgctggctgtaaattgcggcttggcactcccaggctgtccaccaaagctttggggggaactcaaggtttatgtttcctccccaacttaaaggcagcagaggaaggaaccttancagtggttgtagccgatggtcttttatttgtatcctaggggctccaccccagagaaatgcaggtcagcaatcgctcagtgcaatcagcctaggat

SEQ ID NO: 413799 - DNA, 129 bp, Homo Sapiens
ctacttcttctcaagaaattaatatccctcatcccaaaaagtcaaccaacacgtgggaccccttagaccaccttcccccaccaaacaccactaacttccctccccctccagtagctgcaactgccccag

SEQ ID NO: 413800 - DNA, 465 bp, Homo Sapiens
  misc_feature (344)..(344): n is a, c, g, or t
  misc_feature (363)..(365): n is a, c, g, or t
  misc_feature (367)..(368): n is a, c, g, or t
  misc_feature (374)..(374): n is a, c, g, or t
  misc_feature (384)..(385): n is a, c, g, or t
  misc_feature (392)..(393): n is a, c, g, or t
cttagcgaaatacttttttattcagaaattcatttggaggcctctgcttttaggcctagggaatcttactcattttcttctctaaagaatctcttaaatgaacaatttttcaagccaaatgttcccagagttgccaccaaaaacccaagtcacccttggtgaattttgccaagtagaaagatcagcatgagaactaggaccatgagaagcataagtctttcctggaagagcagaggattcagccgtggatgcccctgcaagctggtgatgggcggcagacgcatcacgccagtgcacagtgtctcaggcccccggcctacgggctggcctcctccaaacacagnacccagcacccctttgggnnncnnaaaccnacccaaggannaaacccnncccacccccaagcaaaaaaccagagagaatgtctaaaagccaagttctcaggacaaaacccctggacggaga

SEQ ID NO: 413801 - DNA, 543 bp, Homo Sapiens
ccgaccgacgacccggagtcgtcgcgcaagctcatcatcggcaccaaccggccggacgtgcgcctggtcatagtgcgcgcgtccgatacgccgacctatgtgcagtacggcgccgccgatctgggcatcgccggcaaggacgtgctgctggaacatggcggtgccgggctgtaccagcccatcgacctgaacatcgcgcgctgccggctgagcgtcgcggtgcccagcggcttcgactacgaacaggcggtgcgccgtggcgcgcgcctgaaggtggcgaccaagtatgtgcacaccgcgcgcgaacattttgccgccaagggcgtccacgtcgacctgatcaagctgtacggctcgatggaactggcgccgctggtcggtctggcggatgccatcgtcgatctggtgagcagcggcggcacgctgcgcgcgaacaatctggtcgaggtcgaacacatcatggacatcagctcgcgtctggtcatcaatcaggcggcgctgaaggtgaagcacgatctgctcaagccgattcttgaagcgatc

SEQ ID NO: 413802 - DNA, 544 bp, Homo Sapiens
ctataattaaaattattttctcactcactgtctccacttccaccagaccactttttcacatccccggttgacatttcaaccaggctttaacctccactggtcttaactgaccacactttaagccagagttgctaataatcaacaattctgagccccagccaaaggtgcacagctacctccttggtggtttttatccctgaaagtcaccatccccttatcatccaagggaattccaattcactgacttttctaggctttatatgaaatcattcctttggaatggagaataacatatctaattctccacttttttctttgtaagaattgctaactgggttttgtgtagctgtatacacagaccattttgaatatcagtgtgtatccacacacacctgttttgcttatcttatttggaagatgttgaaagagattgatcaacttgtttagagtaacagctcttataacctaattagcttagaagcaaaaatgggaaagtgtaaatatcaggaaatatacattcacataacaaaactctgctaaaaga

SEQ ID NO: 413803 - DNA, 418 bp, Homo Sapiens
gaatataagtattactgtttatttgggtaaagtttacagattatatataacctgcgagcaaagattaaagttgcctggaatctacactttgagtagcagcatttacaagaagatttgtaaagacaataagagaaacacagagtgggcaaaattgtttgtcagaaatttctatttatttacaaaaataacattgattattgattagatacatatcattatagtttagggtatgggatatagtgtccaatgtagcattattagttcaatttatagcttcctgttggcaatagtgaacagtctcaaaagatgaatacagaattcaaagggaggagaaagacataattgcacttttattttaacgtctctgagtttgataactaaaaggacttgcatttttcagataaaagttttttaattc

SEQ ID NO: 413804 - DNA, 536 bp, Homo Sapiens
gaagatacaattcatgtatcatgaaattcaccattttaaagtgttcaattcaatggttttcagtatattcacaaagttgtgtaataaccatcaccactatctaattccggaactcttttataggtcccaaaggaaatcccatactcattagcagtcactgcccatttccctctccttcagccctggcaaccactaagctgctttctgtttctatggatttgcctaccctaggcatctcatataaatggaatcatataacacctggccttttctggctttttccactgagcataatgtttccaagcttcatccatgttgtagcacgtatcagtaattcatttctgtttattgccaaataacatttcattgtatggatataccacaattgatttatccattcatcatttgatggacatctggcttgtttccacattttggttattatgaataaagctgctatgaacatttatgtacatgttttcatgtgaatatatgtttccaattctcttggctacatacctaggagtggaattgct

SEQ ID NO: 413805 - DNA, 142 bp, Homo Sapiens
caatgcggacgatgatgtgaatgccgaacagcatgaacacggagccggtcatcgttgccgcccggatggcatacgagacgaattgcaatggcatctgcatctgtaccttgatgaagacacccaagactcccatggccttgct

SEQ ID NO: 413806 - DNA, 393 bp, Homo Sapiens
gtacccattttccattctcatccccctaccccccaacccactactctctctagtttctggtaaaccagccttctactttctacctccgtgagttcaattgttaaaatgtttaggtcccagaaatatgtgagaaaatgtgaagcttgtctttttgcgcctgccttatttcacttaacctaataattgccagttccatccatgttgcaaatgacaggatctcattctctctttatggctgaatagtactccatggtgtataagtgccacatgttctttatcaactcatctgttgatggacactgaggttgcttccaaatcttggccattttaaatagtgttgtaataaacacaggcgtgcagttatctcttcagtatactgatttcctttttttt

SEQ ID NO: 413807 - DNA, 518 bp, Homo Sapiens
ggaacacaattaattttattattcattagtatgaatgaaaacaaaatacagtgagcgataaagacagactagaactaatatcatttgggtttacaaaaaccatctcaagtccaaacatgttcttgtccaaagtccttgcctcatttcaggaaacaaccccatgcctcacttgtgagattagagtaccatgttttctttctttccacatgtggaagtggggtaaagagatgttttggccaaaaaatacattctagacccaaacactagagatatgatcaatctccaggaattttataaaaaggtaatgttgtatttctggataaaagggaaaaaatgagcacaaaaaggatacattagaccacatatccagagattaaggagaccctctgtgtatcctcagtttcccagcttatttagttttgtgtttcccgtcttggtgaaatacctttgaagggaaagcatgcttttatctgcaaatagagtttattaactagctctgggggcattaactagctctg

SEQ ID NO: 413808 - DNA, 137 bp, Homo Sapiens
cgcagaggcgcggggacacacaagacgcgacggagcgttgccatccaagtgactgctagaagcagcgtgagcgtttctgctccctgattccaccgcaggctgaacgcttaggcgtatgacatgcacgtgaaagaagt

SEQ ID NO: 413809 - DNA, 443 bp, Homo Sapiens
tgagcaaggtaggcttgctgctgtgtaacaacaacaacaaccgacaacaataaaaaagccagcagcagctagtgctggaggattctctttacgcgaatcttacatgattattcacaaaggggcatgaggggaatgttactcgcaagcatgtttcaggaggtctccttgggcatgcacgctctgtggttgtacatgctggtacacatgtcgcatgtctcattagcattaaaaatctccacccaggggtgagttttttactattataatgaacaaaaggctactctagggtgagtttttggaggagtgcacatgctcatcagcagggaaagtttctaccatggttatctctggcttgggccttatacgtaccctttaggaacggaggagaccaaccataaggccagaagtagccagtgtagccactgggttttttttgatgttgt

SEQ ID NO: 413810 - DNA, 127 bp, Homo Sapiens
ctagcgactataggaagagctcgagcgctcgggagatgatgacaggcaccgacgccgacaccatcccaatctctatcagcgtctgcatgatcttcttgaatcgcgccgaacggaaccgagcgttgaa

SEQ ID NO: 413811 - DNA, 320 bp, Homo Sapiens
  misc_feature (301)..(301): n is a, c, g, or t
ttaactcaagcctcttaattctcccacaggagctaaaagaaacacagggggttgcgttaaatacactctactttctttctaaaagacttgcgaggaacaacatcaactcagaagatcctatgatcgggcactcatcatggacccacctagtgtcctagttcattactcagactgcagattcacaaaacagactaagacactgaggtaacagaacagctatgcacatgtgacatgcatatgtacgtatcacacagtccactctacgtaacacccaccatctgacgtcgtttgagatactaanaccgtatgctcagattatg

SEQ ID NO: 413812 - DNA, 178 bp, Homo Sapiens
attccaggggttttttccttgctccaaacagggaatcaaatctggcttagagatatcaatacccaaaaacaccaggtctgtggagttctttaaataaactttcctatacaaactttgcctgaggagtgtcccagaattggcactcccctcgagagagttttatgaccactcccttaat

SEQ ID NO: 413813 - DNA, 495 bp, Homo Sapiens
aaaagaggttttttatttaccattaaaaatctctcactggccctaaactggcaacagtcatctaaccctggtctcacgccactctgaaccggaccctcctctgtacttcctcctgcaccagctcgcggcagccacagggctgttctgttcagacctgagagacccattcaggcactcacgctgggacgtgcatgtcactttactccagtgactgaggacctgagaactccttcgtcctccattttccagagcaaagaagaaacagtgaaagctacagaaaagcatctctgcttttgtgaaagcacaattctcttcccatgctgactcagtctggggaagaggtcaacttttggatccactcttctgaagaagcaagtgtcccgctcccctcacccggcactggctatcttgaatcagtgaagaggaaagctcttcactccctaatgtcacgtcctacacattacaagctctgactgaaatttctcactcagaatg

SEQ ID NO: 413814 - DNA, 278 bp, Homo Sapiens
ttttttttgggtgctctttttacctttgaaaacccaactgtcctggctttaggcccaacaactgcccttgtctgacccccctttgcaaaagccaccccggggcccccttggcccaccccatagggcagcaggagccacaactctttttgcaggaggggcatttgccctctttgcatttgcaggaaccggcccaggcccaggaacccacaggcgaacaggaaccgttggggtcccttttcaggcaaggaaaaaccggagttccccatcaaaaagaaaac

SEQ ID NO: 413815 - DNA, 419 bp, Homo Sapiens
  misc_feature (262)..(290): n is a, c, g, or t
gttacggagtctagctctgtcgcccaagcgggagtgcattcaaacctagagaaaactcagccttgaatttgctatcagctacaccattcaagagcacgggggaaatgaagacattttcagacatgcaaagactcaacagtttgcaatgtacaaaactttagtggaagaaagtaggtgtacttaagcaaaaagagaatttgtctaggggcataaactaatgagagggagggtacacctaaatactggctataaatgtaatacnnnnnnnnnnnnnnnnnnnnnnnnnnnnntaaaattctagaaagcaatattgtgaagagttattcaaggctctggaacatttcatttcctgttttgttactgacctgtgactctgtaaaagtctactttcgcaatttggattaataattttatgaatg

SEQ ID NO: 413816 - DNA, 454 bp, Homo Sapiens
  misc_feature (422)..(422): n is a, c, g, or t
aacatattgagtttttagttttccttgtgctaatttgccttattcttcacaatcacactacaaatatcgtcagtcctattttacacatctgcaaactgagagaattagcaattttgtccaagagtacgctagtgaagtggtaaggacaggatttgaactaagaccctgattccaaaccctttcgttttaatatggaggcttttcattcctgcttgagaagaggaatcaggacacagaggtagactattaattggcagaacagaggacctccctcctcccctccccaactctcccaccttcacttagccatttaagaaataatgccatgatctcttaccagggaacacagcaacaagaccagactcctggttctaggctgcatggcaatctgctctgtgaccattttacgcgatgtgcctctntacaccatcccccagaaagggaagggctaaga

SEQ ID NO: 413817 - DNA, 229 bp, Homo Sapiens
gcccatgaggaacatccttgactggggcttctacattgcttgtcacaagcccttctacacctccctgaaggtccagctgcctgtgcgcctgggcgacgtcatgaaaaacatctaactgcttacgggcctagtgctgagcaccccctgaatgcaacgggtgcaaagctcttatgtcctgagcatcctggacatcatgtacttcctggactgggatcacccagatcctcgg

SEQ ID NO: 413818 - DNA, 313 bp, Homo Sapiens
ggggcaacaaaaacaggtttattggagggattggggggaggaaaacccccgcatggggcttgaggggtgtggagggaccccaacaggcccaaaaccccccttccaccggcaaaagggaacccctgggcatcccccttgggcccctccccaaaaaaaggatggcgttcaccacgtcccctacccaaacaaacttgccaagggggaatcggttcaacataacctttgccttggggggggcactacaaggggcctggcccatgaacctcatcaccaatggggagggaacatgattcacacggatcttgggggcccc

SEQ ID NO: 413819 - DNA, 363 bp, Homo Sapiens
ttttaattcttctcccccactccaatctcatctgtcccctgaagggagaaatcgaacccatctgtagttgttacacaggcaaaatcacagatgctgctgtggtctagccagggtcggaggggctctgttctgtggtgtatatgtaggtatgtgtgtgcgcgggtctctgcctgtgtgtttctgaagctggtctttaacaagtgtggactctctgttgaattctgcattttctcctgcagccagcaggtggcagtgctgcgacagtcgggtgactccagtcctgtgacgcctggccccgcagcgcttgtcaggactggtccaaccgtggaagggaaggcatgtccacacgcaccccaaggtggc

SEQ ID NO: 413820 - DNA, 328 bp, Homo Sapiens
cagcaaattatccttaccccacggggggagtctgtgtgaatcggtgaagacagcatctagaaaccaccaagggagactggcaccccggaggagacccagacaggtgagcctctgcctgccccgcttccagctctttctcgtcacacctgctgaataccacgcctgtgacattagcatgctcattggaagtgggtgctggaattgtcactggctctttctgaatcccatagatgctgtccccagagcctgcatttcggcatctggttacgctgtacatggtggcaaatttgacaggtgcccatctcccaaccctttgacctctacctgc

SEQ ID NO: 413821 - DNA, 349 bp, Homo Sapiens
gagtttaaatgtatttattgaacctctaccgtgtttgccaggcactgttacctggacggcattggtctacacatgttattttagcggtgtcgctggcctctaggggctcttgttctagtgggagggatgatttcttttagtttcagggctccattaaaatttgtgaccttggggcttcccggcctggagctcaaattgcttggcgaaggcatcttccaaacaaatgaaatcctgggggaggctaaccacgatcaagatttcagtaaacatcagacactggagagccgacccagcgaccgaagaagcaaaagatcttctttccttcctgaaatctgggcaggctgggagc

SEQ ID NO: 413822 - DNA, 151 bp, Homo Sapiens
ctggggcaacaactagcaaccgctgttgacgtagctgaagactttcttctttagctgcgcccattgctcgcgcagcaagctcgacctggacaccagctccttgttctaactcttgaagatcttcactgtctcttacaggcacgagatgcgc

SEQ ID NO: 413823 - DNA, 238 bp, Homo Sapiens
aagatcccacccttcccaagcctcgcgcgtctgcctgccttccagctcccggcgtggagctcaggagacgcacccttcgcgccgggcgggttgtctcccgagtgggggccaggggctccctggccgcgatttcgctggcctagtttcgtctccctaggagacctaggtccttgttgtgaggctaatttcgtgcgggagctcggctcacagttaagtgcctcttaccccaccctcaccg

SEQ ID NO: 413824 - DNA, 248 bp, Homo Sapiens
  misc_feature (144)..(145): n is a, c, g, or t
  misc_feature (150)..(150): n is a, c, g, or t
ctgtgcggcggcgaggtttttctctccgccaccggtgcttcgggggatgatccgacgatcaaacagaggagccagaaagctctagctgtcatttttgcagacagggttcccaggctctaaaagtgagcctggtctttgtgtttnnttttntcccccaaccccttctccacacccccacccccgttcatgctaatgaggggcagcctttggggaaacgggaatcactcgctgagcagaccattggaaca

SEQ ID NO: 413825 - DNA, 289 bp, Homo Sapiens
gcggccgcggtggccgccagtgccggggcgatcggctcgccggtcagcccgacgcgggggcccaggtcggcggcggtgtggacccgccgggcggcctcggcgcggctgatcagggtggcctcggcgatcgcatgcgaaagccggccacccaactccgccgggctggcgtcgcgggccagcgcgttgatcagcggatgctcgaccgccggcagccgccggcgcaccgtctcgcagcgctgcaacaacgatagacactcgcgggggcgtaaccgcgtcaaaactcaactcg

SEQ ID NO: 413826 - DNA, 283 bp, Homo Sapiens
caaacagatcaacctgaagttccttgctcctgctcacctgcggaagaggcctttgcttttgctgcaaacctgcaataatagcagctacattaggctgacggttccccttaattcgttgcatcccccggatcagcttttcctacgacatcttgctgaagacgtggttgtcctgcaaagccttatgaaggacttctcgctcgaggcccctcttctgtgccaattgattaaggacctgcgcctcctgagacagtcttttttcctctgcaggctgcagttgatcctg

SEQ ID NO: 413827 - DNA, 491 bp, Homo Sapiens
tgatggagtcaagccaagggtgtattatcaaagttctgtgagtaacacattgcctagagggctacgacatttcttaataagtaacagcttgtaaaacaatctagtcaccatttcatgattaaagggcaagggtatgggtattgtttaggaaaactagtttcaaattctagatgaaaaagtgtgtttacactggttttattacagcatgtttagaagataacaagtatagctttctttacaatgcaggcattggaggttcttttttgttgttttaatgctcatagtagcatattggctttgctagattgatcaatacagcatggtcccatggaaaatatgacaaagtgggagacattccatctccaaaattatgactaaaatcaaaatttagttcttcaatgaaaaatgacaatgtttgaccatgagggacatgtaaacactgatacatgggaagtatccctacacttctatttgaggaaaatatgagatgc

SEQ ID NO: 413828 - DNA, 261 bp, Homo Sapiens
tgtcactgagggaaccttttagaggaattagtgagaaaagcgagccggagtatttggaatggcaaaattagtttacttggcataggaggctgccccactgtctgggatgtctatggatgactggggaaaagtgaattgtttctgaagtatgggttaaggctgacctggatggatagggctgctttgcaataccttgtgtctcattagcagatggtcggtcgaaggtcaattcgtgtgcggctggtaactgtagcacctgat

SEQ ID NO: 413829 - DNA, 112 bp, Homo Sapiens
tggtcccgaaggccttggttattcgcgtatacaaaaaaccctccaagccgattaatgactacacatgttccttttcctcaattaacttgttatattgattaaaaattcgagc

SEQ ID NO: 413830 - DNA, 474 bp, Homo Sapiens
  misc_feature (351)..(351): n is a, c, g, or t
  misc_feature (401)..(401): n is a, c, g, or t
cctttaacttcctcattggattctaggaagaattttcatggtaataatcatatgtagtctttacagcttgttttatttttttctaataaagctaattcagttcaccagttatctaccacttgcggttttaaagattaactcataaagaataaacaaattgtttactgcaaactttgtctttaactggaagttaaattatttttaccaatgacaaaggtgaaaatgttgttttgagattctttgctggtagtatctcccttttgcagacagcagactgtgagaaaactagggctatcacacaggccatgccagagggagaaaaaggaataaccaatatgagacaaaaacacncaagtccacttagatcttcaacatgacaatgatacggcctcaaataatgntttggatgttttaaagggatagcaggtaaaagttttccgagattacctgggtggttggcccagaagaccttta

SEQ ID NO: 413831 - DNA, 462 bp, Homo Sapiens
  misc_feature (436)..(436): n is a, c, g, or t
  misc_feature (441)..(441): n is a, c, g, or t
atttcttggatccctgtttttaacaaaatcttgaccataagggaaatcacacaactactttggaggattgaaaagcagttctaaactgatttcatagttaaaaatcactttgatgtaataaagtggcaaatataagcaattaaatgcaacccggttgatgtttatcttattgttacatcagtagactaaggtaaaacttagatctttgctcttggaatgcaaaaaaagcaggtccctatcctgaaaacctatgaatacagtgacatcctctggcattcgggatacaatataactagctgcttctcctgccctgttcagtagggtttacttatatctcacaggaatctccacaaatttatcttgtcattctaggtccttaggctgaaagctaagaccaaagtggagataaaatacaaaaaggcagagaaataagatngagangacgtcctaccccttttcgaa

SEQ ID NO: 413832 - DNA, 167 bp, Homo Sapiens
tctctgttgctctggctgctttgcagagttagggaggcttggtgtggggagctcctcagggagaacctgcctaggacagcctcgaaggtcatcggcagagacagagggagcagtgtgcgctgcgggaacggcactgcagatagattgcttaagcctggctgtggcat

SEQ ID NO: 413833 - DNA, 196 bp, Homo Sapiens
gcttcctttgtaaatagtccaccaactcaagtcttgatgtaagcagctccagctcatgatagggaagctgaacaacctggtaaccaagtaaccgcaggtgtctctgcttagtagcctcttttccaagtaagtgtttactgtccaagcataatcgctgtggcccatcaatacacagcgccaccctttttgggatatc

SEQ ID NO: 413834 - DNA, 472 bp, Homo Sapiens
aaagggagctaaatattttaatccaattagacaagtgaacaaaacactgaatattgcatgtagtgtaaataattggttcttgcctttaaaaaactgtaattccgtcacattacaaccccaaatgtcagggttgtctttatttttaacactttcaaacatgaggcagccagaggctccactctttgctgttggtgacactgtctgtcctttgggaattcttaaaatctatttaccatggaaacatggttcatataaaacacagacctgcctgtgtgtagaggaagttctcatgactcaggggacttgagaaagctggaagatgacaaactcaaaccccacggttgggaaggaacccttgggcttgggtgccccctggggaggacaggtggcaccgcaaaaccagggcctccaccccggcctcatgtgtgctggggcctccctggcctgtgcggggccgcctccctctccccgc

SEQ ID NO: 413835 - DNA, 531 bp, Homo Sapiens
attagaatttgcttttattacaccttcagttaaagtacactaagcaaccttaaaacagcatgaaattcctacttccgccttgcctcacatactgggccacatttggtctttgtcacttctgaaggactcaaagtggaactgtggctttgtgctagcccctgaagcgtggattacttcttatgttgaaaacaggcatgtttccgaagatgcgctgtttggggtttgtgttccagaatcttctttgtcctcaataagccagaatttcacaaggagatattttatgtgatgagaattcggaaaaagtctagaagctactagtgtctatttactcttcacaactgtgttgctcagggtgtggcaggaagacgtttcccactcattgcttctggaagtcagcgtcggccttcactattctgcccttgtgtccttccaggggtcctcacagcacctcactcagagaagtacagtccaacagcaagccactagttgacagtttaccaaaaagttgctgcaaaatctgcctttaagttg

SEQ ID NO: 413836 - DNA, 512 bp, Homo Sapiens
acattacagttttgaaattgcattgattttttgggggagaattgtgtttgttgttgggttacattatctgtgacttgcattctgcacggtaaagatagcattagaaaatagtggttaaaaggagacaattggccgtataggattaaagaatgtctttaaaaagatcctggctaaaacatgctctgaagacactgcttatctcacaagtccctaaggacattcctaccccacccatccccacaaagtgagctgggctgtagaggctggcagccagaggctgatgcctggggcaacacttctgaatgctaaaccctgggccagtgcctcagtctgttcagcctagtaaaacgaaacactttagactgcgcaatttgtgaacaacagaaatttactgctcatagctctggaggctggaacatccaagatcaaggcgccaacaaatttggcatctggtaagggcctactgtctgcttcatagatgccatttctagctgtgtactcaaatggcagaa

SEQ ID NO: 413837 - DNA, 397 bp, Homo Sapiens
tttgctttgtactaaaacttgctttcaaatatctgggaagagttagagataggaaagcagaggtcatttcaaagagagagagtgaggataccaccgggaaggcagcgccgaaaaaaccagaggggaaccacttgccgatcccccaggcacagtctggaggtcccaattcccgcggtaggggggcgagagatgccactcgtctgatcagcaaccattttgggcccgcttgcgccgcttctccagggcgtccgcgttgtgctcatccagttgcttttgaggttccggccccctccaaacctctgaagcgctccgtgcacgcgacgcggcggcggggtaagctggagccctcgccgcgagccctctccgctgcctgcccgcagcacagccgcgccgacct

SEQ ID NO: 413838 - DNA, 477 bp, Homo Sapiens
cttttgtaccttatttttattgcacattttctgtgtgtagatacacaaatccttactattgtgttacaattgcctgtagtattcagtacagtagcatgctgtacaggcttgcagccaaggagcaataggctctaccatacagcctaggtgtgtagtaggctgtgtcatctaggtttatggaagtacacactaggatagtcacacaatgacaaaatctcctaaagacagttctcagattgtatccccctccataagcagcatatgactatatatgtttcactatagctgatataattagtgataagtattctcccttctaggtaagatgctctaattaaaaattttagacctacacatatatgtgggctaacccttttagaatggggaatggggcagtatttatttgtgctccttctctcagaactgaaagcaagtagtatgcctttgtatccttcagcaactaaagtaataaacgat

SEQ ID NO: 413839 - DNA, 585 bp, Homo Sapiens; identical to SEQ ID NO: 60001

SEQ ID NO: 413840 - DNA, 527 bp, Homo Sapiens
tagctttattttttttggcgtcctggacttctcgaaaaagatttccctctccaagtggggccctcctagtaagctttgcagtggcgccagatggggaagggcacaaaatccaaacccttttgtatctcgcagagctggaaatcagaacgttaagtggcttaggaaatgggaatctggatttctgggatgcatgaaatatgtaaactgcatagctgttgtcattgataaacaattataactcaaaactactgcgatttcattttgtggagcgggaaatattccgtataaaggcgcccgggaaatcagacttcgcttattgtttcctcaatacttgaagtaagaatttacagcataggcaagctgcaggagcaaatatccctacatgcccttttgtcgcttagacttttctgctcccctcccccgcatctcacaagaagttaacggctaatgacccccacaggaacactataccctgaattccattacctgcttcattatccagaaaggaaagtttcctgtactagacc

SEQ ID NO: 413841 - DNA, 415 bp, Homo Sapiens
cataaatctaacatttgtattacacaaagtgtagaaggtgcctcaaaacaataacaacttcatcatcattagtaagaccgtcccccagtttcctttcattttaaccttaactgcatctgcctgtggggccccagctttccagggctctgcagtttctctgaggatgaaggctccttccatggctcgggtgagcaggctgaaacatctgcaggaaaggttccccaagaataactaactgggcctttaataacctcctgttgcaggcttaatattagccttagcttggagtcacaaggttcaagctttaatttccatgtgagagttatttacttggtttttgaaactgttcaaaaaatccagtgaaattactcaaacactgtgtttatataagggatggaaattttaaggtgcttaa

SEQ ID NO: 413842 - DNA, 197 bp, Homo Sapiens
gggctggaaacccttgaagtcatccttgcggaactcggaaatgtcttttttttgcaggtccaccaccctggggtcaggggaaatttttttgggcccaaactttaaacccaggtcggagcactgaaccccccccaggtgggagtggccaccaaaaggacccattgccctcatggtgggggttaaaaattcccggtcca

SEQ ID NO: 413843 - DNA, 112 bp, Homo Sapiens
gatgaccatacaccttacgaagcgtacccacaaccttagtagccgacttgtaatttacatgggccttctacgcaggaggcgcagctgcaggatcgggcagagcagtgctcga

SEQ ID NO: 413844 - DNA, 516 bp, Homo Sapiens
  misc_feature (386)..(386): n is a, c, g, or t
tgccgtcggggtgcggatggaaagagaaatcccacctgctggggcctggagcctcagaaagtcgccctcagaaaggtaggtgctgacatcgaggccagctagccttgtggtaatggcctgggctgggccactgatttaggcggtgaggcggctggcagaggacaggagcaacggggaccttggagtgtccacccctggggacctgtggaggcgagaagtttgaaaaggtttgatttgcccatgaaatgcacaggggcacaggggaaagttgaggggtcccgagcccaccctgacttggggatcaatgttgcgtcggggtgggaaggttgagcgtggcaaaggcacacccatggaacggcccaggaagaaggggagccactcatcanggcacagcacaggctcgagttctgcctgcagtgaaggaaaacaagacccacttggctggggatggggaacaatagaggcagcagatgggggtgcccagtgaagccacagcccatccacagcacatagtgg

SEQ ID NO: 413845 - DNA, 366 bp, Homo Sapiens
tctggctctttctccaggttctcaattcaccactctaaatatattactttgatattctttcttttttcgagaaagcatgcttacattggccttccatttcttatttattttgtataaatttaaggggtaccagttcagttttgttacatagaaatactgtgtagttgtgaagcccggacttttattgtaaccgtctcccaaataatgtacattgtgcccaataagttatttctcacccctcacccctctcctgccctctcacccttcctggtgttcaatgtctattgcttgcaatattctatgagttggaaaaccaaaatttttaactgttgggaaaaaatgggagtaaatagtatctgagggccc

SEQ ID NO: 413846 - DNA, 607 bp, Homo Sapiens
gccgtatcgccggggcggcggccgtccacccgggcggtaccgacaggccgccgacggtgttggcctcaccgagccccgctgacgccagagttccgaatccacccgccgggttcgtgatgaccgggaatggcgatggcggcaccgcgcccgcccccggccaggactgcacaccggcccacccgctgacgatgtcatcggtgtggaaaccggtcagcgcgccggcaatgttgaagggaagagtcgtcgcaccgaagggggttaccacgccgagtccagcgacgctggcgggcccgttcagaaagaccgtgatcagatcgctctccacgcccagcacgtccgtcaccgacgggtcgacggcagttggccccactgcggttctggtcaacatgttgggtaccgccgagaacggttgctgggcaaccgcgttgcgtgtgctcccggcggcggtgccggtggcctgcgctacggctccggattggtcccgcccggggttggtggtctgatccggcttgactaacggtgtcagcgtgggcggcgacgccgtggaacccgcgtagccgaacatcggcttgggtgtacgcgcccacatctccgcatacttcgtctg

SEQ ID NO: 413847 - DNA, 239 bp, Homo Sapiens
aggtttgtagcggtgtgatcgtcacttagcactcatttattcgtgtattcatacatttatgcatgtttctttcacagatcaaactgttgagggtccacaaacaggctgaagacctcgtctggagggagactgcagtgaacccaagatcgttcaaataagcgcatcgacataacaagatttagaaaagaataagcacggtgctgtgagagcagctagcgggggctggactgggtccctgc

SEQ ID NO: 413848 - DNA, 518 bp, Homo Sapiens
gttatctatttgattctgagtgagacctgagtgttagctgttcttaccggagagcttcagccaccaatttgaacagctggtcagacaatcctttcatttccaggatctcagtgtctcacacttggttgctccacttgcgtgaggcggagctggggtttagtctaaacaaacagaaacaattcatcacactcattcacaaatgtcactcctttagctattgcccagccccaccattcttgactctctgccagttctacagccttgtgcttagtcagtccttggccaagcagcctgtgaggatggcccaggcagatcttggaactggtgctggtgattcagcaggaagaggctttctgtctcactccatccatcctcactctctgccctaatgagctgcccaaaggctgcagctgccctcctgacatctcagctggtgtggagggcctagggagaaattacccatatgctttctgtgcttgtcgatccctgaagtttcaattaaagatggtttcagatct

SEQ ID NO: 413849 - DNA, 544 bp, Homo Sapiens
  misc_feature (475)..(475): n is a, c, g, or t
tcattctcttttgtaagaggtcatcttctgattggaatatgtgaagtggcaatttagttttgttatcatggtaaaaataaacataaaagctaccattttacccactgttgactgtacggctcacggggactcagcacctccatatcgccgtgcagcctcctccaccatccacgtgaagaaccttttcatcttcccagacaaactgtccccatggagcggcaactccacacttccccagccccgtcctcggcacccaccattctgccttctgtctctctgcttttgactactctaagacacctcatccaagtggaagcatgccgtacttgtcctttggtgacagtttatttcacttagcataatgtccttcagctgcgtgcatcatcaggatttccttcctttttaagaatggattgtattccagcctgcagggaccacgctgtgttcatccgtttattcatggatgagcacctgngatggctccgccttttggctactgtgaataaaactgcttcagacataggtgtcaagatatctgagtccc

SEQ ID NO: 413850 - DNA, 446 bp, Homo Sapiens
aactttgcaaatctccaaacttttgctactttcttaataaaatacaacaaaatttttggcattccagccacggaaaaacagatctctacctctgaggtggcagtaatccaagcagttactaggatctacgaaacatgaggcataattagaatgttggggaaaaaatctacagaaatatctatatcttcgtcatgaacctgactgttgagtttatgaaaaagtggaaaaggaacctcactcgttccttccctggtaccttcacagcgtctcccgtcccagtctgcctagttgaatctagggacacttaaaggtaaatcctagcctcttggctgtccttccgtctcccaggattctgctaggccgcacagttggcaagcttaaaactccaaagattccgcactctccgtctttcaacagtcatgtcacagagacacgaaggttagcac

SEQ ID NO: 413851 - DNA, 175 bp, Homo Sapiens
ggcctcggctggtaacgccgccgagcctcatgaccgcagcgtgtgcggcatgcgctgtatcgttgttctgttacgtccgtatggaggcgtgaggcgcagacggacggcggggctgcgctctgctgtcgctctggaccgcaactctctggaccggcccagctactgcgactcctct

SEQ ID NO: 413852 - DNA, 190 bp, Homo Sapiens
cctagaacacggagcctggaaccttcgcgccttgcacctttggaggtgcattttgagggccctggactgccttccccttcagacgcctgatcggtgtgacccgaaagaattactggccttccacgcttacgggccgagcgccgggggcgcgcccaacctgctaatcttgcttgcctgcgcactactgcac

SEQ ID NO: 413853 - DNA, 244 bp, Homo Sapiens
  misc_feature (160)..(169): n is a, c, g, or t
aggaggcaaaaggaaggcaagggacaccccaaaaatcccccaaaggggaaggctgcaatttaacccgcttccccctaggcctttctggttcaaaccccctttctttggcaacaccaccccaacccccaaaacctttcctaaaggggggcttcacaaattnnnnnnnnnnatcaggagggaatggattttaggaggacacccacaccccctttaggccattattttccaggggggcccgagggca

SEQ ID NO: 413854 - DNA, 331 bp, Homo Sapiens
ttatgccggcgccaaggcggcactcaacgcgctgaccgaggcgtttgctttcgagtacggtcccaaggtgcgggtgaacacgatttcgccgggccgcttcctgaccgacgtctccaaggcctggagcgaggagcacaagctcaatccgacggccgcgttgaagcgcagcggccagccggaggagatcgtgacggcggcgctctatcttgcgtcgagcaagtcgagcttcaccacgggatctctggtgcgcgtcgacggcggtattgcctagcgtgacgcttcgagtgctgctgcaatgaatgaccaattcttgggaggaacctcatgaaga

SEQ ID NO: 413855 - DNA, 331 bp, Homo Sapiens
aacgtgtagacccaagtttcacttacaaaactgttcttagtggtctttggcatggggcagacaaaagcacaggacaactaagtccttctggaaaccctaaccctcaattccaagacatgtgtatatgtagttccatggtaaaacctgcagttacgtaccagtgagtctccaatagacaatgcctagcatcaagtggcactaagaaagtggtaaaaatctggaaaatcatataaagggagaaactttggcccatttacagttttcccaaatgttaaattagatatatgcaaaagttgaaaacaaaattttcccctcaaatataaggttacag

SEQ ID NO: 413856 - DNA, 157 bp, Homo Sapiens
actgttggggacggatcgctaaaatcgcacatgcaaataacaaacatcactccacctgatatggcgaggagcgttcaacgcgcagcctagacgtataatcatcctgctcccctaagatccctggtgagaataacgtcatgccactaatgagataaac

SEQ ID NO: 413857 - DNA, 349 bp, Homo Sapiens
  misc_feature (331)..(331): n is a, c, g, or t
gaagaaagcagggagtgaacggccttgtgagacgactccaggagcaaagggagactctcacaagacccaagtcctcctagagcacaggaaagtgtcgcttcaggtcgaagaagggagagaaagcagctttccgcatctgcatggttgtctagtggctaggattcggtgctgaaagcgccacggcccgggttcgattcccggtcagggaattgttttgcactggccgccctcccgcagaaatcttcctttaccacgctgtcagccggcctgctccaagggccagatgtagaacagcctccgcagcgaggggcaaacccgggcaaaggagggncaagtcgtggtgggccac

SEQ ID NO: 413858 - DNA, 157 bp, Homo Sapiens
aatctttgttaactttaatcaacacttatatgagaattacctgtaacctaataacaaaattaaaccaaaaatcacctatatattgaattgaacagaaatcagccaggaggatttggtgtataagttgtgtcactgaaaaagggggaaaaacaatccc

SEQ ID NO: 413859 - DNA, 282 bp, Homo Sapiens
cctttgaacaaattctaaatccttcttttggagaaactgaaatgcctccagatccttattaaaaatataagttaaagaaaatgtagaagtgtatgaatgagtactgtcattttaaagtcaccatccccaatactccaggaggacagggaattgtgcaaaatatcctggtaagtttctatcgactgctggaccatccatatactgtggaaggtgctggcagcatcaacgcggagacaccggacctctgcacccctgtgcaggcgagcacagcttcacgattca

SEQ ID NO: 413860 - DNA, 163 bp, Homo Sapiens
aaacggcttaagggaaattaatttccccacatcccaaaaggctttggaaaaacacataaaggaatacatttattttttcacaggatactacactgttccccagggggaagggagcagccatggggctcccaagctcctttacaaaagggggggttttaaaaac

SEQ ID NO: 413861 - DNA, 256 bp, Homo Sapiens
tttcaatttagaagtttattttgccaagattaaggacaagttggaaggaaaaaacacagaatcatataaacaatctgtggtctgtgcctttctccaaagacgatgctgaggtttaatatttaaaggggaagagtatgctgtctgagacacgtatggaagccaagagctccagggtcatcagacctgcgcaatccagcagaaacaggtttggagagagaaacagtcatgacacgaatctccaggaattgtctccctg

SEQ ID NO: 413862 - DNA, 154 bp, Homo Sapiens
aaggtatgctgtggttactggaacgcttcagctgcaccttccagcgtttcatgcccatctgaaagccattcatagcttgcattgctacttgtgcggagactggattgccgtacctaacacaacccaagcacttgctcagaatgtcctggtgttc

SEQ ID NO: 413863 - DNA, 141 bp, Homo Sapiens
gtgtgagcccagtcccatagttatactgagagaaatgagctcaacacatatcttgcatctgttctatccacagacctgcccccactgtctagggctgggagaagtaataagggaactgaacacacacgtgtaaaaacatgg

SEQ ID NO: 413864 - DNA, 213 bp, Homo Sapiens
gcggccgcctcgcctcttcgctgcgcgggaccgtggggtttgagagcggcgcctcctcgcggggccgaacccgccacccacagtggagtgtggactgacaccgcggcctcacggttcaaccaggaaagtccaaggcctgtccagcctgtgggagcccctaatgcccgtgcctggagtagtatctgggtgtgtggtgcgacagtgcccacactt

SEQ ID NO: 413865 - DNA, 183 bp, Homo Sapiens
aacctcgaacaaatcgtttatcttgctagtcacagcttagctatgccttgttattttccggggattccaaacttccagtccattccctctcgattcttccaccacatccagcatggagctgctgcttccagagatgtagtcgcctatctggggcaacatttagttttaaaaatggagccgcat

SEQ ID NO: 413866 - DNA, 191 bp, Homo Sapiens
tttttgacaattaacaaattagatttaattacagggaagaaaagcaacttttgtttttgcgagtgtttaggtatgacaatattaatagacagtggtcatgtggtgacgagtatgtgtgtgcccctccgagtctgcactacacaggcacatggcccagcgtcgctttaatctgggcacgactagagcgcatg

SEQ ID NO: 413867 - DNA, 162 bp, Homo Sapiens
aataactctttgggaatatttttcagatttcttagctcagaaccacataaaaacaggccacagactggacttagcttgccagccgtagtatgccaacaaaccagcatttagaagtctgatattttaaatatattataccaaaggcatcagaggtcacaacag

SEQ ID NO: 413868 - DNA, 212 bp, Homo Sapiens
  misc_feature (138)..(167): n is a, c, g, or t
gtattaaataagtattgccgattgtctcattttatctcctttattggcttattttttggattttaccagttttcccactgatgttctttttctattccagtatacacatacaatccaggatactgtgttgcatttagnnnnnnnnnnnnnnnnnnnnnnnnnnnnnngtagctccccagccctctggggatttcatatacgtgagatcatgc

SEQ ID NO: 413869 - DNA, 282 bp, Homo Sapiens
tttttgcctcccaagttattaactgaagagtcgttggtcacacagcatttcccatggtttggcttttgatggccaggtgcctgaagcacagccaaacatcgtcctctgtcctttccgttcctgcaaatcagtggttggatctggaagtcgaatgagatccctgttagaataggggcagaccagctcccgggcagtgtggctcttcctcccttcctgagatgtcagcaggccccagggccaccagcgcccagcttgtgaattcagatgtgctgagacgcttca

SEQ ID NO: 413870 - DNA, 360 bp, Homo Sapiens
ctattatattaatttagtgggcattttaaacaataatatgatgaaaccaacagtatgatgtaataggtatattttttctaatgaacactaaaataaatagataacagaattaccaaaatttaaaatgttagtccctgagcacctcctaaaactctcttgttaccacagatcttaagtgtccccagctttgagaaacatagcattacccaggggcaagacaatactagtcacgtatgacacgctcaagcagtgaacatggcatggaaataagttgtcttgtggagtcttcttacaagtcttagtttcacagcagaaaacactgaagctggagtcatgagacctggtttctgcccctggatt

SEQ ID NO: 413871 - DNA, 157 bp, Homo Sapiens
agatgatgtctactggcagttcctccaaacttttggggtgcacctgcatttgtactgtgcccaaaaagcacaaccgggagcgcaccaggatgttttgaccaccccggaacaaaccagcaaggaacaactggtgggggttttttgtatccggcacttt

SEQ ID NO: 413872 - DNA, 286 bp, Homo Sapiens
aagggaaactactaagactgcatcctcttcctcttactctcccaaaggaagagaagaaccaagaagcaataccaagagccagcttcacactcaggagagaccgctgcacctcttttttgtggtttctgatgctctctacatgtttagagaaacttctctagtaacgaactatagaaatcatcactgagaggatagtctttccagttgcttttaatacaaacagtctgattctcattttggtcaaagctgatttcagaatctggtgattcatttacaggatgtcctg

SEQ ID NO: 413873 - DNA, 169 bp, Homo Sapiens
ggtcataactagggccaccaaacaggtcctgtaaactcaggccttcaccacgcaggttcatgggagggagctgcaccagctcaccatataacttggggtaaccgaaggccatcgtcatgcgcgtatcaaataagctctgtaggtcgatgatggactgctgcgctgcctt

SEQ ID NO: 413874 - DNA, 210 bp, Homo Sapiens
caaaataaaattgcacgtcgcggggcgcctggctcgcgccggaccgtgtgtctcggccgtcgcctcccttcgaagccggtcggcaccttttcccccgcctgggctctgggcctccgcgctagccccagcgcgttcccttccgcgttgctgccactccgcacgcccaccgccagctcgctttcgttccggctctcaaacccactccctctc

SEQ ID NO: 413875 - DNA, 289 bp, Homo Sapiens
tgaccggaagacttagagccttctttcttgaaaataaacttttaacacgtttctacagaagcatgaggctaacatggctaatagctgtcagcttatctctgctactcacagaaaaggtaaattatgacatcgatctaacctgtgccttgaaatgaacagcattaaaacccctgttattaggttctttcatgaaagccaaagaaggaggcctatgaaggctcacaaactgggaggtggcctctgtatctttacgggaatgtctacatctatcccatagggggtccaagcg

SEQ ID NO: 413876 - DNA, 326 bp, Homo Sapiens
ctatttagtgtactaaggggaaaccaccaggtatgtagtgctgactgagtttttgagttttctgggatatgatttttagctattttactatgtaatatataaacaaaaaatgctaagtacccactactttaattcagtaactttgcttgtatttgcgtgacatctatatatcagtttctcatgaagaaaaactatcataaaaattttaaggtaaaatttaacacgaatattaggaaaaaacacactttcgcaatttggagtaaggtgaatgacacatcctttccttttctagtaatttctaaatttagaaattgagaaattttcta

SEQ ID NO: 413877 - DNA, 255 bp, Homo Sapiens
ctttcgatttatctacgatttctatcaggtttcacactcaggattattgcatcacatacaataatccatctcttagtctgtctgtttatatcagatcattttgcgtaaattttacccagctctcttttaaacaaggcttggtcataaaacccacactaggccagttagctgtctctggaatttgaatcttggaactaaaattagatggcactgacctaccctaatgggtggtatcccaaagagattgcccttgca

SEQ ID NO: 413878 - DNA, 346 bp, Homo Sapiens
aatagagacagtatatcatgggattttccaagctgaagcgcagcagcacaatgaataagctcactttaactcaactcctgggctcaagcgatccccctgccccaacctaccaagtatctgggaccactggcccacataccaccatgcccggccaatttattttctgtagagatagggtcccgctatgctgcccgggctagcctaaaactcgtggctccaagtatcttccctctttgacctccccaagcgctagggctacaggcacgagccaccgcgccaagaccaatttgattttctttgtatcaattaagaaacaagtatttattaagccttggcctacccgact

SEQ ID NO: 413879 - DNA, 421 bp, Homo Sapiens
attgctgacactgtctcttggggtttcttgaaaatggacctgccctggaagcatcaggagaggctgaggacaaaccacacagtctcctgggctcttgccccctaccagagcccaccctgtgccagaaggttcagtgtcccccttccatccctctggttgaacatggccttgcatgggccttctgtgtggagtgtcaaaggaaccacatgcttgcccctccagggtccatcccaggtgtggcccccgtgctgcagtcgctggtctttgctagcagaaagagtagaggacatggagcagatgaagggacaccagagggtaatgaggggacaccagagagtaatgaagggacatcagagggtggtgacaggacaccagaaggtgaggggacgccagagggcagtgaagggacaccggagagtat

SEQ ID NO: 413880 - DNA, 331 bp, Homo Sapiens
cgggccgtggcgctcacaccacaggcattacttaggtatgaggctggttgagcatttttctcgtgttcactggctactcacgcagctttgtgaatggcttcggagatcactggacaggcaattttccctctcaatgaaccaaatccaaattcttttggaacccaagaccgcgatttttcgatttaggacctagtcccaaacaatgaagaaaaggtgatcttcaagatttcagcagggaaatctgtatatctgtacaaggttgaaaacctgggccggggtcgcgttggaaccccacaggaaaaggcgcggaagccgcgggcatttccggggt

SEQ ID NO: 413881 - DNA, 315 bp, Homo Sapiens
  misc_feature (88)..(140): n is a, c, g, or t
ttttaagaaagaatgtttctatctttagtaaaagctatcattgtggtttcctgcaatgtatgcaaattaattctactcatttacttgnnnnnnnnnnnnnnnnnnnnnnnnnnnnnnnnnnnnnnnnnnnnnnnnnnnnnagagacaagtgtttcaccctgtcacccagggtgtgggtggagtgtagtggcttgatcatagctcactgcagctttaaactcctgggcacaaggaatcctcccaccccagcctctcaagtagtggggactacaggtgtgcaccaccatggtgcccagcttcttgtttctgctttag

SEQ ID NO: 413882 - DNA, 413 bp, Homo Sapiens
  misc_feature (345)..(345): n is a, c, g, or t
cacgttggtaaaaaccttgtaatttagagctctgatttgtaggggaagctggtctcccccaggcatcctgggcatctgctcaactgatgcccagaacagcccctcctccaaccccagaactccaacccccaacaaatatttgactttacaaaacactagttttctctgtacctgctggtgtgaatagatgagcctgcagcgtagctgacctctatacaggcccaaacccccaccttcacttgctgtatgtgtgtgtcccacactgccagctaggatggaggtaaacaactacagcagaaatgtttcctctgtggcaagcagaatttgagcctaaacatccctcanaaggtaatcgaaggggaaaaacctcatcttttccttggggggaagcagcagctgaatatgaaccaaga

SEQ ID NO: 413883 - DNA, 421 bp, Homo Sapiens
gggggcaatgacaaatacagtcagtgttaaatccagcaacctttgattaccaatggaaacagatgcacagactctgacggtcatgggaagggactgctgaacatagagaacacctttccaaaaagggtgctgcgtcagacagagctgtgtggtttacagggtcagtgtgagctgcctggctcctgaagcagggtttacggggagacaacatatatccccttctgtgtccaagcttgtgaggcctgtcagaaaaaaatccgctattttcatgaatatagaaaatgttctgcttctcactatatgaagacaccgtgcctaaaaatgccaagttttggccaccacagtgggctctgtcactgacagctgtgcacgctgtatcatgaaggccttaggctggacttctgatcaatgcttatgtatc

SEQ ID NO: 413884 - DNA, 102 bp, Homo Sapiens
ttttaacctgcacaatgggccatttatttattcttaagcaagttatcaataaaaaatttgatactaaaatgcctttacatagagtctgctgttcataaaacc

SEQ ID NO: 413885 - DNA, 103 bp, Homo Sapiens
ttactaacaaggagacttaaccaaattttgtttggggaagaaaacatgaaaaaggtccaaaaaaacccccctcaaggggcccggggggaaacagtcccccttt

SEQ ID NO: 413886 - DNA, 151 bp, Homo Sapiens
gtgacaccaaatagtcaacccgctcctcaccactgattgcgtgtctgagctcttcggcctctgcagtgcttactgctagacatgatgatgcctcgttttcgacaccagctcctgctgtcaagccgtctacactgaaacttctcctatgaat

SEQ ID NO: 413887 - DNA, 348 bp, Homo Sapiens
  misc_feature (206)..(233): n is a, c, g, or t
aactccatcttcaccattctcttattcttggggctccagctaccctggcttcctttgtcttgaatatgtatgtttttccacctctgcatatgctgtccctagaagaggcttatcaaagccacccctgcctccccgtattcaatcactacaccatcttcatttctgctataaaactcatgaccactggtagttcattgtttacttgnnnnnnnnnnnnnnnnnnnnnnnnnnnngtctgcccagggaccttcttgtctttattgatcactgtaccagcacagtgcccagcgtgttgcaggcactgcagagacacttgctgaatatatgcagaagaggacaagaagtagt

SEQ ID NO: 413888 - DNA, 355 bp, Homo Sapiens
ggaaagcagctacttcagtaagggtcttttatgaaacaactcagggtaaaaatctagctgttggggaggcccaggaaaatccccctgcctagtggcaggcagcagggcttgaaggccaaccagcctagcctggaaacaattactctatggcacaaaaataacaggaatgaggcagcagccatggactctgctcacaactcacaaccgtcacccttagctctccacacgcaacaggtttcttcctagtaagggtggagcaaaagattcacactgatgtactagaaaatcaaaacagttaacatttacaattacactccttccccctaagtacagactgcaaagccagacagagctg

SEQ ID NO: 413889 - DNA, 254 bp, Homo Sapiens
aaatatagggatattccttttaatgaaagagtgtgtaaatagccctgggtacatccaccaaaccaacgaaaaagcatgatggcggggctgcgtctgggtgggcctccataggccatgagtgcccaagctcataggaagtttgatacaaaattttttgacttgtaaataatgcaattgatctccctctcaaccaggaacattcgaaaggaggctgtagtacgtagtaaggatttgggggctcttttgaagtgatg

SEQ ID NO: 413890 - DNA, 249 bp, Homo Sapiens
gaaggggggttagcagttggtttatttccttccaatcacatacagatcatatctgatgggtaaagaatattccatactgtcaacagaccacactgtcttctaaaatcgcttcagcagtgaggatcctctggaatagatcttgttaatcctgaggaattattctcccagcggtgagctatgagaagtggaatcaccagatgtagtaattcctgacagaactgccgctgctttgtgtggctgagatgctga

SEQ ID NO: 413891 - DNA, 197 bp, Homo Sapiens
  misc_feature (44)..(55): n is a, c, g, or t
ccaagaagggggccctgcccttgaacttggaagaccccggggannnnnnnnnnnngaagcaggagggaaaaccagtacttgccgccggcccacatgtctttgaggggaatttgaccaagttgaaaccagaaggggcgcttttggtcgttctccaggggggccccttgaatcgctgttgggaaaaaaacatgcccgtc

SEQ ID NO: 413892 - DNA, 135 bp, Homo Sapiens
cacttcacgcgctcgcactgacgagctgcagtgactccgtggactatgttccactgctagctccacagagatgccgatggtgcgagccactttcttgcggatgacagacagcctgagctcatccaggctgaagcc

SEQ ID NO: 413893 - DNA, 100 bp, Homo Sapiens
cggaggctgttgaacgccggctatagcgcctggcaggctgagagggtgttggcggtaacagggtacacactgtcggggctcggaggctgctgtcgctcag

SEQ ID NO: 413894 - DNA, 232 bp, Homo Sapiens
gggcaacaatccccaaaaaaaccatcctcccgtccgcaaaaccctcccgcaacccctaaggcaattgggtaaccccgaaaactctgggcccaagaaaacatttatccggcttcgggaactctgcccctggtggcccaacccaaagggacccaccaaggatcaaaacctggaaccgctggggcatgaaccacccctgaacatcctccctagggagctcccaacctgggcgcac

SEQ ID NO: 413895 - DNA, 139 bp, Homo Sapiens
ccttcttccgtatgtggatttatatgattcctcttaccagtgctagggggaaggccctccatcccaatgcgaatcattttccgaagcttccccctttccggtgcttctccaatatctcctctccctgaatgggatacat

SEQ ID NO: 413896 - DNA, 274 bp, Homo Sapiens
ggtagactatggccggatgccgaatgcccgtcaagtgtagcttgtaatttggtgggaccatatggggagggaacctttacatggaagccttgacgggcaaacctgtggggttggggtgtatgaattctcctgcactgattgtgtacactggtaggcctttctgcggtacttaccatactaacccttgggggatttgtcctacggatccggacgatagagggttatacagggatatatcttgtgggtgctgatgccataggatatcactggttgg

SEQ ID NO: 413897 - DNA, 404 bp, Homo Sapiens
ctattctaagttttatcctcgagctcctccccccgtggctgagtcatggaccacacaggattctcggccttctcctaatctaaaaatttcttcatggacatgggagcaccgatgttactgctctgctctgcttgccacggaccgccacgaagtcattttggaaatcaaacgtgccatccaatacaacttaccgcactttgctgttggatctctgtgcggtacttgtgcagaaacaccctatgcacgttatgtatcaattaggctacatatgtcagggccaggatctttctgaataccaaccacaaacacccagcttaaactggttgtccagtctatacttgagtgtgagcgcctcatgcgtcaaggagctgatacttccccgttcctgcaccagcacgcaacga

SEQ ID NO: 413898 - DNA, 539 bp, Homo Sapiens
tccattttggaggctttacgtccatttatatttcagtaatgcccaaaatggtgttatttaactgaagtaaagtatactatgagttagtgtagtaatctatattaagttatttgcattacttcataaataaaaaattacccagtttatgtgttacggatgagatcactgtatttttgcctgattgcgattcacgcactgacttgtgaatgccaaagtcttttctttcacaattccatatccctagaatttgacttttaaagttgaaataatgagttaccaaaaagttatataaaagcataattagacaaatggctattttcaacttagcagttaaataagtatggtgagctatcctttcgatttgtcaaggggaacatcttaagatggatttttccaggttgatcttatgacttactcacttttgaaaatggtgctactctccagtaacaggaatgaagctacggaagtgtaaagcaatagcatatgttccagtgatatttaacatgtcccagttcatataacatatctccaatagcact

SEQ ID NO: 413899 - DNA, 479 bp, Homo Sapiens
cccatccaccagccttcatctttggcttcctctcttccctgtctatttaatcatgagctgtcacttcaacctctttttagcactctcaattccccccagctcactgtctcaaacacaaatcccaaccctggcaaggaaaaggcattatgggccaattggctttggagctacaggaaactgggtttgaaatctgattatacaatttacaaactgcaggagcttggcagtcagttgacatttctattttctcatctgtgaaactgagaaaggctggggctcacggtgggggaaggtggggtacagtgtgggggtaaaggattaacaataccaacaccttgtaggcctattgtaaggatgagaaataatgtatgttaagaccctggtgcagagtaggcactgaataagtaaatgaatagtagcaaaaaggaatcagtcaatgaatcaataaaactgctagccaactcactcaactgcattgc

SEQ ID NO: 413900 - DNA, 477 bp, Homo Sapiens
tcagtcagccacacatttattgagtaccagttgtgtgcaaagcactgttgggcatgaaaagcattaacccagtgaatgaggaggagcttgggttggggacggagccccagaattacatggcagaccagaagggaatcagctcagtagaagacacgcatgggctcgtgggcgacgcagtgtgtgctgtgtcatctggggctgggaggaagtgtcctgggtcaggagttccaggagcccaggaggagtggacgggtcagtgcagagccagcccgcattcaggggagaaaacacggccaaggccaggccttcacggggagcccagcgtgggctgcacatctgcactctccaggctagttttggtgcccacatgctctgcagggtctgggcactgtggcagcggcagcaggcttccctgttgctagtccagctgctgaaactccagggagagtcaaaaagttcccaaatacagaggcgtgg

SEQ ID NO: 413901 - DNA, 479 bp, Homo Sapiens
aaagggtagcaaccctttaatggatgttcaatacaataccgttcatatcacttatacaaactttctcagtacaattttgttcacaatcatgataatgctgaatgacaaagtgaggaagtgggattaacaaaaaagtaaaagcttccaaaccagccagagctaaagtcaaattaaggctctgctcttgccagccactccaaccttaaagaagttatgttattatcatggataaatttttacacaagattgtaaaaattaaacgttaaggataaaagcccacaacacgtgactgatattcctcaaatattaatttcactatttgggacccctaaataaatgcattttccaggtgttctgaacacctaggttatagctgctcagcatgtaagcccctatgataacttgagccctttcccctttccttccccagtggtgaagggagaatgacattccttctccctgcccactggctcaagtgt

SEQ ID NO: 413902 - DNA, 448 bp, Homo Sapiens
  misc_feature (51)..(85): n is a, c, g, or t
  misc_feature (138)..(158): n is a, c, g, or t
  misc_feature (213)..(213): n is a, c, g, or t
  misc_feature (347)..(360): n is a, c, g, or t
  misc_feature (364)..(364): n is a, c, g, or t
  misc_feature (366)..(366): n is a, c, g, or t
aaaagcctgtttgtttataaatttttgcctgttttggccccccatcccctnnnnnnnnnnnnnnnnnnnnnnnnnnnnnnnnnnnaacgggacagttgggtaaaaatccaaaatacaattttgactttaaacaacctnnnnnnnnnnnnnnnnnnnnnttgggaacccccaaccaaaccacaggacacggggttgggggaagggaaattggcnggccagggggacccttctaaccaaaggggctgcccaaacccaaccccttttgtcctattggggttttgggggccaacccaccagtgcccaaaaccggaaggttgccctgcctccccaaaaccacccctgccctnnnnnnnnnnnnnncggntngcccaactcctccagggcctatagaaaacaaaggggtcctttggttgtggagggtccgaccctggcagcaaggaagaggggg

SEQ ID NO: 413903 - DNA, 449 bp, Homo Sapiens
  misc_feature (269)..(382): n is a, c, g, or t
atgggtgtgagccacccaccacacctggcctttaaatgcttattaactacaatttagcctcaaatcccaaacttactcccaaatgttttccttaagacaacccatgaagcatcagccaaaatgtaattttgatcagaaaaattcaatgcaaagaaaggcgctaatgtatgcaactactaacatctgacacacagagaatcacagactaccaaatgagactagctttacttttactggtgagatgaccctggacaagtaaccaaactgtnnnnnnnnnnnnnnnnnnnnnnnnnnnnnnnnnnnnnnnnnnnnnnnnnnnnnnnnnnnnnnnnnnnnnnnnnnnnnnnnnnnnnnnnnnnnnnnnnnnnnnnnnnnnnnnnnntcattacctattagctatcatcatcatgatgtcatatatcattttaaagattagaaaattgatatac

SEQ ID NO: 413904 - DNA, 533 bp, Homo Sapiens
  misc_feature (475)..(475): n is a, c, g, or t
gagtcttcaaaggcgtgtttaatataaactaaaattttccatctttccctggcacaaacaaggatatttttgtttgaaaacaaatgtcctttgtgctctgggtagagctgaaatcccaagtttcaacagcagaggagaatacagcttcatgtgccaggggctctcaaatccttgtcccccgcacctcttgcttctccagcacgtcggcccctcaccacacagctcccaggcccatacgggtgctgaccctgcccttccctcggctggaccaaacgctgctttccagggagagaggggaggtccttgcctgtggaacttcctatttctccatttctagaagtgccccgcacaggcagtggggccagaaaggcaccaaggcctcaatgacggggggcctgggagggccgagatgggaggttgtgttccctgagttctgagacccacagaagacgaccaggaccagggactgcggttntggaaaatgtagaagggctgtgagtggtgattttcattgatcctggtcccatctgata

SEQ ID NO: 413905 - DNA, 480 bp, Homo Sapiens
ggaataatctaaagttattatttccaaaactttgttaccattggatagcatgatccacccatcatctgaaaaacaatactttttattctttgaatagcaagaatagtaattttaaaacagtacaaaatgtcttttgacatacactagaaaagtaaaacataacatttttggaaactctcatggctgttagggtaaaaatcatgggtcagggaggagggtggttaagagagttgaactccatgaattaccagtggagttcatggatatttcagacagccttcaaattgtgatggagttataaacagtatgggactacacagtgatgaaacccggacatgaatccttttgacggttatcttttgacaaaaaacttctcaataagagaccattttccatctgtagaagttataattcctgcccactgcacagaaaatagtaacacacttaatctataaagtgctatatacatgttagatattt

SEQ ID NO: 413906 - DNA, 473 bp, Homo Sapiens
  misc_feature (399)..(399): n is a, c, g, or t
taattttaaaactcaactttattccacagattgttattcttgaaattcttcagatgttcaaattacggactatttgtttaaacacaacacacatgcacagtgagtacctactatatgaggctatatgaggtactattttaagcactttacaagtaataacatatttaataaacattaaaatctcatgagttatcacatgatgttccccaatttccagatagaaaaactgagacacggagacttgaaatgacttgtcaagttcaccctaataatgctcagctgctctaatgtatttgatcttaactttcactttatccctgattttcttgtgcacaaagcacacaccatggcttcagtttttccccactgagggtttccaaacaattggactatctgctnttccaaacatgccctaatgtctgtacttcttgtattggtggaagctaccttcatgctaggaaaatccttttact

SEQ ID NO: 413907 - DNA, 516 bp, Homo Sapiens
taagaagtagaaatactgatgattttactgagcagtgactggtatctgtagatgattacctacatatgtgatggaggggaaaggaaaggatttgtgataacaaaaatcagcctacttttggattctgaataaatagtggtgctgtttttgacaaaggaattgaaggagaaggcgggtgcttagtacgtagttaggcatttggcttgggcatggtgagtttgaggtgcttaagatggaaatacgggtatgattcttatgagagagatcataccaggagatgtcagtatggcagttaatggcatatatatcaaatctgaatctattggaataagtacaatcatcaagggacaccgtgtaatgtgagaagagcagatgaaagagattagaacgctaagggtcaccaacatttaaaagtcatttgaggaaaaaggagctagggaaggagactgaattccatctcttctgcagaatgagtgctgggagtggtgtgggaaaaaggcgtggatgattcacatg

SEQ ID NO: 413908 - DNA, 130 bp, Homo Sapiens
atgtttgaacacactctttttcgtgctgggaaggtccctttgggggaagaggtatgttttccgtaggatgagattccttcagattaggccggccaaactgttccactgccgacaggtctggcgtatcact

SEQ ID NO: 413909 - DNA, 421 bp, Homo Sapiens
  misc_feature (130)..(244): n is a, c, g, or t
gaagaagcgtatgaatgtcctcaagaccagccccgagaagccactaggccggcgtgtcatcccaggaaggtcacggttaagcaggggcagcgcccgtagcagctgccagctctggagtgagatgtcatgnnnnnnnnnnnnnnnnnnnnnnnnnnnnnnnnnnnnnnnnnnnnnnnnnnnnnnnnnnnnnnnnnnnnnnnnnnnnnnnnnnnnnnnnnnnnnnnnnnnnnnnnnnnnnnnnnnncaacaacctgtgaaaagcaccgacgtggggaatttcccagggtaggggcccaataaatacgacttctcttcctcttccttcctgcaggaagtcccgtggatgtctctgcgattcctcatgctagatacagccagcgcctgttgtgtggtctgcaagtcaactctctcccctggctgt

SEQ ID NO: 413910 - DNA, 465 bp, Homo Sapiens
cattcacaaaggtggaaaatgcacaaccactacttcctggctgggggatactacttcaaagtggcccgcattccttccttctactgcttgcgccttactttgcaaatgcttgggtttccagagaaaaaagcctgaggggcaatgaaagaaacaggagccagttttgatgctttggctttcaaagtgcagtttggccaatacgaggctgtagacagattattcatacttattctgttccacattgcctcaatagctattatgttcacaatggactatttctttttcgatgttagtgtatccagggagcttccatattgcagaatccctcccattctttacaaaattccaagattgtaaggtagcatatctttaaagttggaaggaaagatggctggagatgggctcaggatgtagcagagttcagcttgatgaattgtttgtaaacagactattaaagcctatttt

SEQ ID NO: 413911 - DNA, 393 bp, Homo Sapiens
  misc_feature (142)..(326): n is a, c, g, or t
tttccgctcatactccagggctgctgaatagtacaggagaaaatcacataagcagaaggcttggcattactttcatggtctccagcctcagtttggggaagcagaaagaccacagactttggacacaaacagatctggtttnnnnnnnnnnnnnnnnnnnnnnnnnnnnnnnnnnnnnnnnnnnnnnnnnnnnnnnnnnnnnnnnnnnnnnnnnnnnnnnnnnnnnnnnnnnnnnnnnnnnnnnnnnnnnnnnnnnnnnnnnnnnnnnnnnnnnnnnnnnnnnnnnnnnnnnnnnnnnnnnnnnnnnnnnnnnnnnnnnnnnnnnnaaggctcctttttttcttctgttctccaaacgaaaccctggtttccccaaccaaatatccaaggatt

SEQ ID NO: 413912 - DNA, 336 bp, Homo Sapiens
tgtggaaaaggctttttttgcacgggagcaagaatttaatcgaaaaggcccaataccttgtcatcatctgactcttcagactcctccctcttttgattgttctttttctctgctgcagcaagggcagaacccacaacagggggctgcaaacctcgggcaccaaaaaccggtaccgccccaccagcaggtacacctggcaagcttgccaaatccctcggcaaatgacgtttcaaatgtttttccattcagcttactgataaccttgttgagccgggcgtagtaccgcctgatacccacactggccaaaaactttttgatgttccttggcgctggggg

SEQ ID NO: 413913 - DNA, 180 bp, Homo Sapiens
ccccacccgaaggttgtggtggtcgggcctaaaacacagggtgcggtgggttcccgggtggaaccagcgcaaacaacgtgggtcccttcggcttttaggagaaggtggatttgctccaccccacatgggcccctttcttgtttaaattgttgattaataccctgtccggattgatgcgca

SEQ ID NO: 413914 - DNA, 479 bp, Homo Sapiens
ttttacaaatcaggctaaaggataatttagcaagcattcctgatacaagcagctaagtgctcaaatctaataggtttatctggattttccatttgaagcacactttaaagagatagtgggatatggaagattcaaatacatctgactagcacagggataatacaactttggggacaggaaaaccaaactcttcctggtatactcctagtatcaacctctgaaattcacaaataagtgtctccctatattttacagcccgtttcaaaatggtctcaggatctcaatatgaaaaagatacttttctgtcctaaaatcatctgcatatgtgagcattgctcaggtaccctgccttgtgggctgaggctctccccagattgactgggaagctagagaccagtatggtcccagtaatacttgccactttatgtacactatcaaaacagaaagcatatatgtgtaaaaagcctgcgagggaatga

SEQ ID NO: 413915 - DNA, 458 bp, Homo Sapiens
aacattcatagcaaactggttacctttatttcctgaaagttaaattttgaaagaaagggataccaagtgagaaagcaaccttcagttaaacaaaggggtacatcaagtttgatactcttggattaaaaatcaggtgacaattggaacatggaggagaaattcatgattatagaaaccatgaagccaatcttttttacaacaaagctgcttgtttttttcttaatcatgtagtggctgctatcaggccagttctggaacttcactgagtccctctgctcttctgaatcagctcttgattggtggtgacttctcggaagttcttatccctaccctccaccttctgctccagggtggcacgactcaaacctgccctacggcccattagctccattccatgaagttcctatccagtaccaggcacgtttcttctgcgtctgtctggctcgcgtgtttctttc

SEQ ID NO: 413916 - DNA, 327 bp, Homo Sapiens
agaatgcactttatagatggcatgtgaaagtttcaaaggaatttctttctgcactttaaaatgtcctgtctgctaggtcctgaaagacagctcccagggggaaccctgccttcattgcttgtggtttggttgctcgatttctgggaacattccccactatcagttccaaagacatgttcagggcccccaagagctgagcatgggcatcaaacaagagccctgcattcttgttagggtttccccacccgctgtgggtaataggactattatgactgtttagcagtaacttgttatggaaggcctaaaatccatgtggacagacctggg

SEQ ID NO: 413917 - DNA, 471 bp, Homo Sapiens
aaattacacaaccaaagttcttatgtcttcaataaagttgtttgttattaggtattaagaaaaatcaggaaattccacttcaaggtggtgatcaactgggactgctgctaaggggaagtaacacttctctaattgtatcatataagggcttttctcttttaaagagtaacacattggattttcagcacagttaagagaaagcagatacctctaaacattggttccacccttgaagagaaagtataaaagatccagaacccctcggtttgtgtataggaaaactgcaggcacttaatccagatgccctgccagcagggatggtgaggagagactctgctctaccacagaaaatgtcagatgtagggttctgtcttacaagtgctttctgtgaataatttgtttcccagaaaaatatcagcatatggataataaaataagcatgtgccctcatgtcagcatgaatatagcttt

SEQ ID NO: 413918 - DNA, 178 bp, Homo Sapiens
acacccatggcctttcacgatcctcgcgccccgtccttcccggcagaacaacgcctgcaacaggggcctccaccccttcatccccgagtaccggcacagacgcgagcgcaacaacatcaccgcgctcactagccgcgacactgccaagcggcgcaaccaatagatgcatcccacgctt

SEQ ID NO: 413919 - DNA, 106 bp, Homo Sapiens
tcatgtggccaggcccggacggaccggacatgctttcttcgccaccttgccaccttttgagatcccagttcatcatgcccccctcggacgtgccctgccttgactg

SEQ ID NO: 413920 - DNA, 429 bp, Homo Sapiens
gtcgaagtcgtcgagattcatccgcagtgcattaagcaggccaccctctcgcggctcatttgcgacggcgaagtcggtgggcttccaccgtgacgctaactcccagaagagctctggtgttctagggtgcccggccggagtgatcaggttggcgtcgcggaacgcggcaatcgtgtcggataccgagctgggggcgcggtcgatctgcgtggcgaggggacgaatggagaccacgcggtcgggtgtgagcagcatggctgacgctaattcgatgccaacttgaccggcgaacggttcgcgccggcgtggcgcgcgcatggcagccggcacgttcgcgtctaccagcagtccattggcggcgagccgtaggtggccgcgagtgtccaaccagctccagccggcagcgcggagctcttcgcgcgcatcggc

SEQ ID NO: 413921 - DNA, 343 bp, Homo Sapiens
cggccgcctggtgcagtaccgcggcgagtgttcaggccatgctcggccagagcaccgaagagcttggggtgccccatgccttccaacctgggcaagctgcgtaagcgggtcctccgcgatgccgatgaccctgcaaaacgccctggcagtgtaccatgccggggccccccaaggcgcccaacgcgggcttaacgccattcccgagcgcctggggcccttgtggaacaggcccccgtgcgggccgccactgttgggctccttggcgggcagccgctacaggagcgggccaagcctggggcgagcggttgcgcgcgtgattgaagagatgggcatccggacccgc

SEQ ID NO: 413922 - DNA, 437 bp, Homo Sapiens
  misc_feature (320)..(381): n is a, c, g, or t
agccttatctgtactttacacagctgacatgtattaaactaaaagaaaacatgtatcaagggtattttttaaaactagcagagattcctggcactcaaggcaaaaaagaaaacactaagaagcatctcctatacccgttcctcaaaagcagcggtttttctcaggactagagttttacacgtaggacactgagggatgtcactgaaaatgccctgcgactgtttctccataaatgcagacatggcatgtcacgggtgtgctctaaatgttcactgagtaaatgaacaagtgatcaaacatcaaagctgttcctctagagnnnnnnnnnnnnnnnnnnnnnnnnnnnnnnnnnnnnnnnnnnnnnnnnnnnnnnnnnnnnnnttgtgtttcctgtcaaggccagggtttttttcgtaattgtcagggccgggggtgcc

SEQ ID NO: 413923 - DNA, 130 bp, Homo Sapiens
taatgaactggtaattctttttgatgtcgaaagcgagcacatatttgtacatgattgtggcacgacactggcaatagacatttacctgcttttttcagaactgcacctcaatccagaacatctcttgctg

SEQ ID NO: 413924 - DNA, 235 bp, Homo Sapiens
gaatatatcaaccccaccatatttattaagctatcatataccgtcctgactggaaatatactctgtatcacaactctaactataaccatccttacagataatactacatttatctctccgtcatccaacagtcattaaattacaacagaatctcatatccaagataactttgccatacctatctaatcaccttcaacgtatccctttaatctaacattttgaacttcatcaacat

SEQ ID NO: 413925 - DNA, 175 bp, Homo Sapiens
cctttcagtcctggcaaatgcataaaccccactcccaggacaggtggtgcctccttttatcgtctgtgaagagggacacctccaaataggggccccgcaccaacacaccccttgtggcttccttcaccggagtcacaaacttatacttctgggcgctcgggccataactgtccac

SEQ ID NO: 413926 - DNA, 112 bp, Homo Sapiens
gttcatttacaactgccatattaagagcttcagccatcagctgttgaaattggaacgcataaaaagtttgaccttgttgaagggaatatctgccctcgtattccgcttccat

SEQ ID NO: 413927 - DNA, 193 bp, Homo Sapiens
tattggttgatagctttattttttttaaatgacagttacaagtgcttttcccttgatgggcaatgacgtaactattttcagttattagtaatgccttaaaaagtaacagcattttgtctaaactgaacttatataattgcacaaaagtcatggaaagcattaagaaatgctggtaaagattgaagttttctca

SEQ ID NO: 413928 - DNA, 280 bp, Homo Sapiens
  misc_feature (114)..(199): n is a, c, g, or t
agtaatggcagcaccgatttcattgctgacataatgacccaaggacagtcttaacagaacgattgcctcatttgtgtgatggggacaaacctgggaagcaccttcaggactccnnnnnnnnnnnnnnnnnnnnnnnnnnnnnnnnnnnnnnnnnnnnnnnnnnnnnnnnnnnnnnnnnnnnnnnnnnnnnnnnnnnnnnattgctattgttaatattagacttcttttgacttattttcaaaccaagacatgtcaaattctctccatctcactctttgga

SEQ ID NO: 413929 - DNA, 425 bp, Homo Sapiens
  misc_feature (330)..(330): n is a, c, g, or t
  misc_feature (344)..(344): n is a, c, g, or t
aaatttagtctgtccctaactgcttcagtacttttccttttgtctctaacccaagatcctaccaaatccaaagccaaaaatcaatttatctggcctctgggaagccagaaggcttaggttttgctctaggcagttatctagagcaaatgattttacaaaccttctcattctctaactaaaacaaggactgaatataaacatgaatgaggtaaagttcattaagcccacatcaggaacaatattcctgagtctccagtgagagctcaccactccctagacctaacccaaagataattccatatcaacaaagagttatcatatacaacattnagtgtgtccggagnttggttggatttcaggcccaagagagccttcactatacttttgggaaaagagtagagcacaatagaacctgactagagcag

SEQ ID NO: 413930 - DNA, 288 bp, Homo Sapiens
atcctatgaaaacacaggaaacattaattgaacatcttctgtgtgctagttttgtcagtattggtgtcatgaaataattataaggacttgaattagacatttaagaagtccagggttaacatcttcacaactaatttaaaagaaacatatggtaatagctcccataagagagatgtataaactggggtagatctgaaaaggttttcccaagaaagtaatgcttaaacgagggcatgataatgaataatatgattctgaaacacaagaaagacctatataagaaaatta

SEQ ID NO: 413931 - DNA, 519 bp, Homo Sapiens
  misc_feature (507)..(507): n is a, c, g, or t
tcaccatttaaacctgtttattttataaacaacggggaaatgtagggcttgggctagttggggaaggactgagccaagaagccgaatctgttctagacggaggtgggaaggggcctaacggtcagggctcaaagaagcggtttcgccttcttttccgcggagggatccagacacgaccgcgtcctgaggcggttctgaaaagccgggccccttaaacctctgcgtcgggggctgcctcccgacagttgccgtagggaaatgcaggtgctgggaggcctgccgagctaacccgccccaccccgcggcggcctggcggctccctccaatcccaatcctggggggccgtgagcgagcagccctagtggcaccctgaagccggaaccttcgccccagcccctcggggtcagcccttgtccaaagccacgctatgaaatacagattcgcgaaacccggggcacttagaggcccgtctggaacacgaaggtggggcatggaaaggaggattcngacgtgggtggg

SEQ ID NO: 413932 - DNA, 525 bp, Homo Sapiens
  misc_feature (375)..(414): n is a, c, g, or t
cagtttaccactatattaaggctttacaaattaaaataaaatagtggtactgtgaattatgtagactaaatttgcctcagttaacacaatttactgaagctagctacatgatatatacttggtttaaccatattttgtgaagaacaatcaaagaaataccttgcattgcaacagtttgatgttaaagtatttgacagttttcttaaaagccaacagttttggttgcccagacattacaccattcagtttatgtgaatccatgtgcaagtgaactaagactgaaggcaacagaatgaaaacagtaatcccttcactttatatcagaaccattaaaaaagcattggagagaaataaccaacccatatctgaagtttnnnnnnnnnnnnnnnnnnnnnnnnnnnnnnnnnnnnnnnntgcaaaattgttggaccaacactttaaaatggacacatacatcaatttgacaaagcatatttggaaagaaaagttacccatatttgacaggccttaaacaacattttggat

SEQ ID NO: 413933 - DNA, 550 bp, Homo Sapiens
atgcctgcagagtatttaccacttgctaagtggatggagtcagtaatttcaataacattgggccatcacaggtggggtcacaggattcaggttgtagtaattcaccgagaggcaccattcattctttccaagcctggctgatggaggcctgaggtccctgcaggtgaaagcccaaattctgacactcaagcctggcaggcagggttcctttgtgctcccagcagctcaaacagggaaaagagagcccacacttaacagtgacaccaccttcctcaggctgcccgcctgccgctaccactgatgcgagggaagggccaatgctggagaccccatgtggggatcttggacactctgggaggtgtcccaccctcatggctgagcccatccttcctgagggaagacagtggcagccacaggaatggtggccatttccaggggctttgccctctgctcaccttgtgtccaacctctcaggatgctgtggagttgcaccttctgcaggatgaagaggtcttcaggaagccaacagtgccatcatgtatctaagacc

SEQ ID NO: 413934 - DNA, 117 bp, Homo Sapiens
cacgcaaaggatatcaaaggaaaattttgcagggtgaaggtttgcaggggaaattttgtaggtgaaaaggcccacttttcaccagacagttacggcatgcttctaatgaagtcagag

SEQ ID NO: 413935 - DNA, 710 bp, Homo Sapiens
  misc_feature (288)..(288): n is a, c, g, or t
  misc_feature (367)..(367): n is a, c, g, or t
  misc_feature (369)..(369): n is a, c, g, or t
  misc_feature (386)..(386): n is a, c, g, or t
  misc_feature (390)..(390): n is a, c, g, or t
  misc_feature (423)..(423): n is a, c, g, or t
  misc_feature (425)..(426): n is a, c, g, or t
  misc_feature (440)..(443): n is a, c, g, or t
  misc_feature (446)..(446): n is a, c, g, or t
  misc_feature (466)..(468): n is a, c, g, or t
  misc_feature (479)..(479): n is a, c, g, or t
  misc_feature (524)..(526): n is a, c, g, or t
  misc_feature (575)..(575): n is a, c, g, or t
  misc_feature (599)..(599): n is a, c, g, or t
  misc_feature (623)..(624): n is a, c, g, or t
  misc_feature (632)..(632): n is a, c, g, or t
  misc_feature (637)..(637): n is a, c, g, or t
  misc_feature (645)..(645): n is a, c, g, or t
ggtaagcattgagtatatcgtttatcagttggggtgtttatttttttcacccaagagagaaatttttacttttaaaatttccgttgttttgggggtggggaacgctaaatgtttttgattagacctctgattccggaaatctcacagacttacagatttgacaatcctatttcaggaaactgttgaagcatcaatgatagttctttgcagagttttgatagacttctcattcaattcaacatgtcaccttcaagtttctctaaattttcctctgaatccatccctaanaaagttaaggaatgtcaccttcttaaggtgtgacattctttaagtagtagaaacgcaccctcacatgcccagagttatntnccggatcaaagcttacncatntggtgcatccttgggggttttccccactaacanannaggtgggctatatnnnnttnttactttaatgctatgtggnnngagatcttgcnttagggacaaagcagacactcaaatatttagtgattatggtattnnnaaagcaaacacatttcaaggccttggtattactttcatatttatggatntaaatataaatatgtgaatggggntggaatttttagatttatggctgnnttgtgggnttttnaaaaaagnaaccttcccttctttaatctcagccacttttgctgactggcagggttttttcccgggggccttta

SEQ ID NO: 413936 - DNA, 103 bp, Homo Sapiens
ctgacttttcctcgccaccttggatcttcatgggcggttgaggggtactagtgttatcacctatgccccgaccctggtctctacacccatgggagcagaccct

SEQ ID NO: 413937 - DNA, 112 bp, Homo Sapiens
cagccatggagcccttgtccttgatgaggcagactaggaggtgcagcgtacctcacagcatggaggacaggctgaacgcccagcctatgggactacaccaccacgggtacac

SEQ ID NO: 413938 - DNA, 147 bp, Homo Sapiens
agaatggaatgatcgtgactgacccattctaccaagggccccgaagatgctctatgttacaaacctggccagttaacctgtctgtcaccttgataaccccggccacgttcatctggttggaagcgtggtccttgccaccgatgatgc

SEQ ID NO: 413939 - DNA, 370 bp, Homo Sapiens
aatgtaactcaaaatcagggcacattttcccatttccttcatgggcttatcttctagtttcagatctatctgtagattcacacccagtcacagtgtaaataacccctggctttactccagcattcagacccttaggcttcatcaggcaccattgtctctacctggaatatgtttccagctctctccaatctggcctgcccttctgttacccacactgaattctgactaacacaggtgcttactgcggctaaaatgaatccatgttcgaattctggctctgaaacagacaactaggcaggttcaagttaatttatctgttaaagcccctgagagttaattcacctttttagatctttgagggtttattaat

SEQ ID NO: 413940 - DNA, 247 bp, Homo Sapiens
gcgcatttttgtgtggctggccgaggtttttatcgcgctcgccacaatgctttttgggcatgggaccctaagcccctcacgggacccctggggcccctgggtctggggaggaagcttctgtgccactggccaggacccaaccggcttccgccctggagctggggccgtcactgccccggtggatatatgcgagcttacgggtccgagctgcctactcataatgatgctccaatagcaggatgcccgc

SEQ ID NO: 413941 - DNA, 420 bp, Homo Sapiens
ctactgaaatcagatcatgggaggcttttgcttaaatgcatgtcgcaaatgtctctccaagactgggacatttatccactgcttgatgaaggctgccctcagggcactgatgccccaacacatgcacgagctgagtgtgctcccacggcagagcaccccacgagcacctgaggcagggcactgtccacatgcggggactgtcccatgttcacggcagctgcagttggaagggagccaggaggatgccgtgtgaggaccactgcctcaaggcagcctgtaggtaacttctggactcagaacaagttctccggatgatttcttcacacgacggggtgcagaaccatgccgatgatgggataaattccaaagctctccacatgacatacagtaaccttcacaaatggtccccacctcgctctc

SEQ ID NO: 413942 - DNA, 436 bp, Homo Sapiens
tcgtttattaaactgtttattatgaaaaccttcaacatacaataacgtcattccattatttcttgactgggaattccatcagggcagaggcctttgatttttcaccggctgccaggacctcagcaaccccagggaatgtttccaaagaatcaattaatggcacgagggcttctccggggcctgcctcaggtcccctcgcggtgctcagcacagtcctgggagccgtttgccgactcaaggcgcctgtcctggtttctcccgccaggcccggccttcccccgtacactcacgcggcaacccccaggcgcgggtttggacagggcttccagaatgggaggagccctgacttccaattgtacaaagttttcctgggagcccgccggtcccagccccacccgggccagagaccgccttacagactaggcctctctgccgc

SEQ ID NO: 413943 - DNA, 174 bp, Homo Sapiens
aagtttttccaaatgcctacttaaaaaggtgggggacccctttgggggggtttttacattctccctcctaaaaaaattttttcatggcaaattcagtctgttttaattttttggggaaatttcagggccaataattttttggcctttggttaaaaacccctttcccagggaatt

SEQ ID NO: 413944 - DNA, 390 bp, Homo Sapiens
  misc_feature (178)..(178): n is a, c, g, or t
cgggggcaccaaaaatttttattttgttgccaaggggcaaaaaccccccttggaaggcccaaggacctaaagggcccacccctgccggccccaaaactgtctgttcaggctgggcaaaaacccccaaaccctcccctgcccacaaagggggtaaccctgtgccccacaatgtgctcanctccaaaaaggccccaccaacctaaggagggctgggctgggggtctaaatttctttcctttgggcttaaacctgcccagggggttctgggactttgctcttttggccttcctacaaaaggaaaacagctttttcccctttttgggagggcgtcccagcccccggaaagcaggaggaaccagttattcaggaacatggcccagggggggcttc

SEQ ID NO: 413945 - DNA, 340 bp, Homo Sapiens
atattcgactaaaattttggtctggtttggggaaccctgaaaacacatttatgttattattctcccacaaggccaatgtttttaaaaatgtaattgtatgtactcccctactgaaacaacccttggctctattaacttactgcaaaatccaacttttacttgtaagaatctgagtcattttctcaatgtatctttcaaaagccttcttgcccctattaaataagtccgggtttccaaacattggctctaccagagacacaacatattccattgaattgaatgactgcggcaccacttggctctattctttgaatacaggcaagaaggatgctactgctgg

SEQ ID NO: 413946 - DNA, 354 bp, Homo Sapiens
attgtttttaatcaaatataatcaaacataattgaaaataaatggagacattacattcagaaatgaaacacaggaaactcaaaacttcctgggaggaggaaggtgcttattctcaccttcctgaaagccctgggtgagaccagtcactgcagcagaggaagaagctcctatctagttggactggacaaaagcatagtagctgtgaggctacaagataagggtcagtaacagcaggaacaaaggtgcttgccaaacaaatcgcatctcatactgactcaatatacaaagtaggggaattgaacatcagagaacaatctcacccatgacagtctgcattagctctctggtaaagac

SEQ ID NO: 413947 - DNA, 163 bp, Homo Sapiens
ggcagacacattcggaggccaccatgtaaggcacgtagatcacgctgattcactcctacgacatgctgatgagcagctagccctagtatgcagttggcacacaaaatggtgggctcttcgaggattatctactggatttcatagtaattatcagaaccacatg

SEQ ID NO: 413948 - DNA, 395 bp, Homo Sapiens
gcccgcctcgcatacctacataaggcagccggggcgactggcgcggcgaggcccccgatgaacagggcgggctggacggggctaagagcggcacttggtgttcgggagaggctagtccgaaccgcgctccctcccctccagagggctccgtggaaaacgcgcgagccagctggcggcgtgtgcacgtggtgctgggcttgggaatattcacagtctccctagttagtaaaagggacaggcggggcgtatgtcctttccaagacaaatgcaaagcaccagtgacggatttcatgctatgtgtccgacattgagctttcaagtataactcctaaaaaaccagaactgtgaaccacgctagacctaaattccccattctcaggagactgacggaaacc

SEQ ID NO: 413949 - DNA, 152 bp, Homo Sapiens
gaaaagaatattcacattataggagatgagcagtcaaaatcaaatgaaagtttggtaagaaggaacagcaagaaaagagtgctgggcagaaggttgagatttttggttttattaccaaggtaggcagactacagcattaaaaggaagaagag

SEQ ID NO: 413950 - DNA, 327 bp, Homo Sapiens
  misc_feature (246)..(254): n is a, c, g, or t
attttttattcaagttttttaagggttgttaattcccccttttgaagggggggatttatttccaccaaaatggaaaactttaaaatgtcccctttaaactgttaaaaaacaaattggggggggaaaatccaacaaaattccattttaaattttgagggttgcccccttgtgattccaatcccccaaacccttccaaccttttggctgggcctccggaaacctttttcttcctttggggcaggggcnnnnnnnnnccccaccccaaaaaggaataattcctgattttttggtttcttcccttcccccttttcccccccaaaatggccc

SEQ ID NO: 413951 - DNA, 409 bp, Homo Sapiens
tttttagactgttataaatcctctttaatagtcttagaatcttgagtgtgttttacagaatggtgcacacaaagccccctcccctctccccctacaaggcacagcctcacccaccccactccccaggggccagaggaccgcttgccaagaaaggccagcccaccttctcccaggagaagccatcctcctcctccccgcccctggccagctccggaccctggagaaaacaagaccagctctgtgccatgcccccaaggactcacctgtccctaagcagctcagggccaagccagatccccttacccaggcagaccccctccagcccagctcccctaggccgtgtccctagggcatggcctaggctaatctgagctgtctagatggacctgcatcaggcctggggaagggg

SEQ ID NO: 413952 - DNA, 490 bp, Homo Sapiens
gcggccgcgatcagtgcggcttggcggtgcccgtgctgctggagccgctgccggacgagccggaggtggtggaaccggtcgagcccgtggtgtcgcccgcaccgtccttcttgccgaagccggccgcgttgggcgagccctgcatccggccctgatcctgctgcatctcgtggccgggcgccttcgaggaggcgccccggtcttccgcggccatggcggccgtcgcgaagccgaaagcggtcaggagcgcaatcgccgagactttcatgggtttcctccaggttatgttgaacagccggaaaacgttgccgccgttcgggtcgttccggaaaaaggcgatgccggatcctccgcggtcgaagggcgggctctcctctgcgcagatctgggcgaggaccggatccggcggcggggagcttagataaggctccgcttcgcgccgcgacgatttccgtcgacgcggcgatgtcttcgcgtcaccgaccgaaga

SEQ ID NO: 413953 - DNA, 208 bp, Homo Sapiens
ggaaaaaacccggcttaaacccctttttttgcaaaaataaaacttgaaacccataaagggggcggggctttccctgggggttaagtttacaaacccccccttcaattgaaactggcaattaaagttcttaaaatttaggaagggggggaccttggaaagttttgaaattccaaaattcccgaaagtccctttaaaaacccccggggtg

SEQ ID NO: 413954 - DNA, 436 bp, Homo Sapiens
gaatcaaagtctagtttactgaagaaatcccttgggttttaagattctgttaacacatggtaaataaacatctaaataaaaactgaaaaatgtcgtgtcgtgacatttatctttaggaaaataaacatattcagtatcatccacacaacttgccatctgtgctctggatctctgctatcaagggaatgaagtatgttttaaaaactggatacataataggttctagcaaaagccttaacaaacaaaactgagcgataactctggtaacatgacactggagcccatcgctttatagagaaacaaattcccgtggcccctataagacactattatcaaactacatttccagagagcgctttcccagagttaggattctgaattcgcttttcatataatgacattctacataaatactacatagatttcaacagagaaa

SEQ ID NO: 413955 - DNA, 399 bp, Homo Sapiens
  misc_feature (54)..(74): n is a, c, g, or t
  misc_feature (190)..(218): n is a, c, g, or t
  misc_feature (388)..(388): n is a, c, g, or t
gctttgagctgtgtcctttcatatggagtcaacacgaccctcctcaaatatcannnnnnnnnnnnnnnnnnnnncctgaaacgcgagaattcagcaggtatctttggcaacactttatcacgaccttaatttaaagaataaaaaataaaatcgattcacgtctatatacagtatgtgattgcgcggagtnnnnnnnnnnnnnnnnnnnnnnnnnnnnntcccggctctgggcccatgcagaggctgtggcccccaggacgggcgggtagttaaggcaaagtgggcgggcaggacaggcgaagctgagtgcggagctaggaacgagggtttagtgcaatccccgaggtctgtgtaagtgtcgcggtgggccgcagcccttgttcctacngaagtcccaga

SEQ ID NO: 413956 - DNA, 513 bp, Homo Sapiens
gaggagggcagagaataattttattgagtgatgaaaacggctttcagcagagagaggacacggggttgttccccctacccaaaggcaggaacattccccatgtggctgggctggtgccttttatgtccatagggttttatggactcagaatggggagtgtgtgctgattggtttgtgagtatgcaaaaaagattaaagcaaagacatcactcaaaggtgggcccaacagtatagaaaaccaattaggaaagagtaggtatatgtaaaataggtgaagtgcgaggaccaatcagaggaaagcacgccaaatataaattctcaatccggcccaaggatttaacttgcaacttgactttcaggctttaaactcttcagcttggaggtgaggtttcaccagggacctgcccctatctacctaggcatttggctgcctcctgtcgctatcaatatcacggcatactcggattgtcagacccagccaagcctgagggagactcacccccactcgcacct

SEQ ID NO: 413957 - DNA, 381 bp, Homo Sapiens
ggaccccttccccccccatcaaaaaggggggcaaaaaacatttatttttacaaagaaagcccatttataaatttgaaaaaggccctccttaaacgggaaaaaattggggatgttgcaaaaaaagggtggggaaccccttttatggatcggttttgggtccaagtttgtccctgccaaaagccataaaaaagtttccatccccccggggctccagtttggtacccccaaacttgggaggggggatctctccttccgggttaaaagttttaattcccccccctcagggagggagttaaagttccaggcccccggggggaacaaaattgggagggtcaaaagggaaaaccttttttatgaactgaaaacccaagtcccccccca

SEQ ID NO: 413958 - DNA, 237 bp, Homo Sapiens
ctgtattctcaggtggtttttctatccatcctatattaaaacttggattgtgcccaaaagtggttggggggcccaagggtatattctctggggatcagatgtgcccttgccttaacttgtagccgaaaacacaccaggaccaacttcaaatccgaccttttagatttgactcccaaagtcatggttcatgacgtcaccattaggtactggatcatttttgggggttggatttcaatg

SEQ ID NO: 413959 - DNA, 160 bp, Homo Sapiens
gcgggttggggcacctttattcatagttggccccatttataacataattcttttcaccactgagcaatctgatcaccacctccactttctcacttgtcacttgctttcatttatgttgtgttgtaccattcaatattttattgtatgcctttcaaaattc

SEQ ID NO: 413960 - DNA, 435 bp, Homo Sapiens
agatatttatatatattcatcgacatggaagtccacgagatacattatttggtgaaaaatacacagtatagaacagcacttatatttggtcactcttatctatacatatatctatctgggtacacaggtacagggagatatctggaaggacattcaccaaagggctgacaatggttacaaaagggtgctgagtttcaggtaatttgtactttagtttttgtatcttcctttatttttgaaggtttaatgaaaagatgctcctttcataaaaagtataaagtcatcaaagaaatagacacatggagaatagacccttaagccagcagagaagagagcagggacagaggtcacaccattccccatccactgtgctggtatgcaagacctcttctccttcccaaaggaaaactgctttgtggattaattcatgcagtt

SEQ ID NO: 413961 - DNA, 440 bp, Homo Sapiens
ttaagaggaatgcagcccttgtagaataaactttacactaagtcctggagcaaagcaaacttgcgacactcttgtgcttgagtttggctcttcatgtgtgtacatggaacagaagtgatgaagtcatttggggtcaagacaaagatcaggagtcattctggagaccacgcatggcatggatgtttccagaagggctggaccccaaactcagctcctccatgggtaaatgggtcctggttactttgatcagtcgaatgatcaaatgcatcattcaaccaatgccccaaattgtttctgcaacatgttgcttctgcttaaagctcattcccaaggccttaatctgaaagcatatccagtgtcctacaacacggcccctgacctctgaagccacagagaagagtaatggctccatatagctgcccttgttgctatggaaacac

SEQ ID NO: 413962 - DNA, 312 bp, Homo Sapiens
agaaaataatttttaatcttaaaatcaagacacttagaaatttagatagcagatacattggaaaagcagggaggtaactgtcagtaaaattaattattaaaatggagattatgttttccccagggtctcccagcaagctaaatatatctagagtcgggtgggctgttttctgaattttgtggcagtcaaagctttcttcagtttaagaatttcaggcatgtggttcttgactgtagctgtgggactcatttaaaacttcacgctttccttgggaggggatggggtgcggtgcaaatgcctgtttgtgcaagg

SEQ ID NO: 413963 - DNA, 443 bp, Homo Sapiens
  misc_feature (199)..(199): n is a, c, g, or t
aaggaaattaaaaataccgtaattagaataatacaaggagagaacactttgcggaaggcctagggtaagggcacttcccacccactgggttggctcaagaggttgggactggggcgccacctcccgcccccttagggtctgcgatccgccgggggcgccgcgggcttttccgccggctccatgcatttccctgaggcangatctttttgggggaagctggcatcccggcgctggcctcggcccccgactgggagttgggtggcgcttgattggaactccggcccggagccgcctcagccgctgcgcccccgcgggcagacaagcccgggcggagcgcgctaagccacaggtccccgcggcgttcctcccggtcttcggggatgcttttccatcttagcggcctgattagcatcgccgccgcttgtggggctggattctaccct

SEQ ID NO: 413964 - DNA, 555 bp, Homo Sapiens
ttttgaactccttgtataactttattcacaaactccagacacccaggcctggcttagcacagagggcatgttcttgccagtggcaaaaaaacccgatacagcatgtttgttaatactaaccattttaatttaaattaatagcatgtctggaagacaaatgtagttgatagaaaatataaaaactttactgtacaaattttacatcacattcaaaaaaagcaagtgtgtggcttgtggccacagaagatgctaggtttgcacgctgatgagatcctgctaacactgctgcatagcacaaactccaactggcttcacatttacgtctccaccctccccccacaccaaatcaacacagaataacacaggtttccagggcttgccattcctctctgtgacctcaagaggaaatgccgtaggatgacagagggtgttttgatttggtgacatggagagatcaactttgctacacactgctcacaaccccaaactagctaggattcaagacttcgagttagacagaaacccagggggctgcggctctggtggttaaaggca

SEQ ID NO: 413965 - DNA, 220 bp, Homo Sapiens
tctggcatactccaacttagctagatgagacccagtcttcccagcggatttgattccagccactgttgtcctattccacacacgcaacacatcaatcctccatcaccatcacccgcgcatgggtgtagcccacagttatcgtattcatcgtctcattctgtgcgtccactctcgacccctccatcacgtagtccgcgtgagcatcagagaccggaatata

SEQ ID NO: 413966 - DNA, 230 bp, Homo Sapiens
  misc_feature (73)..(123): n is a, c, g, or t
cccaccattgactttttttgaaaaacctccccttgaaaaggtcccattttttcacatcccccctgcatcaaannnnnnnnnnnnnnnnnnnnnnnnnnnnnnnnnnnnnnnnnnnnnnnnnnntcaggcttgcccacacatccacacccatcctttcagttcatcagggcactttaactgaccttcaggggtgaaagccaaacctcaaatgctggaagtaaacctttggc

SEQ ID NO: 413967 - DNA, 531 bp, Homo Sapiens
ttttttaagatttgtcactaaaattttaatctatcatctatattcaatacaaatcttagaatacgaatgctcataactttaacagaatatgaactatgttagtagacactgaggctaagagagattaaggttatccatgaccgttcaatgacccagaatttaatgaacacatacaccatagaaaactattgaaggggattgatgctgtctgatttttaagtcatcttccaactttaatggtgacctcagggtggaggaagcagacctgggaacccttcctcataacccccacccagggcacagagctactcagcaggactcctgtctacccagaactctttctactttgtgatattttatgctattgtaataaggtaacaagcatgtatgtattaacactaataccgtattggtgttcacagtccaaatacaacttgaattgtttttaggttatattttttgtcaaattgttggttttttgaatatgtcactcccaccaaggcagggtcatatgaactcccagatttatat

SEQ ID NO: 413968 - DNA, 225 bp, Homo Sapiens
  misc_feature (76)..(152): n is a, c, g, or t
gttttctgggggaaatttattctgttttcccatttaggttgttggggaaagggataaaccaagttctggattctgnnnnnnnnnnnnnnnnnnnnnnnnnnnnnnnnnnnnnnnnnnnnnnnnnnnnnnnnnnnnnnnnnnnnnnnnnnnnntgccgtgtcctatgttcccatctgggaataccccctgccctctaccctggacaatatagtgaaaacccctctc

SEQ ID NO: 413969 - DNA, 436 bp, Homo Sapiens
tactatagaatcccatattttatatacatttattacatcttaaaaacaattgtgacagtttccaattgttcaaaacaaatacaaatctgatcctcacattttcttggctgcaaacaaaggattttttaagttttctttctctattattttatagcctctgaaatattactgtgtttagaagtagttgttcttaaatgggtgctatgctaatgaaccaatgagacaaaatgagatagccgcaattgttagagtagccccagtcattaaacttaaatgtgtttggacctggagaatcattttctgtaacatgattccagatgagttcactagaactaaaaagatacatacaatgtaaagtgcatatacctaacgtcatagcctttttgcttcaaacccagatagctctgctatgtttattgcagcgtcacatttctct

SEQ ID NO: 413970 - DNA, 439 bp, Homo Sapiens
  misc_feature (413)..(413): n is a, c, g, or t
gccgcaaccaccgcgcgcgcgcccggcgggggacagtaggaaggggggccggcggcgagcgcgagcctcgcccacccgggtctacaccgaagggtagcgtgcccgcgcgggggccggcgggtgggagatcgcgccccgaggagggcgagggagacccaggccccgcgcgacggtccccctcgctggagtgagactgaggaaggggccgctttctgcccccctcctcccacttcgccccagagaaagagccttaccccttccacacccaaacaccactctcctggacaattacttttactctgagagaaagggcgaccagcagtggccccatcctctctgattgccggccaggttggttgtcatggtaacccttccccagcggtgggggcgaggtggtggggagcagccttccnctcgcttccacctttgtggttatgga

SEQ ID NO: 413971 - DNA, 245 bp, Homo Sapiens
  misc_feature (109)..(127): n is a, c, g, or t
tttccccggggccacccctgccttgccgagagggggccgcaacccggcccttctggtttgggggggaagtccaaagcgaggggacccgcccggcccccatcctgcctgnnnnnnnnnnnnnnnnnnntggttgctgggcaggcccccccagtttggctgggccccgcccgccctgggcccccttacctgggtcccccccagttttccaattccttcatgggggccgcccccccttttttcttttt

SEQ ID NO: 413972 - DNA, 610 bp, Homo Sapiens
  misc_feature (52)..(76): n is a, c, g, or t
  misc_feature (86)..(97): n is a, c, g, or t
  misc_feature (106)..(115): n is a, c, g, or t
  misc_feature (121)..(154): n is a, c, g, or t
  misc_feature (168)..(181): n is a, c, g, or t
  misc_feature (291)..(308): n is a, c, g, or t
  misc_feature (409)..(409): n is a, c, g, or t
  misc_feature (520)..(520): n is a, c, g, or t
ggcttgggtttttccttcaatttaaaccccctggaaaaaatacctttttttnnnnnnnnnnnnnnnnnnnnnnnnncccaaggggnnnnnnnnnnnnggcttcaannnnnnnnnnatgacnnnnnnnnnnnnnnnnnnnnnnnnnnnnnnnnnnaccccggaagcctnnnnnnnnnnnnnngcccgggggggccccaaaatacatgatgctgcaattttgggggctttgggttcgggggctggatttccccaaaagggaggagcgggggaccaaattgtccccgaagctgnnnnnnnnnnnnnnnnnnaccctgggggagctgcaagggaccgggaccctgggggcaaaaaaccccaaggaaatgggtccccccacctgggctcctgagcccttggcaaatgccttgtnggggggctgcccgcaggtcccccaacaaacggggcccgagcccagggggtactcagcggggtcccccgaccttgctgcatgggagccgtgggggggaaggagcaggtcatntccatcctaatccttgtggtgctgaacccaagtgactgggcgcccacactggcgcgtggcacctcttccccaggggagtgatgagacccg

SEQ ID NO: 413973 - DNA, 320 bp, Homo Sapiens
aacacaagttacaccaggaaaaaatttgatatttctagggaccaaagttcatatatatattccaattctgcttaattactaatctattcacctcaattatttttaacaaaaatgtatggaggcctacccaatgtaacatactatgctggatgtgcagagggagataaaagatgactgagctgaggtcctgtccccaggagctcacaacacagtaggaaggccaatttcctaaagaaagaattaatactccgagacactgagttgtaatcagagaacaagtaagtgctagggtaaaaggagaaaaaggaggattaaatcta

SEQ ID NO: 413974 - DNA, 103 bp, Homo Sapiens
ccaccttgcctacatgggactcatccttcttcacaacggcttccgtgatcaaccgcacatcttcatgaacatctatattgaagagtggtctccttttccccct

SEQ ID NO: 413975 - DNA, 443 bp, Homo Sapiens
cttaccatctttaaaactggtagcatctggctcagagattgctttttggagccagagcccacgatatacccccacattgtgacaaaattttaatgtcatgataatgaatgacatcagctacacataatattttcaattttaattcttagttttgcacaacctaatttatctgtagcctgtcctgggggcaggtctgtaccggtttcctgaaaaatgtctaaagtctaacataaattaaacaagattatgaacactctggtccaagataagctatgagccaagtgttaactgtaaagtggttcctaatgtgtttccaaagtccaacagaacaaatgcatgaaatgccaggagatgaaactgttttaagtaatgaaatggggtcctcaagagaacatgagcacagacttcaggtgagttttacagccatttttgtgcctcgtgcc

SEQ ID NO: 413976 - DNA, 105 bp, Homo Sapiens
gcctggccacgccccgacgctgatgtccaggcgtccctggccacgccccggaagcgccccctggcggtcgcagtcgcggtccaggggcagggttcctggcaatac

SEQ ID NO: 413977 - DNA, 355 bp, Homo Sapiens
  misc_feature (48)..(102): n is a, c, g, or t
gagaccaggtatcactctgtcatccaggctggagaagctcaatcacgnnnnnnnnnnnnnnnnnnnnnnnnnnnnnnnnnnnnnnnnnnnnnnnnnnnnnnngagcagccggaaccacaggcacatggcaccatgcccagccaatgtttgtactttctgcagagacaaggcttggccacgccgcccagactggtcccgaacccccgagcccaaaacgatccgcccacctcagtcccccaaagcgccgggaccacaggcatgggccgccgtgcccggcctcttttggctttttaaatgtggctctaactgtgtttccatcggacagacctgctctaggtcagccttgtccaacaga

SEQ ID NO: 413978 - DNA, 277 bp, Homo Sapiens
ggcttactaaaagggtgaaaaccttggcttggattaaggcgacccccatttctaggattgtcagtaaaattaaaattgggaaaaagataaatgttaagggaagggtaatgggtgatttttctagggggggccctcccaataagggccaaaattaggggccctgcctaattgtacccgttagcccttccgcccaggctattggttaaaataataggccgatggtttccataataaccaatttggggataaggggggtaggggtgcccctccgcataaa

SEQ ID NO: 413979 - DNA, 196 bp, Homo Sapiens
  misc_feature (152)..(152): n is a, c, g, or t
ccaccaccttggggccaagaaaccaacggcctttgggggcccggaaggccttaataatctaaaaggcttggaaaaaccccacaaaaatcttaacaaggatttctgcatcctcctcctgcccttgatttttttgagaaataaaaacccggttnagggccccaaacttgccaaacttttttgtcacccccccttcaag

SEQ ID NO: 413980 - DNA, 354 bp, Homo Sapiens
tttttttcttgacctctaccttcccttctcacagagtaaacactgtagaaatgtatcaccaatctgtttaaactttaattattgtttcattattttattctatatcttgttaaggcagtaaacttgtttttaatgctcatcatcttattgggtgttccagcaagaaaaaaagtatgcctcctggcttcaacgtatacatttttctttcagagaagttcagagcttttctttcagagaagttcagagctttgcagctttcagagcttcacagctccaaaattacctgaaatctaataattcatctaaaacatactgacactgatcatatcaatgagagatacattcaagaatgac

SEQ ID NO: 413981 - DNA, 291 bp, Homo Sapiens
  misc_feature (72)..(81): n is a, c, g, or t
ccacattaggcaaaaaattttttttcatcagggaaatacaccccccatgaaagctcccacccaatctcagtnnnnnnnnnntccagggcctgggaaagaaaaatcaggagtgacattaattagccagcacccccaaaaaacccttttttttgatggaaggggctactggttttttgtctcctcatcctcacatgtccattccatggggctaaggctttccttttttattggaaaaacaaacagacttgacccacacaaaaaagcttttttggccccattttttaccaagca

SEQ ID NO: 413982 - DNA, 558 bp, Homo Sapiens
  misc_feature (456)..(471): n is a, c, g, or t
gcggccgccgccccgcgccctcccgaggccttcagcgcccgtggcgtccgggacccaggcgcggccacccaccctcacccggggcgcgggagttgacgccagggcgggcgtgccacggcctccagcggggctacgtcaggcgtaagccactcccgggccagcgcggcgcccaacctctctctgcgtcccacgcgggagccgggagggctgcgggaaggaaccgcgctggaaagtgcgaaacctcgcgagggaaagctgcgtggggaacggggtcggccctcgccggggctccagtccggaccgagactctgttgcagcgcctcccacgcaccacagaactgagttggggaaagtaaaaaggatacgtgtgtacccagggagaagccagggaaacttacatgaacgtttttaaagtctcttttaaatttgacagaacaaacgtgaagatggtaggannnnnnnnnnnnnnnncctaagcctgccctcccctcctgaggactctggggtcccttcctcctcccggggcccgcctggtgaaagtcctcagccacccacgag

SEQ ID NO: 413983 - DNA, 262 bp, Homo Sapiens
cttctgcatacactttactgtgagccacaagggaataaagagctggtgggagaccatacttttgggaaggtcaatacggggcaagatccccacgggccatgaggaagggcagtggataggcattgatctccaaacactggtgaggagggcccgtgccaccacctcagggctagaaaacaatgctgttcttggcaggagggaactgtaaatggcagccttcagcatggtgccctcatgaggcatgggttgtagagggaataat

SEQ ID NO: 413984 - DNA, 408 bp, Homo Sapiens
tggccttttaaaaatgtatatttttggggtgcttttttctttttcatgcattcaatagtctatactggataaaagcaacctgttgggccaagtgtcagaatttatggtacagcccataaaaaataatgatggccaagaggaggcacacttgtataactaatatgcaggaaatcaattctacagtgttaaataaataactaataagacagactgtgaaacacacaggaaatattagagcagaaagagcacaatatttagagtccagagatttggacctaacacctggttctgtcactgattccttgtgacatggactccatttcttcaccttagaacaaatgctgctggagagattattcctctgcttaatggagggattattcctctgcttaaatttaccatttaaaa

SEQ ID NO: 413985 - DNA, 292 bp, Homo Sapiens
actgtattccttctccatttctgaactcagcgtctaaggtgatcctgactgtgcctctggtgaacgcaggaaggactggaaaactggggttgggtggggagttgagcaggggccttgctaagtgtgtggagctggagaccacctatagtttctggctggattttataaaacacaacaccttaatatgttctgccaggtgtagtgaaaatgtgcctgatgaacttgaattcttacttgcttccaaaagctctatatgaaggggagcccaaattaggagatgaaaacgcaggag

SEQ ID NO: 413986 - DNA, 121 bp, Homo Sapiens
tgatggagccgaccgacagcagccaggatgcgggcagataggctctggacacaaccgctgctgcagcggcggcagcaaccactgccgccgctggcggaaagatggggtggcgcatcccaga

SEQ ID NO: 413987 - DNA, 403 bp, Homo Sapiens
tactaagagggaaaaagcattttagtttaatgggtacaactgctgaggttttgaggcctccatcaagaaggaaaagagagcccagattgcaggtctgttgcgagtaagtgtgtctgcaggttgtattaggcatgtggtgatggtgatggggggttataggagcttacagtgaacttccatcactcctacccatcattgtctagttattttatcatccattgattcttctcttccggcagctctgaggaccgtagactaaactttattgttgcttgtgttggaaggccactgttcacaagttagggagggccaaaatgatttgggaggagagcagaaaaagattgtagctgtattttcaacagcttcttcacccatgtgcacgtgcccggaatctgggacccca

SEQ ID NO: 413988 - DNA, 432 bp, Homo Sapiens
cattttctgaagatttattctttaagctggacagaggctgttttcattaacacagtctcgtgttcttccggggtctggtacatggggcacaatgcgggcttcattatccaggaggaaaacatctttttttctggaatcttcagccagctccaagttccaggacagcacagcagcagctttcctctttcctcaacttgtgaatgagaacacattcttcaatacagatgagcaagaatcattcagcacactttgcacagggggggcctccttctcacctctttctgctgctgcttcttccagatgaatcagagtgccagccacgtgtaccatttgtaccaagtccattaaagatcgatgagcttgttcttcatctgtaaggacagactatcctcacccttctaatgattttaacagccacaacatctccaacaa

SEQ ID NO: 413989 - DNA, 240 bp, Homo Sapiens
  misc_feature (54)..(159): n is a, c, g, or t
tgccacagctgctagccacagatgacatgcccaggctactcccatttctgcctnnnnnnnnnnnnnnnnnnnnnnnnnnnnnnnnnnnnnnnnnnnnnnnnnnnnnnnnnnnnnnnnnnnnnnnnnnnnnnnnnnnnnnnnnnnnnnnnnnnnnnnnnntaaaaggctactacaactcaggaaggcaacagccaaatcgaagagaaacgtaagacagggcaatggggcaggggtaggggg

SEQ ID NO: 413990 - DNA, 152 bp, Homo Sapiens
tcgtatactctaagtaaaaagttatgacagtctacagtgatggtaggattaataatggaatatctttgatgctagttactaccgccttaggccatggcgacagtgcaactgataagctctatcatgttactaatgacatgagatatgagaat

SEQ ID NO: 413991 - DNA, 502 bp, Homo Sapiens
ggcattattttttgtcgccctgactgccctgcaacaacacgcaaggctgggagaccaggcaagtgcccctccacacttggcacggacgcccagctcccaggccgtgggcatcaggaagctcaggccaaagtaggtcaccaccaggcagaccccatacgcgaacggctacaggtggctgtaggtgctgcagccttcgggacagagcagggcctgtcctcggccaggctggtgacattatcagccttatgccacgctgcctctaaaggggaaaagagacccagagtgcgagttcagaaattaacaaatgagggcagtgggggctgtttccactgtgccacaaccagatgcggaagattccacgtcacaactgtggtcagcagctgtctgccttgaggaaggctctacacacccgagaaagcatgagagcttccaggagacaggaaagctgctgatgggaaaagcagctgccccatcaagagcagggactctgaggcccctgcgg

SEQ ID NO: 413992 - DNA, 181 bp, Homo Sapiens
ccgtcgaacgccaccaccgaccccctgcccgaataattttaatggccccagcccatgcctgcccaccatcgaaccgcaaacagaaccaagccccacgagcaggggaccgccagacaggggtcgcgctgcatacagcgcgcagggctctgtagccgccggcccgccccccgacgccggggcc

SEQ ID NO: 413993 - DNA, 205 bp, Homo Sapiens
agcctgggggagcaccttttttgatgagattgagccgacacttggcccattcagagagctgatgcccgtacgccttctagatcttgaggcgctcctgagcgcagttaataatgtcaatgaatagacggaggtcgtaatcgatgcgcttgagtgagcgcttgtaattccacacctcctagagactggcgggggtctcctctggcgc

SEQ ID NO: 413994 - DNA, 115 bp, Homo Sapiens
agaaggcctgtaaaaggcatggcttcagcaagtgcctcaggtacaaaatatggcggattggccgttcttcttgatgtgcctggacgatcatgcacttgcacaaggtgaaatctga

SEQ ID NO: 413995 - DNA, 257 bp, Homo Sapiens
cgttacggacctacctttcccctacttatttatctggtacaaagtagaggggagtggctattccctgggtccacccactctggcaggggacatggaaatggaagatgtgggaggcatttcggacaaggactggtgcctgataatgcatgagtcagattctctcggatggaaccagataggggaacatttgtgctcagaagagggggtgtatgggtaggtgcatgtgcttatgagcaaatcctggtccctaaaatggg

SEQ ID NO: 413996 - DNA, 229 bp, Homo Sapiens
gcaggctcaacacgctctccacatggatttcggtgctacgaacgctgctcaatgccatactcacgacaacgctcaccataggctgacccctctcggtggggaagtaacgtaccacttatatcttcgtaatctcatgctcttaaaccaacttgacagtgactgacactttctgcttatggaccatgatccagaagtcatcatctgtgccagacagaggagcctgagttgc

SEQ ID NO: 413997 - DNA, 228 bp, Homo Sapiens
caggccttgccagcaccatcaaacaaaaggtcctgagtcctccacagggtccaaagggctgccaagccccttaaaaaaattccatgacccggaaaaaatgccccttttgctccttgaaaagcttacagcctaggggatttgccacctcacagtcttaggaacggggcaaagtagggcaaattcttcatcccctaaagctatgggggcctgaaccattttaaaattggg

SEQ ID NO: 413998 - DNA, 357 bp, Homo Sapiens
ggggatttattatcaaaaagctgaggctcaatgtatataatatttatctttacaataatatttgggggactccaataagtcatcaaatgcaacccacaatatattttaaaattccatcattagctcactgaataatattttttgtaatttagcttaacaagcacatttgtgaagtatcatgtagccttccaatgctccaaataaaagaaccctttcaaggtagattttctgggttgggaaggctctccatgtggctccccgacagattatagggcttctttataggttaaaatgtgcagttatcttgatatcagtttccattgcataggccagtaagggtcattaaacaccaatggg

SEQ ID NO: 413999 - DNA, 465 bp, Homo Sapiens
cctaaatcaggaacgccagaattaagaggaaggtagccatgcaaaactcaacactgtttgtcaacgtgggtactaactcggctgtgtcttggataacacatcaacttggtaaaaacacacacagaaaagaaaacactttcttccaactgtcagagcaaaaatcctttactcttctgtccagcaacctgaacaaaaacaagggaatttgtggcttggtttcctttacaaccttatcttcactccaggcaccatcccctgtctctaagcaacagggcacactttggaactaccaggaggcaaaacccagtgcttatcctgagtcttttaggactaaacaaatcagggcagagcaattggtccctcgcaaggtagagcccaaggagcccatgggaaggtacgtggccccaaatatcttcatcaaaccccatgcataccctggcactcctctgagttccttagtgcctg

SEQ ID NO: 414000 - DNA, 545 bp, Homo Sapiens
gtttcagggaaacatttggaagaaaccgagagtcttcgtctttcagtaatttaaaaggacagaatatgttatgtcttgtattgcttaaggattttagtatttgtaaagcactgcagcatacatgatcaaataatgagttaactttcttacatttatacaggggtaccatattaaagtcttaacttgctgaaagagacaggtcttctaattccatcccattgtattctgactgtctgcttcttataagtgagcaatactgttcatctccaaaaggatatcttgaactctcagctagcaaataaaacctttgttctttttaggagaaatgtttgaaccgatataactccttatggactctataaatacctctgcattaaaataaaatacattacataagtatcctaattaaaatttgggaaaaggataatcaaatctcaattattcacagggagcgatactcacttagagccaatctatatgctttacctaggcaagtgagcctacacttattctgtgaagttgatgctgacagcaataagcagctc

SEQ ID NO: 414001 - DNA, 299 bp, Homo Sapiens
  misc_feature (192)..(220): n is a, c, g, or t
ctatttacaaagtatatatttaaacacgtaaaaagcggtattggatacagacattcacgaccgcagaagataggtaccgaagcttcactcttgagctgaggcggagatcgattggagatttgtacaaatcttagaattaaataaacccaacagcgcacacaccctgcgcggttgcagactcccagccacgtnnnnnnnnnnnnnnnnnnnnnnnnnnnnnaggtcagcgtcgcaagagcgagagaaggagacacatacacacacggccacggacaaacagcaggacggaggggcggtgg

SEQ ID NO: 414002 - DNA, 352 bp, Homo Sapiens
  misc_feature (277)..(297): n is a, c, g, or t
agagagacagggtctcaatctgtttcccaggccagagtgctgtggtacaatcagggctcactgcagcctcgacctcccgggcccaagcgatcctcccacctcagccccccaccccaagaagctgggactacaggtgcaccatgtagtcccaccatgaacactcctgagttcatgacacatgtaagtggtccatgcagggccttttctcctttgcgtttatttatgtattcccttttgtccctattcttcccctctctccccaccacacctggctaannnnnnnnnnnnnnnnnnnnnagacagagtcttactctgtcgcccaggctggagtacagcgtgagactccgtctcc

SEQ ID NO: 414003 - DNA, 147 bp, Homo Sapiens
ggaaggatttactaatttttattaagggcccccaacttttaaacggcccacaggcagggttgggagttgggggaaaaggaggggttcccttcccaacaacaggggaccctcacccccggttaagggccccgggggggtcctgaaaac

SEQ ID NO: 414004 - DNA, 378 bp, Homo Sapiens
ttttgcaaagcaacacagagcacagtgagttcattcatccagatggacccggcttcacggcagagtaccccagcagggcagcctgctaccgtgtccatttcctcatgcaaaatctccatcagtcaattgtagccactggcctacgtgcttggggtacaacagtgactaaaactgcctcgcagagcttgccatttggtgggtgagacgggtaaatgacagatgtggtagataataacactctggggggggccaccaggccccgagtacgacagagaaaagaggcagagcagggtcctgtggtcaggcagtttggacgaacacatcttacacgcggtttaggaacctgtcctgccctggcaggtgttgtggaagggatga

SEQ ID NO: 414005 - DNA, 281 bp, Homo Sapiens
aatgttacccatccttgcaggcgcacagcggtatccatggatttgatgtgcatttccttgatagttaatgatgttgagcatctttcatgtgcttattaactctggaggtagacctgccaggccttttctaatgagggacaaccatggctttgtaccccaagaacatttttattgagttgctttgtgtctagatcattaggagaattaattaatactttctcttccaatgaagctcagctgcgtcctacatcgtgaatgaaaggctttctgtacatttttcc

SEQ ID NO: 414006 - DNA, 459 bp, Homo Sapiens
tttgtcaaaaggcctttatttgtgcaatagttcagattacagcaccattgggcaacccctgtgaaggatcatccactttaactttctgagatgctggtatttcatcacttttgctgaggttccaggtggtttggttctctggaactgacaatggccccttaccaggtatgtttttggatatagtgattgccatgctgcttccttttgtagtcgggggggcgggtaaaaattgtgctgctggtgatcataaatagcattagttcataaaataacaattgtttctgtttttttgaactaggtctgcttctgattcgaataagcagagtgaaagaaaagctttcttctcagtgcacctgggcagtcccatatgccaagaggccatggaggacaacggtgaagcatggggattccagggtcaatctgggttttaatttgccctccatcacctatttgctatgt

SEQ ID NO: 414007 - DNA, 548 bp, Homo Sapiens
  misc_feature (422)..(422): n is a, c, g, or t
  misc_feature (498)..(498): n is a, c, g, or t
aacagtcaggttccactcccatagggctactgcaatttgctgggggtccctcccatacttggaggtatcaccagtggaggctggaaaatagcaaagatggctgcctgctccttcctctgggatttctgtctcagaggggcaccaaactaaggccagcaggaatgctcctgtatacggtgtttggtgacctctgttggggagatctccccagtcaggaggcatgggatcccagacccacctaacaaatcactctagctgccccttggcagaggaggtgtgctatgctgggtggaatcccactcgtccagactgcccggattcctcagagccagcagggggaaaagactaagtctgttgatccatggagaccacagccacccctccccacaagagctcagtctcagagagatcagagttctgtntctaaactcctggcaggaattgctgaagttcctgcagggaggccccacccagtgaggaggattgatcagggcctgncctaaagagacagtctggttataaccttttatagctgctgtgctgtgctg

SEQ ID NO: 414008 - DNA, 328 bp, Homo Sapiens
ccccacccatccggtggagtgggatagcagttgggcccaccccactcagtccggcgtggattagcacatagtctccaccctgaacatttcccacaaaaagtaacagctggaaggcggggaccccagcctttgggatggctgcaccctgggcagggcaatcccttgggataggcatgaagaccccttcggggacaataacaacctgagcctggcccccaccggggagcaaaaccatggggtgggccccattttcacaggccctggggcgcagccccagcgggccaagggcggaggcgcggaggccaaagtgggcgggcccagagggggg

SEQ ID NO: 414009 - DNA, 501 bp, Homo Sapiens
agaaatcttggagacacagattttgttttctccttccacaatgaaaatgtgaatattccgtgtagctttatctgctttgctagctccaaaacttggccactaaaaaaggatccatgatgctgtaaaatctgaaagagcaacttcagaagaagcctgtacaggggtagatttccaactaccctcccagactgatcatcaaggagcaaactaaatcccatgtaacacaaactgctcagcaagaaaaattttgcccatgtgtaaatccatacccagagtccccatttagtctcaaaatctgtctattttgctagatttacacacacattgtggtgcttagagacttggaggcacaacattccagaaggtgagggtggggccgagtgctattgaacatgtgagggagacagggtcaggcgggcctcaaatgagtgtgcagaatcttctccctcaacatgctgccctgtgtctgctggcataggggctttgaggcctgagggacca

SEQ ID NO: 414010 - DNA, 805 bp, Homo Sapiens
  misc_feature (541)..(644): n is a, c, g, or t
  misc_feature (706)..(706): n is a, c, g, or t
  misc_feature (714)..(714): n is a, c, g, or t
ttttggttacccacagcaggtttatttttgggggtagaggacccaaaggcacacttggtgaggaagttgcttgctttaaaaataaggctgtgtgccacccagttggcaactgtgccaccccaggcgggtcccctggcctgctcatggggcacctgtcagaggagacacatttgagcgaaaccaacagggcgatgcttctgaaactgactgtggcataaagcagctctctgcagtccccgggcagaggcacaatggggagctgcctgatgctggccaagatggtggcagagctggaaggcacagtccgcccggcccttataaacaggacgcccttggaggctctgcaaagtggcaggtggtgagtgagcaggctgacttcttaaaggctctcagtttacctctagagatataaacatgaaaggcacttgctggccgcaatcaacaattagggcccacagcatcagcgtcagggcagttgctgagatggagcgatggtgcagtaggtgaggacaaagactcgtcctggtttcaccatctatcnnnnnnnnnnnnnnnnnnnnnnnnnnnnnnnnnnnnnnnnnnnnnnnnnnnnnnnnnnnnnnnnnnnnnnnnnnnnnnnnnnnnnnnnnnnnnnnnnnnnnnnngtgggctgatctccctgtttctcagtttttcccagtcgatccttcgggaagaggcatgctcntctacgtncctcttccccttaagcccacagcccaaccgctttgggctggtggtttgtctatttctttgcagatagaacaggcttcttggacaaggattt

SEQ ID NO: 414011 - DNA, 398 bp, Homo Sapiens
  misc_feature (272)..(272): n is a, c, g, or t
  misc_feature (355)..(355): n is a, c, g, or t
actgctcccggcctcacctttcgacctgtgctccaaaacacactctttgtttttcttgagaaacctgctgataaatatctgtacttcgatgctccaacactttttgagcgactattacgtgccagaaactatacaaaaataatcaggcaaggactctaatctgcaaagctcagaggaaactggagaagataaacaataacacagttcactgtatcaacagaactatgcccaaaatgctaaggcagcatcttagccggagtgtggaactttanaaaatcttagtaaagttccacagaaaagttgtttttctgcagttcgtagttcggtcaataaaagaacgaaattcagcgcactntaaaaatacacaatggcacaggatctgaacacttgacattgta

SEQ ID NO: 414012 - DNA, 392 bp, Homo Sapiens
tttaaatgtatttgaagtgtgtaacaggaaataaatttgttcttcaaatactagaatactagaacaagaggttaaatcttaacacttgaaagggggtttaaggaataggaaaagatgaacggccctatcagtgaaagagaactgggctggggaaaaagaccagttgtatgttgcaacctctgaaaagctgaaggatgtttctaagccttagtaactgtctgtaaaaggaggccggagttctagcttttagcagtctatgattactacataaatcatttctacaaactaaataggtaggattttagaatgagaaaatgtatgcaaggattctgggctctgaaaaaaagagaaaatgtaggaaagatgactaattgtcccaatatacctcttta

SEQ ID NO: 414013 - DNA, 152 bp, Homo Sapiens
  misc_feature (105)..(105): n is a, c, g, or t
ggctgtatggccaactagatgatctactaaataatacagtttgggctaggctggtcacagtgtctacataggcaaatctagaaaaatgcatatttcttgtagctnttctattgtttgggggaccaaaaccttagagaaacagcccctaccta

SEQ ID NO: 414014 - DNA, 394 bp, Homo Sapiens
  misc_feature (167)..(167): n is a, c, g, or t
  misc_feature (172)..(181): n is a, c, g, or t
ttggccttaacaccccacccccacatttattaaaagggcgcttttgacgaaagggaattaatttggccttcttattcccccttataaattttaaggaaacccacctaacctttcttttcttgggcctattcttcttgggaaggggggaaaaactcttctttcttttnttaannnnnnnnnnaagttttaaccccagaagaaaaagaaaacccctttgaattttggaggccaaaaaaagaccttcatttttcacctggttggccaccaaaaacaagctctggtgatccagaagaattcccttcctaatctggaatttgggccttaccttttctattctattccaagggtcaaccctcggggtgaagggctttccccgtaggggtttcaacaaaat

SEQ ID NO: 414015 - DNA, 373 bp, Homo Sapiens
tttatgtttattcattctccacacagaggccagaatgtttttttcaaaaatgtaaattgttcatgtcactcccctactgagaacaacccttggcatctcattaaacttactgcaaaatccaaactctttagcttgtaagaatctgtagtcatcttttctcaaatgtcattctttcagaaaagccttctctgaccaccttatttaaataagtaccgggtttccaaacattgtgctctaccaggagacacaacagttattccattgaattggaagtgactgccgtgcagccactttgggctcctcattcctttgaatcaacaggcaaagaaaggaattgctaagctggctgggataattgatcctgaccactaag

SEQ ID NO: 414016 - DNA, 440 bp, Homo Sapiens
  misc_feature (166)..(174): n is a, c, g, or t
ttttttgctcgtgtcctttcctggttttggtatcagggtgatactggcttcattctatgaggatctcttctttctcaatattttggaatagttttagtaggattggtaccaattcttctttgaatgtctggtagaattcagctgtgaatccatctgcttttgggcnnnnnnnnngttggcaatttttaaattatggattcaatctcgctacttgttattggtctattcagggtttctatttcttcctgatttaatctaggagagttgtgtgtttccaggaatttaccagtttcctctgggttttgtttgtgcacatacatgttcgtagtagtcttaaatgatcttttgtatttctgtggtggtggatgaatatctccagtttcatttctaattgagtttatttggatcttctctcttcttctcttggttaatcttgtgag

SEQ ID NO: 414017 - DNA, 548 bp, Homo Sapiens
cattaaccatcagagatagccagtgctgaataagccaagtttccattctggagactatagataaaaatagcctggatcactctgagtggatcataatttctcatttatactaatgaaataaagttttctgtcctacaaatgtcaaatgtcattcaagtgaaaaccagagaaccaagtgtctcactctgtaggatccaaagccacataaaaaggaccattttagtcaactcttcactgaaggttcaaattcaaacaatccatatctcctccaatctgaaggtgagataaccccttccctgccacaccacagcttctgccactgccactcaagccagaagcataagtgaagtaaagaatgactctattattcattggaataacagaaccatatgtgggctacacacttaggccatgtgcagtgggcactgctattttggtccatccggcacccaatccctctacttcttgtaaaatactgaagttcctttccaaaaccatttcttaagctttctaagtggcccaggggtactggatgactctatcctact

SEQ ID NO: 414018 - DNA, 424 bp, Homo Sapiens
  misc_feature (161)..(198): n is a, c, g, or t
ctccctgcgccaaaagcacacagtggaactcctggttttgaaatgtcctattttatgtgggacctaaaaggatgccaactgtcttctggcctagtgacaacaaaagtgacttcttggaaagctgcggtaacatggaggtggctagggagcagtccaagggnnnnnnnnnnnnnnnnnnnnnnnnnnnnnnnnnnnnnncatgtttagcaaggcctggggggtgttggggtaccacaggaggcaggctcagcgcgtttatccccatgtaaagattgcagagatggggctggggcttcgcgggtgatttttttagtgctttcacctctaatctccaaatcctagccctgctccttccagaaacctacagccttgcctaaattttgtgtgggtgattaaagcagaggacccgattccctgttcctgc

SEQ ID NO: 414019 - DNA, 436 bp, Homo Sapiens
catgtttaagatgctgcataatttcaggaagaaaatgcaaattcttgatcaagacagtagtgcttctatacggtatcaccgatacacgctccattgactcatccagcctccagctagcagaggggttttaaaaaccataggctaggagctgggtaggccagcggaatttaaaaatatgtagcaagtggccactcaactactatttcccaagcttctccaagcctcagatgtctaatacatatggttttgaatggtatccccgagttgtgcagcgcacagcccacacaactgaacaaactggtcctcccttctcataccctctagcatggtgtcctcacaactccaccctcccgagacatgcatcacgctcccaatcccttccttcctctctctactttcccatcaaaacctatggctaaagtacacttgcatacat

SEQ ID NO: 414020 - DNA, 523 bp, Homo Sapiens
  misc_feature (317)..(340): n is a, c, g, or t
ggctaggctaatggactacaaaagagttagataagcacttcaaaaagtttcagaagagaatagattccttctgccaaattcacatattatctctctactcacaaggataaaatagttacaaatggtgtttaaactgctaattttgtattaaatggtgaacccaagattatctccaaagcataacactcctcataatggatagctcgctcaccagacaaactactgttgagaaagagtgacacgttaaaacattgcagataaaaactgcaaacttcaaaagtctccttcaaaaagtcaagtgccacgctagagcgtcnnnnnnnnnnnnnnnnnnnnnnnnagaaggctgtaaatcaaacatttctaaaaccatcaggacacaatgaaagcctcaaagaaagacaagaagttgccaaggagcaagacttaaatgtttaggaatcttcagcaaagcatcatctctaaaacttataaagatcataattacaactttttttaagtccaaaagcattaacatagatag

SEQ ID NO: 414021 - DNA, 472 bp, Homo Sapiens
  misc_feature (381)..(397): n is a, c, g, or t
gtggggctagcattttatttctgttagactgcactatctggtcgatgctgcctccatcaccccaggcagcttctgttcagcaccatgtggtttcacggaggtgcacagaccgcaacatcctgcctgacgcagccactcaatacacattcgctgaaggattaaacgccaggctgcccagtctgatttcacgaggggaaaatgatgcaattgagccacctgatctccctggcttgagcccccagtctccgaccctccaccgtctgcccaacaaaagcccaggcccagatgtctagactcgagagacttggccgggaccagcagagccaaatgtgcagggaagggatggtcctgacactcactgagggagaacagagtcagttnnnnnnnnnnnnnnnnngaaatatcatttctcatggtttggaatgaaacccattattcccaattaacctgcggtgaacccgcatacttgctg

SEQ ID NO: 414022 - DNA, 507 bp, Homo Sapiens
agggaagggctggcggccgggaggggatcggggtggccaaaactgggctaggggattgctccgcggagtccgccggcctcaaggggctgccctgcggagtgcacccaccctccgcgcccaaaggcggaaaggccagagcgcggggcaggtttcgcaactccgagggtggatgcaggctgtggccgggcgggatggagcggccgtgcgtttccagcgcccccggcctggcggagccccattctcggcctgcgccctgcacgagtgcgacacgcaagggagcgcaggtgtcctcgcggtcccgcatcacatccgcaagccgatttccccagctcgggggctgttatctggcccggattccgcaggatggcgggtccaccccagcgcccccactccccgccctccttcgggtcgccaggccctcgggtgattcagaaattcatcaaatccaaatggcagcgggctctctgtcaggcaggaaacaagccgcaccgaaggctcggcaggttc

SEQ ID NO: 414023 - DNA, 513 bp, Homo Sapiens
tttttatgaagaaaagaggtttatttggctcaaggttctgcaggctgtacaagaaacatggcgccagcatctgcttctggtgaggccctcagggagcttccactcatggcagaaggggaaggggagctggcatcagatggcaagagaggaaggaagagaggagtgcgggaggtgccaggctcgtttcaacatcagctctggcaaaaactaacagagcaagaactcactccttcccgaggggacaagaggatggcaccaagaggcacatgaccccaagactcccagtaggctccaccaccaacaccaggaatcagatttcaacatgagatttggagggaccaggtatccaatctatccatccactccaagcatccatttgatacccagaatgcattatttcagcacccgtatccattcaacaaaactattttaaattataatcatgtaataggaataatcatcattttcctaattattcttcggtttcaaaaccaaaaattggcaggtcatggt

SEQ ID NO: 414024 - DNA, 492 bp, Homo Sapiens
ccctcatcctctgttgatcctgttcccaattgacccttgaacctggcgcaggaagtgtttttaaggccaacaagaaggacatcatgaccctaaatatatcctctacaagctgctacctaatgttttaaattcccccttaaacctttggtgcctttcattcatgtttgctaaaatgccacttaatctaatatgttgagctagtatcaattaactttacactacacagtagatacagggaacacaccatccattcccataccctgtgagatcatctaatccaaccctcttgcattaacacaaatctaagaacatccaccaaatgtccagatttttaactctggtactcagtttcttgaagtgcaaaatacagaagttgtattgaataattccccacatcccttcttctcatgatattctaaagagcttctgagcctgttttccacctataaattagacacattggtgaatctgttcttattcctaaccaaactg

SEQ ID NO: 414025 - DNA, 390 bp, Homo Sapiens
  misc_feature (315)..(323): n is a, c, g, or t
gcattatcatcccatttaatggtgggaagggggggttttcatttttttacaaatgaggaaacccaaccctaaaaatgccgaccaacttatttgagggcattttattttaaatggaaaaaatgggactggaacccaatcttttgacccctaccccaaactttggacaaggcccaacaaacataaaagtcttttccctaaaaaccttcccaacaatgggacccggccccccaacaactgtaatacatagggtctcccttaaatgcccaatgcaaaaagcttaagcaaattaccgttcaaaaacaaaatggcctgctnnnnnnnnntttaaagtttttatgaggacaaagtaaaaatggggaaatgtttgaaatttccctgaaaaaagccgaa

SEQ ID NO: 414026 - DNA, 480 bp, Homo Sapiens
ttttttcaatttaaaaagtttattttgccaaggttaaagatgtgcccatcacacagcctcaggaggtcttgatggtatgtgcccaaggtggttggagtacagcttgcttttacacattttagggagacacaatacatcaatcaatacatgtaagctttacattggttgtatctgaaacggtggaacaaatagaaagggagggggcttccatgtcataggtggatttaaaaattgtctgattggcaaattggttaaaagagttattatcaatataaataaatgtctgggtaataataaggggtggtggaggccaaggtttcatcatgcagatgaaacctccaggtagcaggtcttcagagagaatagattgcaaatatttcttatcagacttaaggtctatgttgatattaatgctggttggcttttcctgaactccaaaagggagaaggggtccattcatatagttagggaggcttaact

SEQ ID NO: 414027 - DNA, 520 bp, Homo Sapiens
gaatctggaaacgaggaaaagagcgcctagatttggctggtggttagagaaatggtgaagccgagtcagatccaagaatggggactttgaaaggtttttgccaacaagtatttctcagcagagagtttttccattgtctgaagaagaaccggtctgttttccatccctcagtctctgcagagatattgtcaccaccacccactttgttcatgtccttctttacccttaaaagactttgcttctttcttctccttccaaatccttcagaatccagctctattcccacttcctctgggatactccctggtgggcctgtccctctcctgtaccctcctacatagacccccttgtggcttgtggtcaactccacaccacttagcacaaatttgtcttcattcctagacactttgttgtggtttcacacatgcaaatcttcttccccaaaccagtcagcttctttccaagggcaagaaccatatcttctattagcttctgggcccaatgaccacgcctgtcagct

SEQ ID NO: 414028 - DNA, 171 bp, Homo Sapiens
cctcagatatgatggggtcaaggaaatggcaagttcctatggtcatcccttcttctggtaggatttttcctccactaggatgggtctgaatcggggatgaaagcgacttcgcttctgaaaatccagagcctttttaaagtaagccttcataaggaaaactgcaattgtcca

SEQ ID NO: 414029 - DNA, 164 bp, Homo Sapiens
  misc_feature (49)..(88): n is a, c, g, or t
aaataaaagcccattatgcaggattggggctctaacagcaaccatgaannnnnnnnnnnnnnnnnnnnnnnnnnnnnnnnnnnnnnnnaatgaactctgcctcaatgtgcggtaaagctggtgtttaaatccaacccaaaaaagctgctggtggccttaagcca

SEQ ID NO: 414030 - DNA, 342 bp, Homo Sapiens
ttatgtgcacataccatagtttatttaatgactcccccactgatgggcactgggggtgtccagtctttccattacaaacaatgttgccgtatcatcacacagatgtgaactcccaggactttggtgggctttttttgaccatgagtggtagaaacatggttccaccagccaaacgtgtgcacacaccatgctgcaactgctgggccacctgtctgtcctcccaacaggacacaagcttcatgggggcagggactgtcctcattccccatcgtgggctcaatggcacatgacaggtgcttgattaataaacactttggaaggactgagtaccatggttacagc

SEQ ID NO: 414031 - DNA, 182 bp, Homo Sapiens
tggaagaaatccggatatttaataataggagtctacataattatatatgtgcactagatgtcatgttttatgccattaaaatgacaagtgtgaagaatgtagcagcaacatgaaagtatacttgtgatgtaatgttaggagaaagagtatgatataaaattatgtagcagatcatctttatg

SEQ ID NO: 414032 - DNA, 428 bp, Homo Sapiens
actgaagcaacaactcaaaggttcattttattgggcatataatgtgtggcagctgagagagttatgctagggtgatatttaaagtatttgacaaccagctccactcaagaactgaactcagaacagtcactgagtgtgacactggcccggcgtcctgaagatccctcttgtgccatgaattagtccttccgttacatcactgttggaaaaggcgggggtaacaaggacgggcagccaggctggcaggtgcaccctgaaggccgtatagaagtgtttcactgttttaaccgctagtccagctggaccacgtggactggccaagtggcctggcttatggaaacctttcatcccactacacaggaaaaccagatgtcctttattctctttgagatatttactatgccaaactctgagggaaaaataatctt

SEQ ID NO: 414033 - DNA, 495 bp, Homo Sapiens
  misc_feature (292)..(292): n is a, c, g, or t
gcggccgcgcgttctccgctttcccggctccgtcgctgacgcgtcgtagacgttggggagcgggaaggcaacggcagcgggatcgggatgaacagcggcggcggcttcggtttgggcttaggcttcggcctcacccccacgtcggtgattcaggtgacgaatctgtcgtcggcggtgaccagcgagcagatgcggacgcttttttccttcctaggagaaatcgaggagctgcggctctaccccccggagtaagtgctggagctcggctgggggaggggcgcgggcgccatanagacctcgggagccgaggcgtggaggagagcgcggacgcgggcgcgcggtgcatgtcacgtgatcgcgccggcttaccttggtgcccatatttgattagggcacccgggttccgccgtcctgctctccttagtcggatttggggggttaactactgcacggagcccttaccaaggatttagaatggttgccctttctgtgcct

SEQ ID NO: 414034 - DNA, 485 bp, Homo Sapiens
aatctactagggtctttatttggaagttacatatgatttaaagagccatgtatagatgtcaagatcacaatggggtgaactatggtggtttcatcctgtgtcaatgcagctaagctaaaactatttcccaggttctctgtctgacctggttctgggtaatggcttgatcacagacaaatctacacaggatttagaaggtagaagtttagtaacagtcattatgctaaacaggctaacatggggcccgtgcccttggctttctcaggttgctgtgaatctgccaacttgttgggttaagtgggacagtgagcagcccacgctcctgcctctgctcttccaacttccaggccaggaatgtgtgcaactctctggaaaagtgtaccagcagtttcttctgcaaggcacctgtcagtgtgggatgaggtcagatagatgtgcactctagcctgtttttgctcgtttctacttctcatcctaccgtgact

SEQ ID NO: 414035 - DNA, 424 bp, Homo Sapiens
agagcttggcggggccgcctagggttattttgttattttctttgtattttataatgtcacttatcacaagacgtctggtggattgaggtgaagaaaagagcggacaagtggcctcttcctctgcgcttttatttaagaccagttagaaggtaaaactccatatatatttgctaccaggagtagcacacaccgaaggttcgacgacgaagaaagagaacatgttctcttttgtgcgaaatacagaaactagagaagagataatggagaaagcctcgaaacacaggatgaaagagagaagagcgatttgctatcggcctgaagtcaccgacgtgagcttgatatgaatacccgtgtgttgcgtgcgagaaacagacctgtgccgtgttggtcgatagtgggacaattctttattttcgtctttcac

SEQ ID NO: 414036 - DNA, 148 bp, Homo Sapiens
ccccaaaaaggactctttgtttcacaactggatcataatgcaaaaaaatcagtttttccccccgtcggttttttttggggttaaagcaaaaacccgtcccacttttgctcaccattttcaccaaaaaggttgttgacttgctcttggc

SEQ ID NO: 414037 - DNA, 476 bp, Homo Sapiens
tttcctgcagaccatgccatgagattgaaggttggactgcagtggtgcgatcatggctcacatgcagcctcgacttccctggactcgggtgttcctcgcacctcagccaccagaggagtagccgggaccgcaggtacctcatttttaatagatttttgactaattatggccaaagactctcaaagaatacaacacaataaacagccaaataattttattcctaagttgttggggtgatcagacccaacaccaggccgtgggggatacgaagtcccgcggaatcaaacccatgagaaaagacaagagagaaagtcggaccaggggcccaactatagggaggctgggaaggccctgagctctgggagcccaggctatttattggtgatcaaacaaagaaacaggtgttgaggattgtaaggaagcagtgtatcaagcgaatgagctacagctgtgatggtttagcattttctttgaaa

SEQ ID NO: 414038 - DNA, 382 bp, Homo Sapiens
  misc_feature (228)..(327): n is a, c, g, or t
gagtagccaaagcacattttgtggaagaaatattatcacattgcattgcaggagacgagctgtgttaaatcctcaaatacttctcatttattaaacaagtaactatttctctccctgctgggctccagataggctatcaaaagatttcacgatcaatacctagatacatagttactgctctaattattttaatgagtgaatttaaatcttgcataggttcttgttatnnnnnnnnnnnnnnnnnnnnnnnnnnnnnnnnnnnnnnnnnnnnnnnnnnnnnnnnnnnnnnnnnnnnnnnnnnnnnnnnnnnnnnnnnnnnnnnnnnnngcattttaacaagagtctctttgattcaagtgcacataaaagtttggcacatagt

SEQ ID NO: 414039 - DNA, 416 bp, Homo Sapiens
  misc_feature (270)..(299): n is a, c, g, or t
  misc_feature (393)..(393): n is a, c, g, or t
ctgtccttcgctgcagctgtaaaatcgcggcaaggcaggattcatcctggtggtgggtgcaggccctgattcccgtcactgagcagggatacagcaggaagctccacctctgagcacagcaaggggattgttctgattctgagtgtgtctgtttgctagagcggtggccacacttccccggtcctgcaattgtggataatttagcatgacttgttgggcattgcaaatgtcatgtcgtggagagtctgggctctgttattttttccagcnnnnnnnnnnnnnnnnnnnnnnnnnnnnnncatgcacgcgcacgcgtgtgtgtgatgagaccattaagttggtttgacagactgcaaactgcctgttgaacagcagctgaattcttaatttggntcttttatccttcttgtgtttcg

SEQ ID NO: 414040 - DNA, 484 bp, Homo Sapiens
  misc_feature (71)..(85): n is a, c, g, or t
  misc_feature (470)..(470): n is a, c, g, or t
aaagcaccgcctcaccgcctccagctggagccatgctgtgaaatctctctccctggcaaatgtgcgtggannnnnnnnnnnnnnnaacatgcacgcatgcgctcacgcacccagcattagagtcaaacttgaatgtcaaactcttctttccccttctagttcatggcaggaagggaaagcttacctgagatctcagtgactctccagctattttgggtaatttctgatttgagttgggattggtttttaaacacaggccctaatctggggtgaagccagtgaagcagcgctggccaggagagacgtcagtcttgctaaatcctgaaggtgggttcctgtgaaaaccatgctttcaggattcactgtgactgtcaggccagcccagtgagtgccccccatccaacccatggttgcggtcacagtgaagggattgcccacgcaggggcgcacgtgttcctctagggcagggncccctctgacagga

SEQ ID NO: 414041 - DNA, 181 bp, Homo Sapiens
aacatttccgccccttgaaaaagtcatcacatttcccctatctctccttcccctatgaagaagggtttataagcatctggacttcactacattattgggtaatcattctgtgattcttccatgttatgtatgttaaaataaatttgtacacaaaataaaactgcaataggagaacaatcct

SEQ ID NO: 414042 - DNA, 483 bp, Homo Sapiens
  misc_feature (16)..(16): n is a, c, g, or t
ataatgtttatttttntattgatattacaatttggagacatttttcactcacaatttttgaagtgggtgaatttcagtctacagtttttatttttagtcacttcactgtaggcaactctggtaattttctctggaaaaattttggagacgaagttgtaatggctttcaggttaaaacatttcctgttattttgcatgcaaacttgtttacggtgttcaaacagtggccaatctttaggtcataaacaacacctacccttttaatgtctttcataccattgcaattagcaccaaaaacttctgctgtcttaaacttaaaataaaagccctaatgtacgttggctcctcccatgcacggtactgagttcagaacatgctgttaaatgtcagagttcctatggttatgactgaaaaattaaatgacaagacagcacaaaactatatacttttgataccatttagccaagttaatgacaaagacaga

SEQ ID NO: 414043 - DNA, 174 bp, Homo Sapiens
taaaattaagaaaatgattccacttataattgcattaatcataataaaacacttaggaacaaatttaacaaagtgcaaatttttatgctttgaatagtacacaacattactgaataaaattcaatacatgatctctatcaaaatccctttcttggggagtttgtaaaaattgcc

SEQ ID NO: 414044 - DNA, 416 bp, Homo Sapiens
ctgaatttattgctatattcatattactatttttcatttaatactatattcgttttcttctcatttcaaaagaaattaacatttaaattttttctggtctatgcactgtgcctgttgtacctaattgataagcctgccaggaagctggtcctccagggaaggtagcagccacctccagagtgccagccacctcccgagtgcccaccacccccgtctcttccttcaggcttgtctcacacatcttgatggtctctgagcacctgttggcatgttggtcacctgtttgatgacgtctgctctcctgggagagccagccgagcaaacaacagaatgattatggcaataatgggggaaactgcatgagcaagcgatggacagaatgaaggtcatttgtgtagtcaccttgagggtgactt

SEQ ID NO: 414045 - DNA, 469 bp, Homo Sapiens
agtaatgctagatctgggaccgaattcagcagaaaaggcgagcgaatgagattttgctacactgaagtttctgagtatctacaaaagtcttaattatgaactaatttttttcttacatttcaacgtactccaaaaatacgtcagaggccttaaagaaaattttatttgtttttgtatgcagtgggggcaggcggtcttaaaaagtaaagtatgtatgaaagtagaaggaactcatagtgacataaatgttttaaattctttggagaaatgtgtttgataaggcaacattgttataaaagtagaggtctttgtttctcagttggaaattggtcaaaacttttaaaaggcttcttgaaatagaattgtttcttaggaaatctcatttctatgctaagaccaagtcaacataggggggaattcgacgcgatctgaggcgtaagtcaaagcagatcatgaactcttgcagcaa

SEQ ID NO: 414046 - DNA, 151 bp, Homo Sapiens
aaaaaaggtaaatgcagagtattccagagattgtgacaaactcttagctatttctatgtttttgagatttccagcaaggttgtgccaatggctggaggggatagaagaggtggtccattctagggcaatgaagtgagttagataatttttc

SEQ ID NO: 414047 - DNA, 289 bp, Homo Sapiens
tctagaactagcacaaggcaggcctagaccctcagtcaccctgcaaggcaggcccagaccctcagagtcgccctgtaaggcccagaccctcagccacacggcgaggcaggcccggaccctgaggcaccccgccccatttctcagaggaaacgaggtgcggaacgtagctagctagcaggaatctcgggttggcctccaccgctgactcaaggcctgagccctgacctgccgagttcgtatccagcagctgctgacagccctgcttgggagcatttcagtctcccccagg

SEQ ID NO: 414048 - DNA, 259 bp, Homo Sapiens
aactgacttctggttcccatttttccttagtcttaaataatctttcttttgaactaccacagacacttatttccacctatattaagaatcatataacttaagaaattattgtttatatcctctctcccttcctagattgattagaaattacagaaactatgaaggtaagaagtacatcttaacattatatcctcacagtgcacgtgccactgtcttggtcccaaccaattcagtgtggctcatttaccactatatatta

SEQ ID NO: 414049 - DNA, 104 bp, Homo Sapiens
actggtgttctcggacaccatggcgatatgatgctctcgggctggcgaactcatgttgccatgcctcacccgtgaccatgccagaaggcttgcgtcggaccatg

SEQ ID NO: 414050 - DNA, 143 bp, Homo Sapiens
ctcccaaagttcaactactataattcttatgcttgtagagcttggagtccagggagagcttagagttcagagatagttaaacagtaaatcataaagtttcataggcagtatggaattttagtaaggacctgatatgatttagt

SEQ ID NO: 414051 - DNA, 354 bp, Homo Sapiens
agattttttcaactttatgttcacttacatttaggcaaatgggaaaaggttggaggtgcccagcctgcccagcctgcccagcctgcccagcctgcgtggttttgcggtggtcccacactgaatcacctgtcagagggctgtccatggtccctcgggcctggggtcttacatccccttgtcaggactgcaggcctggcactgctgtgtggctcaggggtgccgccgtcccgcactgatgaagggctgaccgcgcctgacgccattaattgagcttcctccgagtgggacgagcgagcgatctcatttctaggatgatcaaatcctgccagggcttgagcaaagctactcaatcat

SEQ ID NO: 414052 - DNA, 175 bp, Homo Sapiens
ggtttcaattttatcaacattttttaactatttcccctggctttccccaacaaaagggcaacccaaaacattttgccaaaaaatttttcctgccaaaaatttatttttgggccggttttaagggaccccccccattatattttttttcaattccccggaattttcagggaaccgg

SEQ ID NO: 414053 - DNA, 404 bp, Homo Sapiens
tttgctagctttcaggtaacattctggctaccaaaagaaaagcaaatactgaagcatgtccagtctcttgctcttctaatatgaactgggctgcattcactagtttgacaggttcaggttgctgctatttatcaaatattttgtcatatatagcaaagaaatcagggagttatagtcactcagagattaagagtcaattcttatgtaaggacttctaatcccaacaccaggtataacttaacaagtttagagaacttcactacaggaaacagtgagaagcagtaagaaacaggagtaaattatcttatataagacatggtgatgagattacatatttgaaaaaaatttcaagtgtcaaatacctttttaaagtcagtcacagatatagataataagaaccaaaa

SEQ ID NO: 414054 - DNA, 261 bp, Homo Sapiens
tagtatgttgcccaggctggtatcaaactcccgggctcaagtgatcttcccacctcagcctcccaatgtactgggactacaggtgtgaggcaccgcacccagcctcctcaatgactttctcactggcatctgggaactcatctgctgcctctggttggcagaagctgcttctcctgccatcttgacattttttaagccatactctttctaaaattatcaaaccatcctttgctggcattaaattccccagcttgagatcct

SEQ ID NO: 414055 - DNA, 127 bp, Homo Sapiens
aagaaaaccccgtaatgattcccgggttgagggataagaagaaaatgggggaaaggtgttttaacccaagggtgttttctcccgcaaacgagggttctattctctcaccgcggcggccgcctgaccc

SEQ ID NO: 414056 - DNA, 828 bp, Homo Sapiens
  misc_feature (113)..(113): n is a, c, g, or t
  misc_feature (115)..(115): n is a, c, g, or t
  misc_feature (208)..(247): n is a, c, g, or t
  misc_feature (281)..(297): n is a, c, g, or t
  misc_feature (301)..(303): n is a, c, g, or t
  misc_feature (311)..(313): n is a, c, g, or t
  misc_feature (320)..(336): n is a, c, g, or t
  misc_feature (437)..(445): n is a, c, g, or t
  misc_feature (548)..(556): n is a, c, g, or t
  misc_feature (739)..(770): n is a, c, g, or t
ggacctttcaaaggggttttatcattaaattaatttctaaccccatatttcaaagatttaaaaattggaatgtaaaagggggggcaagcccctcccttaggactggaggcggnancagggacaaacccccccttaaccgggtgagcgtgcaaaaaacatacagccgagcaggttgccccaaacacttagtccagggtgaagctatcgnnnnnnnnnnnnnnnnnnnnnnnnnnnnnnnnnnnnnnnnaggaaaagtgcaggtttttacatttagagttgtnnnnnnnnnnnnnnnnncggnnngggccccnnnttttggnnnnnnnnnnnnnnnnntgaaggaaccgccggtgctgggtggataggccctttctcctggaggcccttttccctgcctcgcctgggcccttcttcccaacagaatccgttctgttcgnnnnnnnnnagaacagcctcgcttgtacccacgttgagtcagtgccctacaagttcattgacccgctcttcctgataagcgattctccctaccttacaggtgtgataaccgnnnnnnnnnacccattattctgatttataggaaccgcttctacctttgccgcatgtcctaccttcactaactcattctctctctttcaaagtgtattatccgtctcccactcccgccatgctctctactcaccattatctaacacaccactaccttctcatgcctcactcactttctatctcctactctcgnnnnnnnnnnnnnnnnnnnnnnnnnnnnnnnntcttttactctctttcatttatgctcctactccatctctcctttcttcttacaccaca

SEQ ID NO: 414057 - DNA, 360 bp, Homo Sapiens
taaaattgctttcttcggcaaaagtctctttactgaagaaaccaattaacccctttggttcctttaaaaaatatgacgaatataaggcaacatggctgggtggacagtttaacctccgagaaggacacgtgcaaaagaactcagattcaggaacagcccccttggaggtcagaatgatatttatgacacggtcaccgggctgaattcaaacctcaagggaatgaaagtgagtaaatagggttcgtcttgttagcaaaaggattatttacttctgagaatatatcgttaacacatcccaggctcagagaagcaggtggtttcacacagctgctcgcttctgctgatgatggcactgaatca

SEQ ID NO: 414058 - DNA, 327 bp, Homo Sapiens
  misc_feature (265)..(265): n is a, c, g, or t
ggactactccacagccctatagcttgattgcgaaactacaaaacatttctcctcttctgcttctatgcagcctggaagctaatctggtatactggcttgaaaacaaggatcaagtgtctttttgtaacgctctcacatatactgtaatatcgcttaaaccactttggaggaacagaacaacacacctctttacaacagaagaactggagttcacatctatccttcacatcaaacaatcagactttttattcctttgaccacaagntcacgaaaacacggaaagactgaagcttgggagtattcaagtctcaactctgtctgctgtcc

SEQ ID NO: 414059 - DNA, 404 bp, Homo Sapiens
taatttttgtcttctagaatgtaccagtaatttctctgaggccaatcctcacctgagatacgtgtgtgtgttcactggcaccaatctatgacattttatgcatacagaaggtagacaatatttgtaaaccactgaaatacctcttggtatttgtagaatttcatataattccttatctacttggccattgagaaatgcttttaaatcataatattgcctactagaccaacataaattcattgtactcataacccaatccttcagggaaggtcctattttgattaaaaatgaaggagtaggaggaggtaaagcttttagcatattgatagaactgttactaatattgtattactgtcctttataatttaaggcaacatcactaacaaagattagggaaaagatca

SEQ ID NO: 414060 - DNA, 123 bp, Homo Sapiens
cccaaaaatcccacccacaatttaaaggcccttccctccccccccgctcaaagggggggaaactgtttaacccataaaaaggaacggggggctccccggtttaaacttttgtttttccaaaaa

SEQ ID NO: 414061 - DNA, 157 bp, Homo Sapiens
ttttcataagaagggtatgaatccggccccacccgaacccggggtacgcctgcccaattcacaaaaaccgggagggtacaagtacggcttcggcgaccaaatatcctgcgcaaaactcaacggaaagcgccccataaccccttcccaacaacacaga

SEQ ID NO: 414062 - DNA, 248 bp, Homo Sapiens
  misc_feature (234)..(234): n is a, c, g, or t
ctcggtgtttgaatatatcagctggcatgtgtctcatccctcagacacgtctccaatgatttcacttttaatgggctttggcatttaaaacacatgcgaattgagctttttgctaattgagaagatatggaatggagaaatagccaattaggtattgtgctgcttgtctgacttttaaaacagtttctccccttcagtgaaaggtagtcaaagggcctctctccgaggagactntttagttagctctg

SEQ ID NO: 414063 - DNA, 276 bp, Homo Sapiens
gcaatccttttttttccatgaacagcatagttaagtgtatagattgcaggatccagatcggttagaggctgtgttgaatttgtggcctggaggctggtgcctggttatttggtgacttgcaaaagctacttttttggggcttgcagctcatcttagggggagctagattcacatgccttttaggttcaaaagtaacatccacattttactcatcccgtgctttttgcggtattcttcagagtttttctgcactgtttcataaattatgggtatctt

SEQ ID NO: 414064 - DNA, 266 bp, Homo Sapiens
gactattataaataatgctgcaaagttaaaaaataaataaataatgctgctatgaacatttgtgtacaaggttttgttcgagcacctgtttccatttctcttgggaatatacccaggaatggaattgctcggtcatatgataactctatgtttaattttgaggaactgtcaaaatgttgcagtcactggaacattttacctttctactagcaatgtatgagggttcaaattctccacacccttgccaacacttattcttttgtatt

SEQ ID NO: 414065 - DNA, 265 bp, Homo Sapiens
tttattagcatttgtggaatttattcccaaactctcctaatcttccgtacacaaccatttgatttgcataacccaaccccctctcataaaaactggctgctagtttaattaaaaaatgtaaatttgctgtcatctcggggcctggtgaattaggacgacatcggcattttttattgctaaagacgtccagattgatccagcccttggctgaactatggtgggggaaagggggtccacatggcccctgagggtcctgaggtccttc

SEQ ID NO: 414066 - DNA, 171 bp, Homo Sapiens
gattcatggactgatttattggaggcgaatacaccagggcatgcccaggacaagcaccattgctactccccctctgatggctgaccgacccgtagagggggctaaatgctgcaagatctgggctcacaacgcacaccgcagttgccagcctaagggcgcccagcctgggct

SEQ ID NO: 414067 - DNA, 273 bp, Homo Sapiens
tagtatacatcacaaattcttgcatgagtgcagctggaagtaaattccaattcaaattccctctgttagtaaattccaattcaacagataaatatttttgtcttaagatgcttaaagggaatgactgtccttataagagtcaactgaagcacagaacaggttaatcacttatcacatgtcttccttcagctacaagaaatggcattacacgccaagaattcctattcactaactagtgacttgctggatgtacagcctctttggatagtacgt

SEQ ID NO: 414068 - DNA, 403 bp, Homo Sapiens
gtggccttaattctctttatactcccttgctgactcatcacattctatctgcctatgaaatgttcctgtggttttctcttgccattccccacatccctttaacactttctttgaacaaaggctcaaaaactcaaatgcctgcagtggttaaacacatgtataaagtggtaggtaggatgtaataggtataaacctatttgtatggtaaccaagtatcacatctgctgggtcctactgctttttaaagcacaaggtgggcataataaaattgcccaaattgcccaaaattagtctgtgagcaccctctgtcagtgatagccaatttgtaacctttgcactacctatactcttcccctaactataccttctctaggatatcttatctataccgtaatacacaatg

SEQ ID NO: 414069 - DNA, 100 bp, Homo Sapiens
ccccattaacctttttaagggggcccaaaattctgggcccaaattttgggccagggggttcccttaaaaaagcccggttttaaaaacctaaaacctaaaa

SEQ ID NO: 414070 - DNA, 124 bp, Homo Sapiens
ccacgaggtgtgttctattttcattattcatacttataatcttttataatataccagggctaaccggataataaggtattccagattggggggagggtccctttaaagacccacaggccggtgg

SEQ ID NO: 414071 - DNA, 297 bp, Homo Sapiens
tttttttgagggaagaggtagctttatttggccaggaacgtcagcagacctgcatctcaaaaactgagctccccaagagggaaattcctgccccttttaagggcttacagttctaagggggtccacgtgaaagggttgtgatcaattgagcaagcatggggtacatggctggggccccatgcattggtagttaagacagaacagaacagaaagtttcacaatgcttcctcatacaatgtctggaatctatagatagcacaagcagttagtcaggggttgatatttaattagcagacc

SEQ ID NO: 414072 - DNA, 372 bp, Homo Sapiens
  misc_feature (126)..(157): n is a, c, g, or t
taaaggtcaacaaactctatcccacataaatggcaatgcagatataataagcaaatgatgataaaataagcaaattgatacaacaagcaaattacaatgggaaaggggagaaggaaaaaaatgtgnnnnnnnnnnnnnnnnnnnnnnnnnnnnnnnngatagactatggaagattgatcaccagaccgagaagcaacagcctgggctccagagtcagccattcgtccatgcacaaaggaacacaaaaaggtcaatttgtttttgccattgtctgttgtttttcaataactaacgtataggaatagattgaaatagagatttctctgaaacagtgctggatgaatgcctcaaggggctcacaaaacctattct

SEQ ID NO: 414073 - DNA, 273 bp, Homo Sapiens
  misc_feature (241)..(241): n is a, c, g, or t
ttttgtttttctagaccaattatattagaagctaattatttattcttagcaaggtaaaaacaacacaaataataacaacaatttctcttctgtcaatgaacagctgatcagatggtggcattaaaactcacaaaacaataaaagggaagtaacacaaattaagcttaagtctccatacagtttctgtctttgtactgaacacacgatgctgaattcaatcatttaattatgtgctctaganctgaagttcctttgatggagggaccatgactg

SEQ ID NO: 414074 - DNA, 264 bp, Homo Sapiens
gttttttttaatgaatcaatgctttattaaatgataaatccatagtctgtcgggttcaccgacgccagccatcggtgccatattgccacaagtgtcctatggtaaagcagtttttcttggtccattcaaattgggatgggaagcagacgtttttgtagaatacacctcccgggcagaaatggaattgcctccctgtggtgcgcagatggagaatgtcctcgcattgtggtttcaagtcctggtttgacggccccacgacctggc

SEQ ID NO: 414075 - DNA, 216 bp, Homo Sapiens
gcaattttatcttaccatctatccctgaaaaacgaaacactgctttttccgacccaaactggttccgaccctcctgacctaaaaaatcatcacctcggaggggaaaagaaacgctacggggaagggaaacgaacccaaccccaaagctccttttcctgacaggtttttttagacgggacagcgctgccctgtctgggcccggggaagggtctgaac

SEQ ID NO: 414076 - DNA, 158 bp, Homo Sapiens
tttttattttttacaaaaataccggccaatcccgcaatgctgcccactttttatgcacaccggggccacaagtttgtccactcctttgctaatgggcctgaaaaggcaaaacccttcatttcgcctttattggcacccgcgacccctgcataattttg

SEQ ID NO: 414077 - DNA, 342 bp, Homo Sapiens
  misc_feature (89)..(101): n is a, c, g, or t
gttaaggggggtttattttccaaatatcatatcctaattgcattcaaaaccatttttaaatccattttttaactattctaaaaacaggnnnnnnnnnnnnnaaattacttaacattgaacaaataaaaccttttaaaaggcagcttacttttttatgttaccatcatatccaatacaacatttttgccatactttctaaaaacctttttgtatacacttgatcatgctatttattagcattttttaacattctgaccaaacagacacccacactttttattgagtacactgttagagaataacatgtactttatattgcatcatcacttttttaaatcataa

SEQ ID NO: 414078 - DNA, 145 bp, Homo Sapiens
acaccatgccactttcattcatttctattccaaaggtctctttcaaggaaggactggaatctggatgttttcttgtggctttcaatggcgtttgctccgcttcttctgcagcctgattttctacttaaattccctgaaatccacg

SEQ ID NO: 414079 - DNA, 270 bp, Homo Sapiens
gtacccagtaagtctggctctacagctttatttaacaaggttattttaatccactcactccactgtgggacttcgcaagaagcccacatttttttagaagtaacattctgatgaggtgacatataaatatgatttcaataataaagtattatgtgccagctattctcattaaacaaacatttaaaatacattaaatatacatttgggtctgtgcagttccacagacttaagatctagtattctcctatggcccttgcatctctttttatg

SEQ ID NO: 414080 - DNA, 335 bp, Homo Sapiens
tttttttaagctaaaagggaaaatcaagtgctttaaagttaaacaaaagaaccaggtctgcaactccagtccccaccctgcagccttttgttctggggacaagtggccgtttccaactgcagaggcagatgacaagcatttattttttcatctaaaacaaggtttttctttcgtcttttattggggagggggagtggggaacgagggctgcgtgaacgccctttgtccgcctcgggctgccgtagagaccgcagtgcggactgcaccacgcccaccaaccggtgtctcccggagaaacgcttcagcaccaccccaggagaatagagcgcgggctg

SEQ ID NO: 414081 - DNA, 195 bp, Homo Sapiens
agacaaaacaaggatttatgtgccttggcgggccttgagtttcctaagatgggacttgaaccctttggcctatagcacatagccatctgctcggccacactgtcccggtctatgggcgatgcccgcatgaagcttgccctgctggaactgctcgttcaagagaatgctgatttctgcagcatgttgcctttcatc

SEQ ID NO: 414082 - DNA, 328 bp, Homo Sapiens
aggcccacccctttccccttccccccaccaatattccaaaccgggggcccggcagggggggagtaaataaaccaaagggcccccggaaaaggggggagggaaaaaggcagggccttgggttaaagggaaaattctgaggccccaggccaaagggaaaggggtttggataaaaacagaggcaggccctccctccctccacattgtgaggacaagcaggtggggaaaaaacaaacccctgcccggggctcttgtgccgcaccctcaaagaccagggtaaggccagaaataatgagattgcgcccttgtaagcgcaatattgttcaggatt

SEQ ID NO: 414083 - DNA, 156 bp, Homo Sapiens
tggattccctgccccatcctcaaccttggctgttcttggctcagctgcagctgctacacacaatggggattgcagctttcaaaggatccatccaactggccatcaagaatactcgactcattggtcacattcttctccataaaccacctgcatgcg

SEQ ID NO: 414084 - DNA, 173 bp, Homo Sapiens
tgctgtcaagaagaaaaagggaagggggcttgacaccctttatttactgccttcaacacatggacagtggagggtaaaaaacactttacacctcttgggggagcctgggggaactagggccctcatggtttctttgtgggccctggggcacatttaacgggccaagttttcca

SEQ ID NO: 414085 - DNA, 160 bp, Homo Sapiens
gtggactgcaggtgttaatagatccacagataagacaccttgacctcctggacgcctagaaatgggaccagcgacatttatggatgtggccatagaatcctttctgtaggactggctatgcctaaatacagcacagcgtataatgtatagaaatgagatg

SEQ ID NO: 414086 - DNA, 433 bp, Homo Sapiens
agcactgagactgtataggtgagcatctaagatgccttcctatatctagatgactcccaggagaggccagaaatctaagttcagcatttgacaaatgtttccaaacgcacttgtgaggactatcttggccaaatattaaatccagttcatatttataacctgacatgcaatgcattatcaaagtatgttccatctaatttcaccacttaaactttccagtaagatgaacttgatgacatggagcacacattcaggaaaaaggcaaagtgctattttgaaatactcagtgtgtttgctatggtagctataaaatgtggatgaaatctaaggaaaaacattttcccatttattaagagtgccatcggttatttacaaggcaggcagtccaggcattgagccatatcatgtatgactgcatttaccaggagatatg

SEQ ID NO: 414087 - DNA, 411 bp, Homo Sapiens
gtaacaatttgagtagaattggtattagttcttctttaagtgtttggtagaattcagcagtaaagccatcaggtcctagacttttctttgatgaaagacttttattactgcttttgtctcattatttgttgctggtctattcggcttttggatttcttcatggttctatcttgataggttataggtgtctaggaatttatccatttcttctaggacttctaatgtattgtcatacagtttctcataacagtctctaatgatcatctgaatttctgtggtatcagttgtaatgtctccctttttgtctcttgttttattttgagtcactctccttttttcagtcagattaaagggttagttgacctttgtttaatcctgttcaagaaaacaacttttccttttcattgatct

SEQ ID NO: 414088 - DNA, 277 bp, Homo Sapiens
  misc_feature (99)..(140): n is a, c, g, or t
ccagcccccaagacagttttatggaattaggggcgggcgggggcaatttggttcttcccatgagccgcaaagtcgaggggtaaagggcgggacccaaannnnnnnnnnnnnnnnnnnnnnnnnnnnnnnnnnnnnnnnnncctggttacttggggacctgcaaaactttctttggggggcctgcacccaatttgggggggagccggactaaaatccccccgtgggggcaaaagcaacatccacatttcactccccccggggcttttggggggattcc

SEQ ID NO: 414089 - DNA, 166 bp, Homo Sapiens
  misc_feature (41)..(59): n is a, c, g, or t
ggaataaagccccatttattctagggcaaacccaaaagggnnnnnnnnnnnnnnnnnnnaccaaaccctaccccattattaacaaaaaaatctggccatttgccatgatccccttgaaagggaaacaaataaaatataaatcccgatttgggtgtaacatgaaaaa

SEQ ID NO: 414090 - DNA, 373 bp, Homo Sapiens
agggttgagggggaaagccggaaaatgtaatggggttggaaacctatcatataaataatgcccgggggaaggggaggaaattttttcataagaagggtatgaattgggcctaaccgaatccgggggttgccgttccaaatcctaaaaaccgggggggtaaaaataggggtttggggaccaaatattttttgtaaaattcaagggaaaatgccccctatgttgttcccaggaaaaatggaagggggagggggttttttataaaaaagtttcggtattccccctttaaaaaatgggccaagggccccgccccctcatcaaatgttaaaccctcaacctattcggccctccctccggaaggacgaaagggttctcg

SEQ ID NO: 414091 - DNA, 319 bp, Homo Sapiens
gtcagcaaggtcaaaggttagtacacaaataactcaaagcaagacttgagctcagacttctcaaagagaagatgcaatttgcccacgttcacatagcctatgtaagagtccaataccttcaaacccagtctcactgcactactcaatagcagcaaccttcagaaatggatttttctaggcgcagagttttccaagtctcaccacacaaaataaaaggggagaacatatcccgttctctgtcccgtgctgccagtgagggtaatgactgacggccgagctacagggagacttcctgggcgactgtatcggccagctactg

SEQ ID NO: 414092 - DNA, 203 bp, Homo Sapiens
catgatcttattcaggagtctttattttggttaaggagggtcgtaggggaaagaggggcagcaggtgcttcattacatcacaaattctttgctgcaggctctgcgtggggggtgagcagaggacatcaaaagaaactgaggcggcctcggaccccctggcaggagctcttcactgggacccccagccccgtttgcagcccatt

SEQ ID NO: 414093 - DNA, 350 bp, Homo Sapiens
tttttttcaaagctaaatcgttttattgtttgaaagggcaaatgttccattgccacacagaatgtaaaaagaaaataatcaacattagattttaaatgcaggtagttatttcagatgtttgaaccataaacaaacaaccattgctgaaaagcttcttaaaagcttgaaattcagaacttcagggtttcaaaaagtcagaagaatagcaaaatcaagtgttgacttttaacctgccaggaagctatattatattattttctcatttcaacaatgtccaagcccataaaagttaattgcaagaatttaggtatagttttaaaatcccatgtcctcttttactattaatagaa

SEQ ID NO: 414094 - DNA, 208 bp, Homo Sapiens
  misc_feature (95)..(95): n is a, c, g, or t
gtgtgagccaccgagcttggccaccttttatttctatgttctgactgctccggctatgacttccagcactatgtggaacagagggggtggtaggnagaagtgggcatccttgtcttgaaccagttcttaaaggaaagtctttcagcttttcctaatcaatatgatgttagctgtgggtcatgtgtatctttcactatattgaagtatg

SEQ ID NO: 414095 - DNA, 423 bp, Homo Sapiens
  misc_feature (203)..(203): n is a, c, g, or t
cacatttaacttttattaggataaacgcaaagcccaacagtagctctatcaaaggtcttgattgtttataaacagtaaaatctaggtattacataaaattcaaaaccaattactagagaaatacacttttttcttccacaagacactatttctcaaagatgatcaccagaggggggaggcagtagtttacggaattggcctantcagcatgaaggtaggctctgaaatgctgctacttactgaattttgaatcatttctaacattataataattaaaaccattgtttaacaccaacatttcaagttcagtttcaacataagccagaacacacccagatggtgctgacatgcaaatggctctctagatgtgaacagcattcatctattgaatgaaactaaacacatatttacatatagtaaagg

SEQ ID NO: 414096 - DNA, 498 bp, Homo Sapiens
gatttttcaagtgcggttttaaatgaagtgattttatttaattacaatgtattgcatttagcaaagaatactttcacataccaataactgtgcacgaataacagagtaacactgtgttttgtgtaaactttcgttgatgtctatgcatcaaatggaaaaacctttcctgttgtccccaaaccacaagtcttctcaaagtcccccaacactcccaactcttctaacttaatgatactttaaagcatttacgcctctcagttaatgagttcagctaaagagatgtaaagtcaattctctgcaacaagatcttgaaacagaatctgaaaccactgaatatagtggtatataagagcaccttgagaagctacgagttagaactttcacataagagcctattttgggatttgatgtgcatcgtttcaacttcatttaataagtaatcatgttataattaaaattttaatcaccatcttactcttaacctgacctaaaaaaaca

SEQ ID NO: 414097 - DNA, 156 bp, Homo Sapiens
gtgtgagccaccatgcagcaccctgtgtggcattctttatagaagtgagaaagttaaaagatccacctgtcttcattcccagcatgctccaacaaggatgtagaaaagtgagctcctgtttcctaacacgaaaacatgtcaatgttcaaaacttgc

SEQ ID NO: 414098 - DNA, 314 bp, Homo Sapiens
aatctttaagatacataccttatactgaattctgattatatgaatatttatacataatataaaacattataggaaaatgtcatttaaaattgctaatatgcttgcttcagtgttaagcaagtcaatcaactctcttggcctcagtttcttgtatgtagagcaatcttctctgttgaaattattctctggaaaatctgacatttcttgatggtttttacctattcagtcaagaataaaagtctatttttttctcatcttaaaagaaagtaaaagaataatcacaaggaaaaatgttaatagtgataagaatggag

SEQ ID NO: 414099 - DNA, 429 bp, Homo Sapiens
aatggcttcttgtcttctgttcttccttaagtgtttattttcctgggagttttgctcttggtccacttcccttattctacatgatctctcaagatgatcttatttactactctcatgaaagattatcattctgtatctcatccagactttttcttgagctctagatctataatacttaatttacataaaactcaaaaccagttattttttccatcaatagtcactccgcctctgtgtttcccatgataagttaatcttaagccagaaatgtgagaataatcctagactctattttccccccatctcaatttccacatcatctatttggaagttctgacagttttatctcctaaatatctctcaaatccatgttctcttctactccattgctattgccttagcagcactaggctctttctagaactattc

SEQ ID NO: 414100 - DNA, 230 bp, Homo Sapiens
gacagggaaaaataattcctcttttatttgattttgtcagcaaacatctgctgcatgcttactatgtagcaagcactcttcaagcactggggatacaaaatgaaatctgacctcgtggaggttacagtcaagtagggaacactgacaatgaacagcaattaaaaataggatacaataggacaggcaaaggtacttatactgttagtggggatgggagcaaatgggagcaa

SEQ ID NO: 414101 - DNA, 157 bp, Homo Sapiens
tattttaaaagtattctatatgtaagtgtatatacatgtataaatatgcaaacacacattttatgctaattcagagattgacatagttttatatctacttaaattttttttaggattctaaaatattaacatgcaagaacatactgggaatatcaca

SEQ ID NO: 414102 - DNA, 312 bp, Homo Sapiens
taaatagtgcatatatcctttccctaagtttttgaattgaggacacagtctatgacttttgatcactgggcacatattgggaattgccaagctttactctcatgaacagaatctaactgtaccccataaaaggtcctgcactgttactacaggtgaaactgatgagaaattgaagaagaaagcattgatttgtgtggcatttggtggccaccagtcatttcatttgtattcagtatattaaggattttaatacagaggtttggaaaatatcgtggctgagccagaaaatgtcagctagggtcaaatttagtg

SEQ ID NO: 414103 - DNA, 284 bp, Homo Sapiens
  misc_feature (115)..(135): n is a, c, g, or t
ctctttgaatttaatgtgtttacatcaaaaaaatagggggccttttttcattttagggataaaaacccttaaaaaaacacttcaaaaagggaaaggggtttaacccaatttacannnnnnnnnnnnnnnnnnnnnaacaacaattcgcctcataataacttaatgcaatgggcaaatgcggcccccctttcaacccttaaacaaaatttaaggaaattccttgttaatattgacccccgggggaaaagggggtctctttttttaaaaaccctttggggtttaag

SEQ ID NO: 414104 - DNA, 271 bp, Homo Sapiens
  misc_feature (214)..(214): n is a, c, g, or t
ttttcaggtcattacaaagaaaaagtgttatttcacgtaagagttaacacctttttaactaccagcgatttgacccatgccacgaagggaaaggatttcttgagaaaaccccaatatctaaggaaatggccccaatttatttatacttggagcaggacagagattaagggaacagtggacacctacactggagttgtcactcctggatctattnggtggtgccttcagtccatgaaaagtgaattgtacagtaaagatggggtcagcatgg

SEQ ID NO: 414105 - DNA, 385 bp, Homo Sapiens
gcttactctaaatgttctcctttagtgatagcttcaattccctagcctgatacactccatatctacaaacccagccctgatattgtgtaaaattccagagagtacttccaaacaacacctgaacatgtgtacctgaaatgtcctacaggtactaagagcttatcatgttcaaaactgcacatagaatcttctgtggtagtgaacttccatacttcttttcccttctgtattatgtgtcccattatcaaacacccagtcggcgaagctagaaaaccttgaattcatgggggactttttctattctctcaaccctgcctttgcctccactacttccctccccacatttgggtgatcaactgatccactgattccatttccagattat

SEQ ID NO: 414106 - DNA, 296 bp, Homo Sapiens
tgcctcctctgaccatgtatttccaaatggcctgtggtcaaagctcacgaattctttcttctgcttgatcatttctgctattaagagactctaatgcattcttcagtatgccaattgcatttttcaactccaaaatttatgcttgattcttttaaattatttcaatctccttgttaaatttatctgataggatactgaaattttctctgtgttatcttgaatttctttgagtttcctcaaaacagccattttgaattatctgcttaaaggtcatttatctctgtttctccacattg

SEQ ID NO: 414107 - DNA, 116 bp, Homo Sapiens
ttctgctttgtggaaaatgggaacttaggaaatcatccccgttccttcttctgtgatgagcagattttctcactattcaactccaccaggtactaattgagtgccccagaatctac

SEQ ID NO: 414108 - DNA, 541 bp, Homo Sapiens
aacgttatctataaacacatctacctccactgactggcaaaattcctgcactgtaagtcagcctggcagattccaccctggaggacacacgcgtgaatgctatttgcccatcctctctgagtataaatcctggcctcactcttcctctgtgtgaaagccctgcctgggttttctccccagagcgagatgtatatggctctcaggtgcagacccatctttttatccaaagcactgggaagcctcaagctggagcctcagctccagggcatcaggcgggaagttggcaatgttcagggccgagatcactcagctgctttgacgggcatccccgggactgctgacgtcccaaggcactgacaggtggctgctgagtaaacggtcatttgacctatatgtttgttttgataaatgcccgataggaatgtgctactggtaaatttcagttctcaggaaagatattgatacccatgacattgctcatttcctcagctgtgcaaggcgaacgctgattaccctgatagttaactcactgaaaacttgg

SEQ ID NO: 414109 - DNA, 383 bp, Homo Sapiens
ggatagtcttccaattataatagtatgcataaattatcagaggtaaactttaatcaacattatactatttcacatacgtgtaagcacatatacaatattagctcataatttttcttgtaaatttgtttgtgttccttatagatgctggatattacacctttgttagatgcacagtttgctgaaattttctcccatcctataggctgtctgtttactctgttggtgtttcttttgctgtgcagaagctctttaattagatcccatttgtcaatttttgcttttgttgcaattgcttttggcatcttcatcatgaaatctctgcctgtacctatgtccaggatggtattgcctaggttatcttccagagcttttatagttttggg

SEQ ID NO: 414110 - DNA, 122 bp, Homo Sapiens
agtaaagttcttttattcggatttaacctaaaaaagttcgctggatccctcttggatagaaaaaagaaaaccccagttctatagaccataagggaaaagaatggaattggcatattcccaat

SEQ ID NO: 414111 - DNA, 413 bp, Homo Sapiens
  misc_feature (215)..(215): n is a, c, g, or t
gccttatttggattgaatttgtccttcattttctagtttcttaaggtaaaaacttagattattgattttagatcttttttctattctaattatgcattcaatactataaatctccctctaagccctgcatcccacaaatattgataagctgtgttttcatcagttcaaaactattttaaaatttctcccgagatgctctctttgacctatgtgtnatgtaaaaaatatgcgtgctactctccacatagtttggtatttcctaagtatctttcagccaatccaagtaatgtaggagctaatcaaaagcattctttatttctgttactatccactttatctctagcattacttttggttattttttcagaatttccctgtatcttcttacattactcatctgttcttgaatgttg

SEQ ID NO: 414112 - DNA, 382 bp, Homo Sapiens
  misc_feature (50)..(164): n is a, c, g, or t
  misc_feature (364)..(364): n is a, c, g, or t
accgtgcctggcctcaaaatgactattctaccagcaaaacagaaagtgannnnnnnnnnnnnnnnnnnnnnnnnnnnnnnnnnnnnnnnnnnnnnnnnnnnnnnnnnnnnnnnnnnnnnnnnnnnnnnnnnnnnnnnnnnnnnnnnnnnnnnnnnnnnnnnnnnaaataagctattttagcttagtagaatccagacaccatcagctattagaagtagtaggttccatagaagatgaagtgtgttatggtctgaaaataggaatattatctcaaagtctgtataataagcaattaaatccccaagtctctactccaagccaggcagtcaagcaattcctttatgacacattcattttggaagtncagacatttatcttctca

SEQ ID NO: 414113 - DNA, 410 bp, Homo Sapiens
gaggagtcaccatatcattttccacagccgctgaaccattttacattcctactagaaatatgcacaaagtgttctaatttctctatattcctgctaatacttgtaattttctgtgctttttcttaatagtagccattttatgacataaagtagtatttcattgtgattttgatttgatttcagtaatgattagccatgtggaacatcttttcatatgcttactggacctttgtatatcttgcttggagaaacacctactcaagtcttgcgcctatgtttttactgggtttttctggtattgagatggcgcattctcaaactcaacatttcatgttggcctcctaatgccaaccttctgactgaatcaaaggtagcattcctctgacaggccaatttaaatattgtagtat

SEQ ID NO: 414114 - DNA, 478 bp, Homo Sapiens
  misc_feature (447)..(447): n is a, c, g, or t
gattgttactattaatagccagagtcagcagaaaaatcccttcccccaatgaaatgcatttccgcaagcataggaagctctgtttgttcagtgctgactccggcacctcacggagcctgggatacagcaggcaccaagacacaccttgtttggtgggaacacttccagtattctcacttcaaactatctcagatttgccatttctatatcctaaggcatgttcccattctctaacgcaaagggttccctctttcccagctggcctccaaccctacaaaagcactgcagggcatcactcagccttctgtgccttagtcacgctgttcttctcaccgttccacaaagcctccctcaagcccagcctcacctgaagaccgaagggcacgggcctctgaaaatgtcagcagggaacctgttctcttgtgtctaacaccaaatgcctttcanaataggactaaagcagtggacttcttcctag

SEQ ID NO: 414115 - DNA, 120 bp, Homo Sapiens
ttctggggaggacccaagggggttttattttctgggtagggcctggggcaggggggttgaaaaaccccccctttttccaaggggtgattatgcaaagggtgccctgatgccaaaaatccc

SEQ ID NO: 414116 - DNA, 475 bp, Homo Sapiens
  misc_feature (296)..(340): n is a, c, g, or t
  misc_feature (437)..(437): n is a, c, g, or t
taaatatgaggtctcactctgttgcccagctggagtgcagtggctattcacaggcactcactgcagtctcaaaactcctaggctcaagtaacccccctgactcagcctctccaagtagctgggactacaggtgggccctagctctagaataacaacccttgaagagacatctaactaactgggttgaggaaggagacaggacaggtcttaagctatgccattcaatatggtaaccactacaataagatacaatgttaaattccattcctcagtcgcactagccacagttcaaggcnnnnnnnnnnnnnnnnnnnnnnnnnnnnnnnnnnnnnnnnnnnnnaatataagaacatggccattgtcacagaacgttctattggagatgcaaggtgtcaaggaaggcacttggagatagatgaggatatttaagtgcctangaagaaaagcaatacagagtgagaaatctggctacaac

SEQ ID NO: 414117 - DNA, 268 bp, Homo Sapiens
  misc_feature (191)..(191): n is a, c, g, or t
  misc_feature (195)..(195): n is a, c, g, or t
ggggggatggggcaagaagggcttaaggcccttcccaaacaaaaaaagggcccccaacggatttgggcccttttaccaaagaaagggggttttattccccccgggcaaaacttgtccatccaaaagggggcctcttgcttcaaccgcgtaccgggtgggtaaaaaggaaaatccaccccggtttttaacangccncttaaggaagcccttttaaggtcaaaaaaaccccccaggcccctttaaaaaaatgttggggtgggaaggggca

SEQ ID NO: 414118 - DNA, 101 bp, Homo Sapiens
ttttgaaaataaaaccggcaaaatgctaaacccagggtttgttgagtccccaagggcccccaatccctcggcccctatttgaaaaaatcaccccccggggg

SEQ ID NO: 414119 - DNA, 413 bp, Homo Sapiens
  misc_feature (249)..(258): n is a, c, g, or t
ctcccttgcttccccctccacaattcttcctgcttcacttttggcattttcttcggcctgtgttcctttattaaagtacagcaatcaggcatgactagaggtaccgttattctctccactgtgaaataccaagaaaaatacacacagaagaaaaggcacaaaatgtaactccttttttcaaaccttccctacacgttgatatgaactgcaacatgccttaatagaatacaatctttttgagagtttgannnnnnnnnnctgtagtttgcaaataatatgaaaaaggatttctttaacaaatgctccaaagaaaagcactccaaagcttttgtccaaactgtatttgggacaacttcaaggcagctgaagctgtctatgaagataagcaggcgtccacagaatgaattaggctt

SEQ ID NO: 414120 - DNA, 167 bp, Homo Sapiens
tccaagagggcacaattttaggggaaaccctgcaatggggggtggaaaccggggaaccctttactgaaggctgaaccctggctggcccactaggcctggcaacactggagggcaagcagggaaaataggggggggtaccccaccctggcaaatgcacgggaattaaa

SEQ ID NO: 414121 - DNA, 227 bp, Homo Sapiens
  misc_feature (136)..(138): n is a, c, g, or t
catgggacaggaaaaagggggggaaataggaccatttacaaccccaaaaaaacctttgtacttgtttagcccctggcaaaggggggcaacagggcaacaccgggctggacccccccctttttgtaaagggattttnnngggcccagcccgggaaaaaaggtaaaccttgggctcggacccctaagggaaaatgggcggatggggggggcccccctccccggggtcca

SEQ ID NO: 414122 - DNA, 494 bp, Homo Sapiens
tttcactctaaagatactttttatttaaatattttatgatgatacatatacaaatataatcttccaaaaaacaaatgtaaaactaatacaaatcactttttcaggaacaaagaaaatcatttagaaaatgtgattatgctaaaagaggcaggttaggtttccaaggctgctcaaggtggaagcttaagaccaacttttgtttgagtacacaaatgaaatttaccatttcatatactagtgatatgcctgttgcatacttggcaaaataaaactgatagtaagtctataataataaaagaaacaacaattactaagtaaacaattctagatgatggaagagtaacctccatttaagctacagacttagatgtctaaaaatatgtgtcctgatctgtacacagttagtgggagcacactatataaatcctttgcatgacaccattcaacaatattttttaaaatctacaaaattttaaagtttcacttccctagca

SEQ ID NO: 414123 - DNA, 116 bp, Homo Sapiens
cagcctgatgggaataattataatgattgcccacagacattaagctggctaaggaagaagagagaacatttaaggggtgagacacagtaaaaagggtttgaggatcaagattagag

SEQ ID NO: 414124 - DNA, 406 bp, Homo Sapiens
aaatctccagagtccagttcatcactggcctatagtacacaattaacaaaaagaggatgagtagctagaacaccctagggatatttatcagccttgaaaaaaatccaaaagtatttccaacagcaaaaacaggtactgtaattagcatactgtaatagtaattatggcagtggttcctttcctgtatcatgataagttgggtcttattcatttgtgccctgatactcagcacagcacctgacaatgtttattaactactgactgatatgaaaatttggagatttctacagaaggttaccattttgttagcaatgatatgtgttaacagtaagaaatatctacacttaaaagattatagctcaaagatcagtatgcaaacctatgtttgattaaaaatcatgctttc

SEQ ID NO: 414125 - DNA, 266 bp, Homo Sapiens
  misc_feature (58)..(112): n is a, c, g, or t
caatcgggaacccaaaagttttttaaaataaaaatccccctccgggttcaaccctaannnnnnnnnnnnnnnnnnnnnnnnnnnnnnnnnnnnnnnnnnnnnnnnnnnnnnnaaagtctttgctttaaataatttgcccttttgtaaacaaattttaaatgaccaaaaatgccgggtttttttcaaattttgaatttcaaaacttaggggggggaactgttggcaaaacccaattcccctaaactttcctaaattttgggaaagag

SEQ ID NO: 414126 - DNA, 228 bp, Homo Sapiens
tgctttaaccaacctttttagaggtttggaataaaattatgcccccttgggtacatacagccttaactagacatggatgccagcctcttgtaaacacgctcaagtccttgcagtccagaatggaagcttgtttccattaaatgtttagtctttccagatactgctacaggaataaaaaatgctaaagaattcaagctgcctctgatttcatctgaaaatggaattatg

SEQ ID NO: 414127 - DNA, 322 bp, Homo Sapiens
  misc_feature (114)..(253): n is a, c, g, or t
ccaggctggaagtggcattctttacatacaggagaacgtattctgacagtatgtgcaccgcagccacaggagacaaatgtatattggtgtaggagagaaaatgacaaaaacaannnnnnnnnnnnnnnnnnnnnnnnnnnnnnnnnnnnnnnnnnnnnnnnnnnnnnnnnnnnnnnnnnnnnnnnnnnnnnnnnnnnnnnnnnnnnnnnnnnnnnnnnnnnnnnnnnnnnnnnnnnnnnnnnnnnnnnnnnnnaagagagttaaaaaattcaagctgaggtggtggaatttctaaaggtcctcaattttgatgttccactga

SEQ ID NO: 414128 - DNA, 418 bp, Homo Sapiens
cattatggtcctgtgaacatgcatgctgctcacctcttccccattttaagaggcatataagtcaatttacttaacaacaaagactataaaccctacatttctgccttgtaaactctgttaataacatggattctgatgaaagtcaatcaatgtttccatcttttaaactgccttttccccccaatacaaattaaacaacagcttggccatattgaggtccttagtttcataataatagtgtgttggtcatataatatagcctctagcaggtatctcactacaagacctacgttaacagtggtttagctatattcgtctattaaagagctttttttaaggtggaaatcttgttcttactttataatgagaataaattgggcaaagagggatttactttgttgtcaaaactaaaatgtat

SEQ ID NO: 414129 - DNA, 204 bp, Homo Sapiens
ggatggccaatcaaaacatgattttttaaaatttgcactttgtagagggcaaataaaattatctcttagtttatgatgctctgaaattctaaaaagatgctttttacaggtcaaatgaaaggaactagagtaatggtagatggtttatggtttaaaacagtgtttcttaaacttgcctgatcataggaatcaagtcgggcaagg

SEQ ID NO: 414130 - DNA, 306 bp, Homo Sapiens
tgttctttgtaaaaccaaaccactatgctgtgcgttcatgttcaactctgttgaaatcccgggtgggccgaaataagatttaattgtctcctgcgtggagaagtgacacccactttttcccctgaattgagcaaacaccagggctttgtctgagcttgtggcttaaacgccgggcggtttctgcacccagttggtgggttgtaagacaggaggtttccaagtctttcatcatgtttctaacaaggaaaaccaaatcgggcccataaatgtcatcagccccggcccgacctcgccgggacctcggca

SEQ ID NO: 414131 - DNA, 104 bp, Homo Sapiens
acacccttcaaaaagttttttttggatttaatttcccaaaccctgacattttaaaaaattttgcaagggctttgaatttttgcgggggtttttttgggttctgt

SEQ ID NO: 414132 - DNA, 196 bp, Homo Sapiens
acttcattttactctaactgtagttgattggaccagtttgtttcatgaatagggatccttatctcactcaatctgtccattattttaccatttcacactacccacaggcccacaatgtaccctatagtgaaagggaaggtgtgaatcatatttgcaaagacaagctgcaaaatctacacctgcaataatctatatt

SEQ ID NO: 414133 - DNA, 142 bp, Homo Sapiens
  misc_feature (100)..(100): n is a, c, g, or t
  misc_feature (103)..(103): n is a, c, g, or t
acaaaggcaaacaacatggacacctcaacatgctgttgcagttcatgggggcccatcccaccccttttggggaaaagaatggggtggggggccccccccnccngggaaaaacattacacaggcctgggacccccaaacacac

SEQ ID NO: 414134 - DNA, 264 bp, Homo Sapiens
ctatgttttttagcattgttatattttctcataatcctttttctttctgtaaggtcattattaatgtccccactctcattcctgatttagtaatttgatcatgtttttcttgaacagtctagataaaggtttgccattggctgtttatctttttaaggaaacaacttttgggtttgttggttttctctcctgattttctatttcatttatatccactctaatctttactagttcctcccctctgcttactttgggtttagatga

SEQ ID NO: 414135 - DNA, 497 bp, Homo Sapiens
  misc_feature (102)..(129): n is a, c, g, or t
  misc_feature (138)..(210): n is a, c, g, or t
ctctgcacatattatcatttacacaatttgggaatcatggcataaatagttatattaatgattttttccacaattttataagaatttccttcataagtatcnnnnnnnnnnnnnnnnnnnnnnnnnnnngaaacaggnnnnnnnnnnnnnnnnnnnnnnnnnnnnnnnnnnnnnnnnnnnnnnnnnnnnnnnnnnnnnnnnnnnnnnnnnaagtgatttttccacctcaaccctttaaagagcttaaaacttcaggggcaacgacaatgccaggcaaatttttctgtatttttggtagaaatggggtacttgtctgggtgggtccacaacgcaatctgcaccatcacctggttgaaggagttactccccacaaagctggggcgggccatatcacaacccaagtttaccagccaaccctcagccagcacgatgatttgggaccccatttttacccataccaatccccctgggcgtgaggttggcctttccacagcatg

SEQ ID NO: 414136 - DNA, 165 bp, Homo Sapiens
  misc_feature (93)..(102): n is a, c, g, or t
actacattaagatttttttatcaaataatttaggtttacccataaagtatttcaattcctggcacaaagagatcataaattaaaaatctacgnnnnnnnnnnaaacattatgttaagataataaccactgtccaaaggaaagatgttgatgctagaagaacaaag

SEQ ID NO: 414137 - DNA, 225 bp, Homo Sapiens
  misc_feature (118)..(129): n is a, c, g, or t
cccagggaaatggaattttttttccaaaggactaatttctaaaaggggggggcctaccccccaaaacaattggtttaagggtaaataaaaagccgtggatttgcgggaaaccaaacannnnnnnnnnnncccgggccccctgacctgggttttttccaaaaaagcataaaatacccaaggcccggatatgcaatcggggtggcccccttttcccgcaaccacctt

SEQ ID NO: 414138 - DNA, 453 bp, Homo Sapiens
agcggccgctcgcgatctagcttaggcaatgggacagggattgtattactcattacttctggggcattctcaactatgataggactttagtcatacctctacaatgttgggaggagagatacatatttaaaaagcaataacagcagttcaagggaaaaaacataatctacttgttttcttaggggggcataaatggaaggaattatttttacagaaaacacatctatcccacttgttttggggatactgtgtcttatctttgaaatgggcttctgcaaagtcaatagtgatggcgaattagtagttgcatgatgcagtgttttctatatatcataaattggtcaagtatgatgatttttatttccattcttattagaaatgatcattgtgaataatctgcccatttttctcaggagtgtatgatttaaagtgtcatcatgtttttcattctca

SEQ ID NO: 414139 - DNA, 470 bp, Homo Sapiens
gaattttagcattttcttcccaaaaagagcttagtgaaatctgccaacctaataggaagcatttatatttcaaagagttaatttttgcccttaacctaccctaggcattatgtctgaaagatggctcttcctaccaaaaatcttaatcaaacaggcagctgataaacgaaaatgaaaattaactcctcatctttccctatcaccaagtcttgaataggcagctttgaaatcactttttggtgtgcatcaacctgtatggacctgaagatacagactgtcacatgagaccagaggaacaaagactgcttccttcaatcagaatccttcccagtgtcaggcaaagaaaagtgacttctacagtcttttggtaattgagaaccatatctctatggagctaatgttacaagtatttgcctgccctgaagggctgtagagtcaaatatcaaacaattatttggagaaatgaaatg

SEQ ID NO: 414140 - DNA, 207 bp, Homo Sapiens
aaaaatagggcttttgccccatagtttcattttggccagcacacgattaatttatgtatactggcctactattctgagagcctggaaagctcactggtatttctattagctttaaaagattccatagtaatttccatagagatactcatgttggctgcaaatgaagacagggttacttctttctttccaaaggggctgcatgtactt

SEQ ID NO: 414141 - DNA, 273 bp, Homo Sapiens
  misc_feature (67)..(76): n is a, c, g, or t
  misc_feature (106)..(207): n is a, c, g, or t
aggggtccaaaaggcccggggttattttaaagcctagcccccagggggaaccccaagaaaccaaggnnnnnnnnnnttttatgggggtttgggccaaaaggaaaannnnnnnnnnnnnnnnnnnnnnnnnnnnnnnnnnnnnnnnnnnnnnnnnnnnnnnnnnnnnnnnnnnnnnnnnnnnnnnnnnnnnnnnnnnnnnnnnnnnnntatttaggcccgggttcttggctttttaaaagccctccggcctaaaattttaacgggccccggggg

SEQ ID NO: 414142 - DNA, 471 bp, Homo Sapiens
  misc_feature (111)..(120): n is a, c, g, or t
ctacagtgaaactaactgaagttttagagagacttgctgttgtttttcttctttgttcttttctccctttttctacactcattcctgcatgatgaaattgaccttttatannnnnnnnnnacattccagcctgggtgtgacaaatggaaaggggaagagagagagtgagagatagcagaatattttaattgtgatattagttaccttttacctttggtcacttcccacttatttattgggctttaatattggtgggtattatatttttgttattgttaaatattcactgttggactttttgtttattttgagacagatgtcggcagtgagcactggacttagccaccagcttgccaagtctaaggtcgatcagatggctcctgccttgacatgtctaaggtcgaccagatggctctagctggcgccaggaccattcaggtccagcagaggtatgtgatagtgattccctgt

SEQ ID NO: 414143 - DNA, 238 bp, Homo Sapiens
  misc_feature (215)..(215): n is a, c, g, or t
ccggcgtgtagcggggaaaagggtttgggttaaaccccccggaattgcctttgtttttaaaccccaagggggggaccccccataaatgcaaaaccccttgtgatgtaattattataccaatgggggcctcaaccgggaatactaccccattgttaacctcaaggaatcgcaaggcccccggttctaagaataatgggggaaatcttctggagtgnaaaaattttccccctccgtctgt

SEQ ID NO: 414144 - DNA, 319 bp, Homo Sapiens
atgtaattttaacttttattttagatcaggaggtacatgtgcaggtttgttacatgggtatattgcctgacactgaggtttggggtacaaatgatcctgtcacccaagtagtgagcatagcacccactcggtagtttttcaacccttgttgcactccctgctaccctcagcccatggaccccagcgtctattgttcctttctttatgtccatgtttacccaatgtttagctccaacttagaagtgagaatatgcactatttggttttctgttcctacgttaattctcttaaaaggatggcctccagctacatccatgtt

SEQ ID NO: 414145 - DNA, 346 bp, Homo Sapiens
gaattggcacacattcaatttattttagcttatttgtcaacaaaggcatcatagtcatcaataccattcaccacagaggcacccatacctgggagctagtcaaggctggtcaagtctctccatcttgcagagatggctccaatgctgttatatttgacgttattaaaaaacctacattaccaatttcccttgtcccaaaactcaggctgccagcagagggttggaggtataaataggtgtagttacaagaatcacatatacccttttccccatataagcactccactttaatccacagaggtcagatacttgactaaatggatagcacctggcactgagaaagctt

SEQ ID NO: 414146 - DNA, 368 bp, Homo Sapiens
  misc_feature (256)..(296): n is a, c, g, or t
aattaattaattaattaatttttttatggaccattctggggggtttcccccaaagggggatttggccgggccataagacaatttgggggggaagggccccaaaaaaacaaaggaacaaagggctttggttttcctaggcaaaagaccccgcggccctccccagggttggggtccccggggccttaaaaaaagggaggggggaaaacccttaaggggcctcctccctctaaccttttgtttaaaaaagcacattttnnnnnnnnnnnnnnnnnnnnnnnnnnnnnnnnnnnnnnnnnatttttcaaaaaccccaggattggggggaagggcataaatcaaccggaccccaaggcaaaaaaatttttttt

SEQ ID NO: 414147 - DNA, 468 bp, Homo Sapiens
  misc_feature (233)..(245): n is a, c, g, or t
  misc_feature (452)..(452): n is a, c, g, or t
tttttgagcacgatgctttaatgacaaattcaacgaagattggggcagttccaggtggtgatggaaacttctcgccgtatttaccttttacacctaacggatcgggtccatctgtggccacgcatcctccgtctcccgtgcggctggctgggatggctccccgaaactcacatttgtaataaacaccattcatcgcaggcacgacacccatcctggaaacagcactttagaannnnnnnnnnnnnatcaccagcttaatgatgactaatgcctgggtgattatcttgtgctttttttatgtggcaccgagaacaaacaatatcattagcaatgcagaaaggagagaaaatgggagcacgaggtggaagcaaaggcgagcaaaagtcagacaggaagcaaagctggctgcctggcaagagaatgtctgcaaactgaacgccaggggtccctgngccgtgatctggaacc

SEQ ID NO: 414148 - DNA, 101 bp, Homo Sapiens
tgtgtgaagctccaggttcttttggccaggtactctctggataccaggaaacacttggtaggggtgaacctggtaaaggctagagggctgcagtttctcag

SEQ ID NO: 414149 - DNA, 448 bp, Homo Sapiens
aaaaacttaaagatatttattttttaaaggggaacttatttgagaaacataaaaacacaacagaatactttatacaccacttaatataataaaacagacaataataacatacatttttgcaagcataaacactcaggttactaataacatttgggtgggtctaacagttatgagcagatgagccatatttataaagaaattggtcataaagggaaaggtataaatgcatatcactttggttgttaattgtgtatacccagctttttaactctggtcatctgaaatactgtgcccaacaacctcaagtcttttgatgagattgatggaaactgtgctgggtcaccactgcatatgcagtcacccaaagagctgagatctcaagaaattttatctttcacaaatgcagatgtacgaaaaggatatctcatttatcgaggaagtttcaaca

SEQ ID NO: 414150 - DNA, 168 bp, Homo Sapiens
cagccctatctgcttacttcttgaagaggatggcattcatgtgtggtgctaatggatgtgtataaaatgaacgaaacttgcaacacctacatgaagaccagcgtgatatacattttacacactgacacgtgatctgcttacgggggaaaacaagtgcaggagtcagtc

SEQ ID NO: 414151 - DNA, 124 bp, Homo Sapiens
ggaagttccagggttttattaccaaaatcttccaaaaaaagtctgcctctggggtaagggccccagggaattctttctaacccatgatcccagccaaccttaccccaaataataagggcaaaaa

SEQ ID NO: 414152 - DNA, 119 bp, Homo Sapiens
cgctcaaacaattttcccacttcagcttcccgagtagctaggactccaggcatgtatcaccacatgtggctaatttttaaaaattttttgtagaaacagggtctcaatacattacccag

SEQ ID NO: 414153 - DNA, 247 bp, Homo Sapiens
gagggtcagaggactttttattaaacatgtactaatatcaattctcatatttattttcttctttggagctaacacgtaaacatatctataattttttttcaggtttcacccatttctgcagggagaaaagctcataagccacggccctacgcccacctttgtgcccgcagaataaggaaacccgccaactacacaccacagttagaaagcccaagaccctgaaaagacctgcacccacccagggggg

SEQ ID NO: 414154 - DNA, 144 bp, Homo Sapiens
actttttgctttgacaaaaaatgaaaaattttggagccctgcctgactcctttttaggaaaaaagggttttttttccacctttggaaagttacgggtcctcctttaacaaaggaaaattttaataaaaaagggcttcatcgatc

SEQ ID NO: 414155 - DNA, 234 bp, Homo Sapiens
atacagatacacaagacattttgcttatccattcttctgtcaagaaacacttgggttgcttccacattttagccattgtgaatgatgctgatatgaacagggactcaaatataggtttgagttccgacgaacagaaactcaaatatatgttttcagttctgacgaacagaaactcaaatatgcgtgggagttctgacatttaattcctcggtatatatacccagaaatagaatg

SEQ ID NO: 414156 - DNA, 154 bp, Homo Sapiens
aaaaccaaccataataattttacaggtttattttagttgcaaacttccctaataacttttccaaaagttcacaatttcaaggctaaccttttgattaaagtttcttggttccaaatttaatttaaagggggtttttaaaaaaggctaaaacccc

SEQ ID NO: 414157 - DNA, 138 bp, Homo Sapiens
  misc_feature (52)..(61): n is a, c, g, or t
aaaaaatctgggctttttttcccaaattggtttccctttacaaaacccaaannnnnnnnnnctaaaacccatccccaaagtccgggggctaaaaaaagggttttgaccaatttcaggggaaaatttcaaatcttccaa

SEQ ID NO: 414158 - DNA, 273 bp, Homo Sapiens
aaaatcatgctgttttattcaacttgggctcttacaataaatagctcaaaccaacagctgggaacgtatcgccaagctgcggccccatggggacacccttaatgaaaagagaacatttctgaagggcaggagcacattaattgtgggcatgcaaatggagattgctgattatggatgggcccctctcgagtaggttaagtggggtgccccctccgcagctctccaccccaactcttgttgcaccattgatttgctgaccaaactcttgcttca

SEQ ID NO: 414159 - DNA, 241 bp, Homo Sapiens
  misc_feature (167)..(167): n is a, c, g, or t
ttcacctagtacaatttttttctaactgaactgaaactataaccaagttgatgttaagtctccaaaacaggtaagtataccttattcttacaatatggtgcttaactaagtatgagctccatgaaggcagtgtccagtctctgaaacatttgttgaatgaattcttnctttatatttttctcaggtttactttcttatttcactattgtcctgaattagattctaaattcatctaccttca

SEQ ID NO: 414160 - DNA, 288 bp, Homo Sapiens
  misc_feature (55)..(230): n is a, c, g, or t
  misc_feature (236)..(236): n is a, c, g, or t
ttttaactggaataattttataaagagacacttttctcactcgccattggttatnnnnnnnnnnnnnnnnnnnnnnnnnnnnnnnnnnnnnnnnnnnnnnnnnnnnnnnnnnnnnnnnnnnnnnnnnnnnnnnnnnnnnnnnnnnnnnnnnnnnnnnnnnnnnnnnnnnnnnnnnnnnnnnnnnnnnnnnnnnnnnnnnnnnnnnnnnnnnnnnnnnnnnnnnnnnnnnntggtcntgtgtccttctctccatacctgcaaagaggaaaggccatatgaagacacatg

SEQ ID NO: 414161 - DNA, 440 bp, Homo Sapiens
  misc_feature (337)..(337): n is a, c, g, or t
gtacctcatttattatttgtgaaataattacaacttctgaatgccattatgagttaagagagaaggggtctagcttttggactttaggtctccccatctaccacctgcctgctacccatcattctggctccccagtcccccagaatctgcctgacagtgggacacgaatgcccacaggcataacaatgaagctgctaggaggccatacccaaagctactatgatgataagatggcaagacatggagtggcaaaggcaccagaagtttaactctgggactatctgtccatcacctttctttcttgcacagcatgcaggttgcatgggcttaaactgtnagtggtcaataaagccacacagatcagggtgagcaaatgaaaggcaaatctaactcaggtagaaaaaagagcatttatttccttgactggtaccctatcaaag

SEQ ID NO: 414162 - DNA, 401 bp, Homo Sapiens
  misc_feature (307)..(316): n is a, c, g, or t
  misc_feature (360)..(360): n is a, c, g, or t
cttttttctttgtctttgaattttggcagtttaattataatgtgttctggacaatttctgttagattcttcttgctatagacattttgagcttttaaatttaatatctatattccttccaagattgggaagaatttaagacattatatctttaaacaatttaaaaatttttttctttctcatgaacctcctaaaattgtacattcttaccattgattatgaaatatgggggacaaatgctttattcactcgcattctttttttaaattctaactaggaactttcaaataacttttacatttgctgannnnnnnnnncctgtataacggagtctcctgttaaagctttctcttaaatattntagatctcctattgtgtacttcagctccagcatatctaact

SEQ ID NO: 414163 - DNA, 334 bp, Homo Sapiens
caatgaggagataaagacaggacgtgaatccagattttcttggccttgtgttgaaagtaaacatcaaagtcaactttgttcagcagctgggaatcctcacccagctctttccagctgtgccctccgcacctaagtgatgaacagaatctgacccggagcacactcacagaagtgtgcttctctggaaggcaaggtgaaattcactctttacagggaagcatatactaaaataagcaacttactattacaagcctggatggccaaggctcttgtttcactagcctaaaaaagaaaaggtcacatgattttccctggaattttttttccctaccca

SEQ ID NO: 414164 - DNA, 403 bp, Homo Sapiens
aatgtgattcaagggtcaaaagactttattgaagactagagaagggacttccaactcaaaggatgagggaatcccatctcagatgacacgggattaactgggatgggctaaggtggacctgctgaggatctgggagacatgggtcaacggcttatcccaaatggctccttgtgccgagggcgctctgggctggacgctgggaccatcccactacaatcttgcccaagctgcgggaacgagcgggatggactacggctagatagaacctgcccttatttatacatctgggggtaaagcatatcttacggagtccatcccaaccggaagaactctgttcttgtattatgcaccccggcacctgggcgtggagtggcgtgtggttcacacctctccccagaggatt

SEQ ID NO: 414165 - DNA, 152 bp, Homo Sapiens
caaacctagagcatctaggctcacaattactatcctgacttgataacaagtgttctgatattaacctgaaaatgggaataatgccaaatctgtgtaacttaacatctatatacacagtggggagaactgaagttattaaacctggaatctct

SEQ ID NO: 414166 - DNA, 327 bp, Homo Sapiens
ttttaatagagatgagggctccctatgctgtccaagctagtctttaactcctgtattcaagcgatccacatgccttgggccccccaaatgcttggattacaggtgtgagccaccacaccaagtcatggtgtcatgaatcttatagataatgctcataactctaataaataataaaacctgattttgagttgatttttcacccaggggggccaaagggttattacccaattccttttttatttggccctaaaacacaaagaagcctggtttgtcattgctgttcccagatgtatagttaatatacattatatgataattttataaatt

SEQ ID NO: 414167 - DNA, 123 bp, Homo Sapiens
ggggggaggggagggcctaacaaaaacccccccgggggggaaccggaaatataccccaacccgaggaaatctggcctttgaaaaaaatcccccttaaacctccccctttaaattcccccccgt

SEQ ID NO: 414168 - DNA, 472 bp, Homo Sapiens
  misc_feature (58)..(84): n is a, c, g, or t
ggggttctcattggtaatgcatccaataaaattagttaagtaagagagttataaaatnnnnnnnnnnnnnnnnnnnnnnnnnnntgcactttaaatttgaaccctggcaatgagaaggaaaataatgtatcctcgaggggaagtttttatggatatattctttaatggacaattgccgctagatttgggctacccagcaccgattccaacatcaatttgtttttttctggcattccctctcagcaactaaaaaatgtgtggtacaggagctgataaccaattcttctgcactcgtccccttcctgaggcattaactcatattgtgagacaaacaccctttcttcctataatttggattatagtgtccagagaggacaagaacacaagcattaattaattccagtagtactgcctgaataaaattgtgaaacaactccagtcaccaagttatttcatttttttcagccttcct

SEQ ID NO: 414169 - DNA, 206 bp, Homo Sapiens
  misc_feature (117)..(142): n is a, c, g, or t
ctcaggccaaggttaaaccaaaccacaaaagataaagggggggctctactaatacatcatacaaaccagtggccggcccccaaccccaactcgggccattcctcccaaaggaagaannnnnnnnnnnnnnnnnnnnnnnnnnaaagggccggcctgggaagacaccacaattcggctgaatctgaagtctggggttttcctaaggg

SEQ ID NO: 414170 - DNA, 368 bp, Homo Sapiens
caattaaatccactatttaatggttccaatttaccctctgtaaatgctcactaaactaatttctctgggttcagcaatctgaaaagctatcatatctctaatctccttcaatatattcatctggaaaagggaatttacccaattctgatgtgcggaaatgaatccgttaccacagtgtaaatgtttataacacagcaatcgagttcgtttataaggatataaaaagttttattggggagggcactggagtggaaccggcggataataggcagttacccagcaggctctgggcccccgggagcgggcaggcaagcaaaaaaatactcggatttgctctaatcccaaattgtgagctcaagttcggacca

SEQ ID NO: 414171 - DNA, 453 bp, Homo Sapiens
  misc_feature (142)..(216): n is a, c, g, or t
tgtttttgtttctggtcttatagaagtgtggtatatctcctatgtcttttaaatctctgaccagtaagcactttccttttctgactgtatagaggagagaggaaacactttagaaaggaccccagactcttgcttctcagannnnnnnnnnnnnnnnnnnnnnnnnnnnnnnnnnnnnnnnnnnnnnnnnnnnnnnnnnnnnnnnnnnnnnnnnnntcaacctactttaaacaagatccccaagagatgcaaacacaaaaccaaagtttaagaagcattgtcttgaagcacctttactcctctcagttctggtatttccccacccccaactccaactattcttccatttagaaagagagacaactatgtgaacaatggcccatttgcaaatagacatgaaataaagataattatattaatctactctctgtttatgacctccttcatcatcta

SEQ ID NO: 414172 - DNA, 403 bp, Homo Sapiens
  misc_feature (185)..(185): n is a, c, g, or t
  misc_feature (232)..(232): n is a, c, g, or t
tgcctgattcgtctggttaggacttccagtactatgttgaataagagtggtgagagtgggcgtccttgccttgttcctgttctcaaggggaatggttccagctcttgtctgttcaacatgatgtttgctgtgggtttctcataaatggctcttattattttaaggtacattccttcaatgcctantcaattgaggatatttattatgaaagaatgtttgattttatcaacanctttatctgcatctattgagacgatcatatagcttttgcttttaattttctttatatagtaaatcacatatattaatttatattatactaaaccaaacttatatctcagtaataaaacatacttaatcataataaattagcttttttatatactactatatttatttaata

SEQ ID NO: 414173 - DNA, 474 bp, Homo Sapiens
  misc_feature (87)..(144): n is a, c, g, or t
  misc_feature (171)..(191): n is a, c, g, or t
  misc_feature (223)..(232): n is a, c, g, or t
  misc_feature (243)..(259): n is a, c, g, or t
  misc_feature (289)..(289): n is a, c, g, or t
  misc_feature (331)..(331): n is a, c, g, or t
  misc_feature (396)..(396): n is a, c, g, or t
tcatgtcccgcgggctttgcttgctgtcccccggcaccccaaaagggacaaaaacgggggggcccaaaggggccccaaaaaattttnnnnnnnnnnnnnnnnnnnnnnnnnnnnnnnnnnnnnnnnnnnnnnnnnnnnnnnnnntttaccaaaaaaccaaaggcccaagannnnnnnnnnnnnnnnnnnnnaaaaagggcaaaagggcccttttttaaacaannnnnnnnnnccggcttaaannnnnnnnnnnnnnnnngggacattttggcaacccaaacaggcccangggggcccccactttccacaccctcacacaaaccaggccccnagggcctttggaaaactatcaggttacatttaagcaaaaggcccttttcccacccaaacccacanaaccccaaacaagggtttgccgagaaaaaccccggaaagccgaatcccatttaaccaaggacaaaaacccttggcccc

SEQ ID NO: 414174 - DNA, 129 bp, Homo Sapiens
  misc_feature (46)..(60): n is a, c, g, or t
aaaacaaaacggggtttatttcataaaaagtttaaaaacaggcaannnnnnnnnnnnnnncaccaccccaacaatggggcaacgggcatcttcgggggtcttttggcccttccggcggggttcaaaaaa

SEQ ID NO: 414175 - DNA, 323 bp, Homo Sapiens
gatggacagttttatttgccatgattccaatattcaaaatactgtctatataatttagagaaaacttaaaagtcatatacacaaaaactttgacaatggtttttactaagccaaagggatagataacaattattgagcacctaatgcatccatgctttaaatgcattatgtcaggaaacattattagccccatttttcctatgaggaagaacattaaagtttagatagtttacgtttaaggtcagctagctggtaagcaccagagccaggttttgaacttagaaagtctgatgtctacttttctgttatgaaagcctattaaa

SEQ ID NO: 414176 - DNA, 237 bp, Homo Sapiens
gtaacagtatgggtaagagctaccaaatatgaatatgcaagaaagtaaacataggcaatttcccctgaacagctttctgtgttcaaaagaaataatacagtcaaaagttaacatttgtacaaacaatatactcatgacagcacacgaaaaggagactactcataaaatctaacgtgactttcttggtaaaagctgcttaaaacattcatagcatgcaggtgtcttgataatgcaata

SEQ ID NO: 414177 - DNA, 257 bp, Homo Sapiens
  misc_feature (41)..(56): n is a, c, g, or t
  misc_feature (164)..(164): n is a, c, g, or t
  misc_feature (192)..(192): n is a, c, g, or t
ccccaaccacaaaaggccccacccgtcccccaaaaaataannnnnnnnnnnnnnnnagggggcaggaaagaggggggggaaaggacccccatttttggggaaagggaaagaccctttttctccccttaaggggggaaggaaaaccccaaaatgggcccccccantcccatttttgggcacaaatccccccanttttctcaccaatcttctcaatcaaaacaaaatgggtcccctggggtggacctttcacccctaaa

SEQ ID NO: 414178 - DNA, 429 bp, Homo Sapiens
aacaagtatattttccaagcttcatcagatggatatacagttggggtgcaaatgatgaaacaacacacagctccatccaccaatttttaaaactctagctagcattcaagatctgattgagggttaaagggtggggaggacacccttcaggtgatgcaagacatgatttttaaattttctttagctctcggagctcttgatttcataggtcatcaagaagtctcacagtcgtgaaatcttttacttcctaaatattttaatcatcaaggtttgcagcagagacaggaagaggaaatgggcctcaaagtcttattttttttcatggagatatatttgtctcttaagaatatctcttcaacctcagaacttccttgatgatttctgttaggaaaataaaatcttaacttccatgttattactcatcttcta

SEQ ID NO: 414179 - DNA, 185 bp, Homo Sapiens
tgagctaccaccgcacccagccaccatcttccatttttaaaagtgtcgttttcttttcgtgaatgagttggaacagctcatctgctggtgactctggaagctgtttttctcctctcaccttcctcctttgctcacctgaatatatcataagaatcccaaagttaatgtgtttagacagaatctaa

SEQ ID NO: 414180 - DNA, 436 bp, Homo Sapiens
  misc_feature (369)..(369): n is a, c, g, or t
  misc_feature (381)..(381): n is a, c, g, or t
tcaaataatctgtgccttgtaaaatccactaatgtaacatgaaaagcacaatttgacatcaacccgtgcagtgaacccagctgtgttactatagaatccttatctgctctttggaattactgatctctcaaaatctgactcagtttacttctagcccaaatggaaaagtcctcaataagccaggaaacagccctccctttggatgtgtgtctagtctacaaaggatggccttctggggtaccatcttgtgtctcccagacctttccctgtctccctcagtgtctgtgccccacaatacaacaaaggccacctggacacatctctccttacctggaacccaaagcagctctgcctccatgcctgccttgnggagctacctgngcagacagctggaaaaagcaagaggagacccaggctctagttccaggccagcatg

SEQ ID NO: 414181 - DNA, 388 bp, Homo Sapiens
aaaagaaaaacctcccccttttaacccttttccaaaagaatttcccccacccccacaggaactggggacaggccccgcccccccagggaaagaggaaggggcccccaaataaaccctaaagcccaaccccgccccagggtcataaaggcccttttggcgggggcattttctggggcttccaactgggcgggggccccaccccaccccttaccctccaaaaatattttgggggcccccggccctgcacgggctcgctaaccaataattccccatccactggaaacacaccttttccatccttgggccccaagcggaaggcgaacaccggcccctttaccaagagagggcactcatactccatataccctgcccctcccatggcccgaaa

SEQ ID NO: 414182 - DNA, 464 bp, Homo Sapiens
acatatgatttatatatattcttttataatttccagcttgcgttagatttactgcaattgacatttactaccattatagtcaagaaaaaattaagccttattttgagtgcaggaagataatgcctggtttttctacaaaaagcaaacagtctttgagctaagaccaattgctgtccaatcacaggccatggaagctcctcatgcccaatattgatgactgggaagatgagatttaccctgctgtgggaatagctgagggaagaatgttccacgcagaagggagataatataaagttcaggattaataattgcacaagtaatttgtgtaattgcttgtttaattaagtttttctgttctgtttggttgcaaaccctgctagggcaggatctttggcaagaatctctctttggcatttgtacagtgctttgcactattaatatatgtaaaatcaatgaaacaaatc

SEQ ID NO: 414183 - DNA, 454 bp, Homo Sapiens
cttgtgttgctcgtgcctttggtgtcatatctaagaaatcactgccaaatccaatgttgtgaagatttggccctctgttttcttctaaaagtgttccagttttaggtcttacatttaagtctttgatcccttttgagttaatttttatatatgatgttagataagggtccaacttcattctttcacatgcggttatgcaattttaccagcaccattttgtgaaatgactgccctttccctactgaatggtgttagcacctttgtcaaaaatcatttgaccatgtctatgcatttttatttctgagttttttattataatctattggtctgtaagtctgtctgtatgccagtaccacactgttttgattaatgtagcattgtagtaagttttgaaatgagtatgtgtgacgtcttcctgttttttcttctttttcgggagtgttttgattatttg

SEQ ID NO: 414184 - DNA, 605 bp, Homo Sapiens
  misc_feature (163)..(297): n is a, c, g, or t
  misc_feature (485)..(485): n is a, c, g, or t
  misc_feature (488)..(488): n is a, c, g, or t
  misc_feature (533)..(533): n is a, c, g, or t
  misc_feature (541)..(541): n is a, c, g, or t
agcatgagccaccacgcccagctttagttttctttatactagctcatccactccaacctggtatatttacagactcccaaggttaaagtgtgcattaaaggtcatctaactgaattactaatccaagacattctttactccaattctggtctgtgaaccaacnnnnnnnnnnnnnnnnnnnnnnnnnnnnnnnnnnnnnnnnnnnnnnnnnnnnnnnnnnnnnnnnnnnnnnnnnnnnnnnnnnnnnnnnnnnnnnnnnnnnnnnnnnnnnnnnnnnnnnnnnnnnnnnnnnnnnnnattatataacatattcaagacgtagtcattggaccgcctgactgccaccatcatgagtcgcatgtgcactcctgggaagggcctgtctcaatcggctctgccctgtcactgcaaggttcccacttggctgaagctgacatctgatgacatgaaggagcagacttacaaactgaccaagaaaggtctgnctncctcacaaatcagtgtgatcctgaggctcatatggtgttgcacangtatattnttgtgacaggccatacaaatcttaggaatcctttagtccaaaaagacttgccgcctgatcttcc

SEQ ID NO: 414185 - DNA, 136 bp, Homo Sapiens
tctcctctctcccattgtaggggctcctgaaaagcttctggaagttcaaattacaaggttaaaaccgaaggtgttcaatttaccctcaacaataaatagtttctgaatttaccttggatgtataaaatcatgtaag

SEQ ID NO: 414186 - DNA, 278 bp, Homo Sapiens
  misc_feature (71)..(85): n is a, c, g, or t
  misc_feature (91)..(152): n is a, c, g, or t
  misc_feature (173)..(173): n is a, c, g, or t
  misc_feature (197)..(197): n is a, c, g, or t
gcccccaatggggggccccggggggaagaaattttttaattcaaccgacaggcaaacccccccaaggccannnnnnnnnnnnnnnccccgnnnnnnnnnnnnnnnnnnnnnnnnnnnnnnnnnnnnnnnnnnnnnnnnnnnnnnnnnnnnnnaaaaaccaggggggggcctcngtggaaattttcccaggggctttnttatggaaagggggggcccccaaaagaaggcgggggtggaaaaaggcggctccccccaaaaaccctggggggaccccttta

SEQ ID NO: 414187 - DNA, 432 bp, Homo Sapiens
  misc_feature (224)..(224): n is a, c, g, or t
  misc_feature (313)..(313): n is a, c, g, or t
  misc_feature (411)..(411): n is a, c, g, or t
gtgcagaaggattcacatttattggttcaaatacagtacctaacacttgctaaacatgcatttcacactaattggtcacatttccacaggtagtcaattcacagaacagggcccatcccttgccagctggcagggtgggaggtagcaaagggcctgggtagcctgcaaagcccgccagctatcatttggtcatggagggttgatggagtcaagctggcgggcancccttggccggccctttggagacaagggctcagggacatcccgtttcctcgattcctacacacaggactgtgggtggaggtggacctanggcaggtaacctgggggtaggctcgtggatgtgtgtgccactagagcccttaaaggtggtgtctgtgggagtggtgctccctatgccctggagcacangaaggaaatggaggcctcttc

SEQ ID NO: 414188 - DNA, 299 bp, Homo Sapiens
atccacttagccactttatgtcttttgattggagacttaagtccatttacattcaatgttattattgataggtaaggatttactcctgccattttgttatttgttttctggttgctttgtgatctcttccttctttcttcccttcctgtcttcctcttagtgaaagtgattttatctgatagcatgatttaatttcttgctttttattttttgtgtatccattgtatgtttttcaatttgaagttaccgtgagggcgtgcaaacattatcttataacccaatattttaaactgatgaca

SEQ ID NO: 414189 - DNA, 109 bp, Homo Sapiens
aatgggggaaaaacatatttacggctatatatgcataaagcagctctagaaggatacataaggaactaataacactggggggctggagaataagggtggaagaaactct

SEQ ID NO: 414190 - DNA, 409 bp, Homo Sapiens
tctgcatggttagatcatctttgtatattatgtggcaccactcacccacattaggcttaccctctcacaggggctaggaaataggagctatcttcctgagattgtgtctgaaaaagatagctcccaggtccttgaggaagacattcttgtattagaaactagcagaaggccttaaaaaagatttacgtctcaaaggaacaaagaaagaatttacaatgacaagttttctaaagtaaataaatgctcttaagtcagagtctacagtcaggaaaaatgtctacaatgtagtccagctgaggggaacattaaggtcttcttggccagtatctattgttgctttaattataatcattattggtaagatgaaagtttgagccttcgacacctggtgagtgaatgcacagaaatg

SEQ ID NO: 414191 - DNA, 480 bp, Homo Sapiens
  misc_feature (115)..(124): n is a, c, g, or t
ctattgtttaaacaagttggttttcctgtagttttagaaggaagaacttctgtaggaggaggggatagaccagtgcagtttttgagctgtgtggctccaggccgcatttgtgaannnnnnnnnnaattgcacttttgagatgtagtaaagcttttcacctttatgttttccaggtattttgctttctgaatagacccctttaaatgtattttactgttgtggaactttctgagatctgtgtcacttggacctcctgcccacctagaatgtgaatcttatctctcctggagggttctcattctttttgctttgcttaggtctatttctgtttcttgcaatttctccagaatgggtctctgttttcatgaaagtaagagagtatttgttggtaggatacttctacagtcctcttagagtgtagaatctgcctctctcagttttccagttatctctgcatttacctatatcttggagcctgag

SEQ ID NO: 414192 - DNA, 130 bp, Homo Sapiens
ccaaaacatgtgtccataacattgtggtgtggattcaacaaaatgaagtgcatctagtacacaatgagtgttaattttctaaaagcaagcaaatgaggaaatgctggtctaggtgcccttatatactcat

SEQ ID NO: 414193 - DNA, 539 bp, Homo Sapiens
ctttttaagggtaagaagttttataccacgtaaatggcaatgcagatttaataaacaaataatataataagcaaatcaatataataagcagattgcagacataataagcaaattgcaatgggaagaggagaatggaaaaggtttacactcaccagactgtatatatttacaccaccagactgggaagaaacaacctgggctccagagtcggccactcatccgcgcacagatgaggagaggtctcatgaagctttggcgctatctgggaccctagctcttttgtaatgagttttttggcatgaggcttagtcatgagggccttttacgaatgggctcaaggaacgcaaaaaggtcaacttgtttttgtgcttgactattgtttttcaataatgaatgtttaggaatagattgaattagagatttctctgaaacagcgcgggatgaatgcctcaaggggctcacacaacctgttccaggacttggtgaccattgtttgtgtccagattcaattaagttcaaatttaatatttaactttacc

SEQ ID NO: 414194 - DNA, 538 bp, Homo Sapiens
gctcacataccaggactaaaacactagttccctatatccagttacttagtaaagtcatctattcaggctgcaaatgatgcagtcagttgctaggttatgatcctaatatcatcaggattcctttaagtaaaaagcagttagaagcagtattgcccttatcgatggacttgcaaatagcactctctgattacacagaacaaatagagcatgtccttcccgctgacaaactccttcatttcttatcttgtactcctgtgatcttgcctacacaaacagttcactcccccatacctaatgctttaacactgtttactgatggatctggtaaacatggaaaggcggcagtcttttggagactacataattcactcacttgatctggatttactagcactcaaagagctgagactggggccctgatattggccttggaaactttttcggctcagcccatcaatattgttagcgactatgcctactctatttattgcagaaccttgcaacagccctaattaagtccactctggagcccaccctg

SEQ ID NO: 414195 - DNA, 447 bp, Homo Sapiens
tacaggtgtgagccactgtgccctaccaaataagcagtcaccctcattccctcttttccccagacctggacaacccccaatccgcattctgtccctgtgggtttgcctgttctgtacacttcatatgaatggctcatacaatgtggggctttttgtgtctggcttctttcacctggcttcatgtttttgaggttcgtctatattgaggcatgtatcagtaatccattccttttaatggctgaataatagtccgttccttgcgtggatggaccacaatttatttgttcatccatccatctgtatacattgtttttgtggacctgtgtggctgtcataggcaccgggccctctagcactgttatgaacaagtagcgtgtgaatctttatctcaggagtggggaaacaccaaccaaacactcccatacacaaatatcttggacgaaaacc

SEQ ID NO: 414196 - DNA, 267 bp, Homo Sapiens
  misc_feature (67)..(67): n is a, c, g, or t
  misc_feature (240)..(240): n is a, c, g, or t
ttttttccaaaagaaaatcacctatcttgattaagccactattagttaaggcatttgctagagctgntgaactgtctacatcctcctgacacatataaaatagcccaggactgtgtttcctcaggaagcccttcttccagttggctaggacccctggggctgcctaatcaccagacactcctttgtcccaggacaacaaagctgtgacatgcatccaccccaggggcaggttttcttggncttatagctggggaagctgcctggagc

SEQ ID NO: 414197 - DNA, 231 bp, Homo Sapiens
ggcctgcctctcggtagagctggggcacagtgaagcgaagggacccccgctccctttacccctgatgtcgggaaaggggaatcctgacttggggtccctgtaaaaaaatggaggacttgaaattaattaagaaatgctttacggtagccctcctcccggcccccagtgtttcctcaagcttgatttctttccctcggccttttcctttttctctctcttgtttctctttcc

SEQ ID NO: 414198 - DNA, 367 bp, Homo Sapiens
caggttatgtggctagtaagtggaggagggaatatttcaacttgaatctgctgtattccaaaaccaatgcatttaaccctctcctatgttgcctaaactcagggctgaagtcacagcaaaagtctgctacacaaagactgcggagggaagttaaagcaaagatcccagttttcctgaaacagagggaattgtgatagtggcattctaaacaggcactagaaccacgcttttctctaagaaacactgttttgcagtgtctgtggcccactgcatggctcagtgttgttttaaaagagcaaaggtattaaattaaatgtcatgaactcttctgacgaagaaaataaggaaatgtacagcgtttcaacag

SEQ ID NO: 414199 - DNA, 219 bp, Homo Sapiens
atatcataattttctaatggatttcatattagttaccattttgctgacagacaataccagctaatttcagaatttgggctctaatggtgagcaaacctagggaaatcacacttcttgggaagatagtactggagagttaagaagagaatctctgcctgtgtctggtgttttaaacaagggaagtggcaatcccagatggggaggagagtgttcaccaag

SEQ ID NO: 414200 - DNA, 437 bp, Homo Sapiens
gctttaaatgtatatttttttattgggctaaaatgcacagaacataaaatttgccattagtaacactgagtacattcacagtgtcgtgcaaccatcagcactgtctagcgccagaactttttcatcaccccaaagggaaaccccgtatccatgaaggactcactccccattcgccctctccagcccttggcagccaccagaatgctttctgtctccataaattcatttttaataagtgcaattctgtgtgactttaaaataaataaacatgagcacgatgagttgcttattggaaggatatccatgcggggaggccggcgtgtggagtgcgtaggcctccggacgggcaggagttgaaggggcgtggatgtgccgccctctcctccccttgctctttccttggggtcactgcctgagtatccctctttgcaaatggc

SEQ ID NO: 414201 - DNA, 280 bp, Homo Sapiens
tttggccaagctcatcaaacactaccgagtggcggatgagccagccaagctgtccgagggcacctccttgactgtggacaacaagagcttcttgttccagtgggctacaacaactaccgagagccatcgccgcgagcgacgcgcagccacctatatgaactacatcaccaagccctacaaggtgtgggccaagttctgacacaccttctggaagtactaggatgatatgaagaagatccaagagaactagatgcagaacatggttgcctgtgagcaggtt

SEQ ID NO: 414202 - DNA, 474 bp, Homo Sapiens
  misc_feature (75)..(75): n is a, c, g, or t
ttagatatattcaatatttattgaatgaaaaaggtaagacattgagtaaggcaatagaatttaaaaatccaagtntatctatccactatgaacttctctatatatctaagtatattcactctcatgttttgcaaccatgaggcctcaccagaatcctttactttttcatcctggaagagatactggagatcctccaactcacgcattctaaagtaaactaaggaccagagattagagagcagcgatcaaggtcaagtgcatttatgctacagctagaacccgacatcaggctttctgattcttaattcattgttccacactacaacagcttttcctgccccacaaacattagtgctaacttcataatgtccggtgaactgttcttttcaaggagtatatttgaagggttcgccttatagaaactgactagttggaatctattttacaaagcattgaatgcaagtgaaaactgct

SEQ ID NO: 414203 - DNA, 502 bp, Homo Sapiens
  misc_feature (214)..(270): n is a, c, g, or t
  misc_feature (375)..(375): n is a, c, g, or t
tccaaatttctgtaggaggttacttaattgggagacaaacgtaagggaaaaacatgagaatgcagcatctaataatttaataagattgaattagcaatgcaaaacaacagcggcaaaccagacacaggggcagatggaaattcagaattccacaggtccaaggcgctgatatcagtgatagatagacttgggtttgcatcatcctctccctcannnnnnnnnnnnnnnnnnnnnnnnnnnnnnnnnnnnnnnnnnnnnnnnnnnnnnnnnccacacagcaaacacccaccccaaaattgtagttcatttaaataacacgtttaacacagagcctgcactaagactttatgatttcctccttacctaaatagaatngatcatcaagatggctgaggcggtgttagctgtaatatttaggttatgattcccccaaaaccctgtggtcacattggactttgggctccattttcccaatctccatcgcccctagctgataaagaga

SEQ ID NO: 414204 - DNA, 383 bp, Homo Sapiens
  misc_feature (82)..(144): n is a, c, g, or t
tttttttaagatggagtcttcactctgccacccagggtgaaatgcaatggtgcaatcattgaaggttcaaggctcactgcannnnnnnnnnnnnnnnnnnnnnnnnnnnnnnnnnnnnnnnnnnnnnnnnnnnnnnnnnnnnnngtgtacatgaccagaccagctccccctgataaccacaggcaacccctcaataaatattgagtgatttaatgatgcacaagagaatattttaaaggatattacagtggctcacagaattttcagaggaaccacacaatcagattaatgagtctgtacctgctttctctttaattcatttttgtgaataagtaaatatatgctgtgtgtgtttggggagatgggttgatttggctgtaggt

SEQ ID NO: 414205 - DNA, 541 bp, Homo Sapiens
ggtggtatttaaggagctgtattctaagtgtcccccatatttaatgccccagctctctagaatctgtagagggaagatacctgatgcttattgcccaatccctactctgccaagatcacgaggcatttgaccttggagggaggtatctggtcttcacttctctgttcctttccttccaccaaggaaatgtgagtggtgttgatggccgggtgtgtcttgtccttcaagattggggcagaaggaaggatgaagaacagggccagagaggcttggggttagcatagctgctatatgggtgaaggcaagctgaagagcctaacagccctgcccattcctctactgaaagatcttgtttcactttctcactataagaataggaataagatgttaaagctcaccaacatcaccttctcaagggtggtcacatacctttgccccttccaccaactggccaagggggagagtcatgctcttgggaagaatgagccatccagttttgctcaccagcttgggctttactttagttcagtactgtttttat

SEQ ID NO: 414206 - DNA, 487 bp, Homo Sapiens
ttacataaatgacaccttcacataagagttttacttagacaataaacctcttctccaaaggcaaatgcagtcatcattttaacgagattgattctccaagactcgccaggatgtaaataaaatcagcatagccaatgcattcacctgtcataaaggaaaggaatgaagggaacagcacctcaaggaggagatacgattaataaaacccagttctactaaaacctcagtcacttatgttaagttatcaactttgggatccaaatgataggaagcaatcatgatcagcactttccagaagcctgggagaaaaacaaacgagcatcacgtaggagtatttctaagtcataaaatacaaatgaggaactatcaattgggattaaaataaagggcataagatccagttgaaagcacctcaactgctgtggtcaacgtctccacccataaatgatgacttggcaatactgtattcattgttaaactttcctta

SEQ ID NO: 414207 - DNA, 587 bp, Homo Sapiens
tttttggacaaagtaacttactgcacagttaaaatcatatttataatctatgatttatgaaagtatatgtggtataagatatctgtaatatgatgtacaggacactgaacctgaaatcaggaaccctgagtttgagtcttgctctgccacttcgtagttaagcaagtcatttaatgttgacttattgtcttatctataaagagataatgatgacattctgtcaggattgatgtaagaattaagtggcataattactatgttttataaactctaaagtacaacatatctataaaaatgtgagtacacacttgtcaaatatgatactatgatagtttatccaagttatatctgttttatcttttcttcaaaaaggtgatttttatgtttaatagtgcagtcttttattcaaggccgtgttttgcttttagatgacaatttattgtgtatatttgtgactcactttttctctataaattaattggaaagttataaataatttgaaatactggatgataatgattctggaattacacttagttttatgtaataaaattatatagtagcccattacttgagaactacatcca

SEQ ID NO: 414208 - DNA, 516 bp, Homo Sapiens
gcggccgctgccgtctccatggcgaccgccctcagcgccgcatccggaggcggcggggcccgaagcggcctgtccgcaggcccggggtcgcaggcgcggcgctggcggctgcacagtgacgagagggccacggcttctcctttaaagccggatctgctggccccgagcttgccccaaggccacggcccggggagccggcgccgcccccggggcgacaagcccgagggccccccctgcgggctcggcggggccgcgacggcgaaaacggggcggccgtccctttaaggcgaggccccaagttgtccagctcccggcccctttaagacgacccgacagtgtccggcggcctagtgcggtggccaccccctgccaggggtcgatgcaagtctccccgaggaagaggaagggccacccctttaaaaggggccgaaagctcgccccgaaacgcagacctcccctttaaaagtgtctcaagtcctccggctcaaagaggccacccctttaaggagtccaggg

SEQ ID NO: 414209 - DNA, 583 bp, Homo Sapiens
tttttttggactcaaatgtagcatgtccagggcagtggtaactgagtttgtgtgctcggctgggtgcatatgaaaatttacatataaggcaagctaaccttaatacgtcaagtgagtccgatgggctgcccctctcctctttctgtgtcctctgctctttagaaatacaatgaaaggttgtgcaattgcatagtaaatttgagtttattctagtataaattttggatgttttgaagaattgttcgcttgaacgatctggaatggttaagtcacatgtttacttgataattttgcagtcttctgccagttaaacttgcaagagtcaaggaatggataggactgggtttctaacaagataccatcggttaagaacaaagagctactttacaaaagctaacattgaaatcaagtagtatatataatatctctcactaagcaaattaaggtgcgcttccacaaagttgactgtgagcacagttatagtgagccatatatttttgttgattttcatttgaagactgagaatgtgtgtttttaaacagaatttcactgaatgtaataaaggctatataagaatgtggaa

SEQ ID NO: 414210 - DNA, 129 bp, Homo Sapiens
ttttttgaaagtggtttagaatgtggacatgttgctttagatttcaagaggagctactgtagagacatcccaggaactgtcaaacacatcagacttgactttgtggagattcatcctcgtgagcctcct

SEQ ID NO: 414211 - DNA, 460 bp, Homo Sapiens
ggctgccaaaaatgctcttgcaatttgctttcttctagacaagagtctattcaaaagtctatttggaaacattagggaacggctgtcacatggccggcagatcatactgcctgtgacaggatattatcttcctcgggagagactcgaccactcttttatttcaccgagtaactagcatctgggttgacggctgcggaattgctccgagggccggggacattaacatccctgtccggagtgaatgcaaaaccgacagccacttcagtgagcaggatttgtggaacgaacctttcaccagcattaagcaccagtgcccacctttctggtctccatctctagtgggacctggggggcctcctgcttgtccaaatccctccccaggaaaccatgacgtagcccacttcctgttctggcgctccactccatgagtcaggccttcgtgcccccctttccctctcaa

SEQ ID NO: 414212 - DNA, 374 bp, Homo Sapiens
  misc_feature (97)..(97): n is a, c, g, or t
cacattgaatcatttcaacaatccccatgaggtagacatcgcaaatggagccaaagattggctacgacatcatgcttagcaaaggcaagtgcctggnttttgaactcaaatctggtagacttcaatgccaacctttcccacaagctgacactgtcatctcaaaaaaggaaggaaaacacttcgccttaaggcagtctcgcatgtgtcctttgggatcaatggaagggaacaagtaaacccagaaacccagcaccatcaccaagtagttgtatgacttcagacatacatctctgcatctcaattacttcacatctctgcatctcaattacttcaggttagaaacagcattaatatttgtaggaatatactctagg

SEQ ID NO: 414213 - DNA, 136 bp, Homo Sapiens
gattatcatccgctgatggttcagctgagggtggaaggggagtgagcatacactcggactgtgttttgaagttcatggagttttacattatagaatgttgtggagtaggaggaggtggctgttggcccttcctgtc

SEQ ID NO: 414214 - DNA, 480 bp, Homo Sapiens
tttttttgcttaggaaaacatatgtgattaaaaaaacaaaggcagacctttaaaatgggtttattaccctttatgggcatcacattcttataaagattttcaaaagaggtgtgccctaggagtaacgaattactaacggcacttaggcaggtagcctgttttaagcagaggaggccccaactccattgtaaaactgacaataatcatggtcagttcaacataagctccaaagttgaggtccttacctattttcaatgtctccctttctttcttccaaggatgcaaacagggccagagctattttatccatcagtacaacagcgtagggctcatagactgtaagattttcaatagccaatgaaagtatctgaggctctagaaaaatatttcacttatagccaaagaaacaacaactccaaaattacaattttaactttatgtctgccaaatgtaatataatgacaacttcattagttatta

SEQ ID NO: 414215 - DNA, 118 bp, Homo Sapiens
  misc_feature (13)..(13): n is a, c, g, or t
  misc_feature (50)..(50): n is a, c, g, or t
cctggtggaacanggccgcgtgcgggccgccactgtgggctctctgtgcnggcaacctatacgagagcggccacaggcttggggagagcggttgcccccgcggatggaggatatgggc

SEQ ID NO: 414216 - DNA, 419 bp, Homo Sapiens
acgtaaacttatttgtttattctgctctgtgtacatcctcatgctaaccgtagcaacttgcagctctaagtattatgtcataatgacagagaccattttaaagtcttctatctatggctgtgaagacatcattatataatctagttaacagttactctagtgtcacccattttcaatttccagatcgcttttatcaagatcaggttactgtgaagtaaaaatttggttaaattacaaatgttttgctttcccatctttagccacagccaagttttaagttaacatgatctttctataaactttgtcagtgctccctttaaacattatttaaaacacataattgttactgtatttccaactggtaagacctcaagcacactgtaggtttaaggaggatatagtagttgtctctagaagcc

SEQ ID NO: 414217 - DNA, 526 bp, Homo Sapiens
tttgttttcaaaaggggaggatccccaaaaacagaacttgaggggctctccttgcagatactcaagtgcagttacctccagaaagcaaatatttactttctttctgaattaaaaataactaacttggaattagagctcataataaaaagcattataatgaatgtaaaattcaatactatggtaaaagacctacacagaactttcagcaatgacgccgccccataaattgagatatagcctgagactgaagcagcttgtaaaatctacttcataccagtgagatttgttatcagcacttcacttttagcatccacattcctgagagggaacttgggtatgtaatccagaggtcctcctgttgcagttgtctccccccaggcccaccctcaccaccaaccacctcacaggacaaccacaggggcggctgaggaatgtcttgacttggagatacctgatcactgacccacagactaacatcctggttaacttgagtatctgtattactcatcttagaaagtaaaattta

SEQ ID NO: 414218 - DNA, 340 bp, Homo Sapiens
agcgaaagtgcgccgaacagctacctacgttgctcccaactaggcgctgctgttgagcgaatatcttgtggacgcatgctttcttatcttgacccgtgaccgccgcgtgaatctgggctctggccagctggcgagtagcatactcctccacaggctgtctggtaccatcagagctcagcaactcatagacttttgcattcagagtcttaccgcatggatgaggagaatggtgctcaccgactggagcggacatctggtgtagggccaagggcacatctcgcttctctagcgagatcccggaagcgcctgtgtagtcgtggcatccctctccgtatgtggg

SEQ ID NO: 414219 - DNA, 524 bp, Homo Sapiens; identical to SEQ ID NO: 46727

SEQ ID NO: 414220 - DNA, 268 bp, Homo Sapiens
gaactggcatctccccctcttgctcttggcctctaggacgctggcttccatctgctcccactttaatactttagcttttttaggaactaggcgtccaacacggggataccattattcaaacagaatgtaaagcgaaggctcatgacaactactgaactcttcccatgggattgcgtacgttctttggatacttcaactgggggcggacagcgagacaagaagcagctcgcatggtatgagatacggcgttaaagggttgggcaaaata

SEQ ID NO: 414221 - DNA, 486 bp, Homo Sapiens
gcggccgcggcgccctcggggcccacgatgatggcggagcaggtgaaatgcgcctcggcaggggtcagctctggagcgggctccgggccggtggtgaacgcggagctggaggtgaagaagctgcaggtgctggccctcgagtagtgcaccaccggcccgctggtttgctcccttcccagctctctgttaggctccgtgacagcacttaatagccactggctaacgaatcctatagaaaacttaaaggctggggatcgttattctaaaaaccgaaaagtggagatagggggaacagaaaggctttgggaccatgccactcatgttctcattggtaatagagaagcaaaatggtgggagacaggagaccgagaagaaagagaagaaagccctctctctaagaggtagagtggccagctgctaaggagacaagtgtttacttatttattctaaaatagtcaaatttgaactgttaccatcattgtttgt

SEQ ID NO: 414222 - DNA, 169 bp, Homo Sapiens
ttttgatatttgtggcagacagagtacgtccatttttcagctgtttgccatcgaatatcagtatctgttgatcatgaggaattcctttcttatcctggagcttggccttgacattatctatcgtattcgaaggttaaacctcaagggtgatggacttcccctaaagggt

SEQ ID NO: 414223 - DNA, 253 bp, Homo Sapiens
atagtgtcccagatgccatcaccagcgggtgctgctaggagcccggcggcggcaggtgggaattgattgacctggctgcacttgtgtaccaggatgcagagtactacatgtacctggacgctggtgactggctggaggtcagatggtgggcatgatggtggtggctgtgctagcggaacgagcctttgggctaccacactgcttgagactgctgagacgtgcactccattgagtagatcgatcttggactgtg

SEQ ID NO: 414224 - DNA, 312 bp, Homo Sapiens
catgctcctaaggtacttttattggaagatgtaaagcggttcaatgtaataggcttaacttctgtcaactaagttggcgtgggtgctttaagagggtggtagtgatgttgctggagaaagtatcccacagtcactggtggcttcagccacgggccattttggggcctaataatcacatatcatcatggttgctagtgttaatcgaaaacctactaagtgccacgcttactgtctctgggtcttgcttacgtggatgtcatttttccagttgcaccagatcgaaagaggttaattggtttgttggagttcctt

SEQ ID NO: 414225 - DNA, 193 bp, Homo Sapiens
cagccttgtggccttcgggaaaaaagctcttcccatgggccagggctgatagtgtaacctaaacaccaggcctcagagcctgagattggcctactccaatcaaactagagtggagaactggggtgggaatggaagcaaacggatccatctgatatttatctgccatgccataaccagtgcagtgggtggacga

SEQ ID NO: 414226 - DNA, 460 bp, Homo Sapiens
  misc_feature (405)..(405): n is a, c, g, or t
gcggccgcgggcgagttggacgcgctggcagagccgggctgattgcggcgggcgtctccgggcagccatgttcgcggcgcccgcccgcgcagcaggacggagccctgacagcaatgtttgctacggcctccctctgcagtcagcctaaagcaaggagctggaggtagatgaggcaaaggtaaaggagaccaaaacagtattttaaagaaaaaatcatttatcttcaaataggctccaaacctaagatggtgtatactgttaaaggacagaaaacctgctggtacccatctttgcatctccaggacctgacttgtgaccattcaataagaggttgatagatggacagactaatgaatagatgaagatgattagaagccaaaatttctgaatcttcctagcacccanaacatggcttaacatcaaagaaatgctcactaaatactgtcataatggaatgaat

SEQ ID NO: 414227 - DNA, 433 bp, Homo Sapiens
  misc_feature (377)..(377): n is a, c, g, or t
  misc_feature (386)..(386): n is a, c, g, or t
ggcacaaagtcagggtttaataaaataattgttatagaactgtaaattagggctttcatgtctaagtgaaatagtacagatatgatcaaagggaaagatggacaaattagagcacatagactctttctaaattgttacaggattgatactgctagatccaatttttttaaagggaagctacgactctgggtttttaaaatactatgcaagccacacaaaacacttccacaagccccatttcaacctaagagctattagattgtgatccctacaaacttatctcatcccagcctcctcattttgcaaatgggagatagtagaaatagctagtccttttatccatatccaaaaaaccataaagctgaggggatccttancaattctanctactcccctgggaccccacacccatggccatttttgccctatttga

SEQ ID NO: 414228 - DNA, 356 bp, Homo Sapiens
  misc_feature (59)..(248): n is a, c, g, or t
gtggggaagggaggaacaataaacaaatacataggtaaaatgcatatttacattatatnnnnnnnnnnnnnnnnnnnnnnnnnnnnnnnnnnnnnnnnnnnnnnnnnnnnnnnnnnnnnnnnnnnnnnnnnnnnnnnnnnnnnnnnnnnnnnnnnnnnnnnnnnnnnnnnnnnnnnnnnnnnnnnnnnnnnnnnnnnnnnnnnnnnnnnnnnnnnnnnnnnnnnnnnnnnnnnnnnnnnnnnnnnnnncatgccaagcttgagaagccctgtatgaggtggtggcaagagttacagggaaaacaatccgagaaaggtcaaagggagtcccaggggcaaggtggagggggtgaggag

SEQ ID NO: 414229 - DNA, 346 bp, Homo Sapiens
  misc_feature (56)..(56): n is a, c, g, or t
aagggaactggaagggtttaaccacatgctgtttccacccttccaagctgggcagnaaggaggaaaaccccataacgggcccgggttccccatttgaaaccaaggaaatttggggggaaaacaaccccacccctcccttttccaggaagccaaaaatgggaggcaacatttcaggggaaaaggtcttaatcccgaaaaagaaccagggccgggccctgcggaaaagcgaccttggcctgaaaacaactccattgagccccctgaaacaggggtaaggccttggaccaaacccccaaactggaaaaggggccctcccagggccacgggcaagaagaatatcccgaaa

SEQ ID NO: 414230 - DNA, 435 bp, Homo Sapiens
  misc_feature (251)..(251): n is a, c, g, or t
  misc_feature (350)..(350): n is a, c, g, or t
aatttcacaagagtttattaagtacttatagtgctccaggcactgccttctgagaacagatgcccactcactactgcaaccctatgtctccccttgccatgagaaagcatcagagaacacatggtcttgacctgcagggagctcctggtctagctgctgagacagaaaaagaaggaggaacttgctaaacagtgtggtaggtggttgtgactggaaagggtagggaatagaggaatttcagccagactcancttcaaggtgatggggaaggctgggggctgaagttggggcctgggataaatccaaaagaggtatcctctaaattcttatatacatacattgggacttanccagttggagggaggacattggaggtggaaggaaaggcacaagcaaattcctagacatggagaattgcagggggtgaaggaaagg

SEQ ID NO: 414231 - DNA, 265 bp, Homo Sapiens
ctaagtttcatttaaataggacagtgaatgtaaaagtgtgattagcacagggcctgacccaaaataaatgcttaatgcctattgtcattaaaaacactgctgaacgccataaaaaggacagaatcggcttcacccgacagggacaaagttcctttggaagtctggcagccctgctccttcctagggatagagttttgcttaactttgcggagtgatcagcaagaacacccttaagtttatgaaaagagtctgtggagttatttgc

SEQ ID NO: 414232 - DNA, 157 bp, Homo Sapiens
cagtccctgcatgtacaactgctacaaatatgcctgctctccatccacatgaataagagacatatttcttaaatgcacagggccaaaaagaaactttacccaacatatgggactgacctaccaaacaactgctctgtcttggcgccttcatacaatg

SEQ ID NO: 414233 - DNA, 423 bp, Homo Sapiens
taaacacaaattcttctagtggaagtaaataaggtatagtaaacattttgactgcaggttttaaaataaaatggtcagacgtagagtaactataatgtcaaaacttatgacacttataatttttacttttacctacattttaatggttcagatcttcaaatatcattgatttaaaaactaaaaggtgagtaaatttttaataaagcagacaaactaagataaacatgggtgagttggctgaggaaaattcactatatgtttaagatctaaataagcaatatatgcttcaaaataggaatatatagagttatgatttgattccatttgggctaaattttttaacttaaagcaaaattacatagacactaattttggagtaccaaataatatagaaaaaaatgcctgcaaatgttcttttatttt

SEQ ID NO: 414234 - DNA, 465 bp, Homo Sapiens
tttgaccttggaaagggaaatcaaagactgcttttattgatgcacaaatagacccacccatgatttgaaagggatgataatattaacataatcattatcatcaaagcaaattaaaatgcaaaggtatctgaaatggctttacagttatatgatgccttaataaattaaggaaactgattgctctgagtggcttctttcagtggggatttattgtttttcaccttcacctaccaaatgttaagaacacccctgccccaagtctgtaacaagcgaaaaactttcacatattttcaaaagcctacagtcaatgaaatcacagagtaattcgtgttatgaaaaaaatagtatagggtcctttagaaataccttacacttgtgaatcctcaagaaagtaacttctaagctacaacctaaaaagaggactaggagttaaccaggtaaaaggttaggaggagatgaatgggt

SEQ ID NO: 414235 - DNA, 322 bp, Homo Sapiens
ccactattaaaataactgcccccgggaaacttcggggggtttggatgaaaatggctgttactaccagggctatgtggctgattgaaaaatttcccatgaaccattttaggtctttttggcatacgcccatggaccttgttttaattatccctcatagggatattcccaagaacgggttggctattttttttgtccaggggttgagaatgaatgtgaggcgtgttataccacacccgcctttttttaagaatactgcgggaagttctattgacccaacaatgggggcttccacatgggctttacggagtcataaggggaggcc

SEQ ID NO: 414236 - DNA, 569 bp, Homo Sapiens
  misc_feature (287)..(295): n is a, c, g, or t
  misc_feature (510)..(510): n is a, c, g, or t
aattaaaaaaaatagtatataggcctattcacattcattcatctcacccctgattaaagttcagtaacctttatgaaaggccaccagcataatactctttcaagtcaccaggtatttgagaaccaccaaaataaaggctaacatagcctactgtaatgaaaaccaaaagtcattctaaaagggaaattgaaggatgcaaccggattgatccttctttgagcaccatttgtcacaagaagaaatttaaactggtatggcacataagattccagtaacaagcttccccnnnnnnnnngaagcatctatctgaaagtgtgttgatacgaccaggtaggcccacctagctatgctatcttttgtggtatgactatcgtgattatttcatggatttttctctacagtctcaattttgagccattttgctagcttcaacaaaggtgatatgtattaatgtatttgtaagctttgatatttataacactttcatataaataaatacacagccagctnttaaaaaattacttttaagatcctgtgtcttaatgtggagctgggaaaagatgctgtgt

SEQ ID NO: 414237 - DNA, 542 bp, Homo Sapiens
ttccaaaataaagtctcaaatgtctaaattcataaccataaaacatttgtaacaactatgacttggagattcctattccattcctattcctatcccaggaaattacctttagaaatttactgatgcaaatattgaaaaacctatgtacaagaatactcactgcagtgttgttataggaaaaaagcagatggctttccataggatagcatgatacatttgtattatggaatattatgtggctggataaaaggatcaggtaaatccttatgaattggcacaaaaagttgtccactctctaatgaaagcagattatagaacagaaactacagtacaatcctatgtatgtaaaaagtttcatagacatattttacatatacctagaaaggttctcaaatgacaaacttgatacttaatagggaattttatcctaggaaataggattttaggggaacttttgctttctgccatatatattgtacatggaggtatactgaggattttgcaatgagcatgaaatataaatctactaaaaatgattttaa

SEQ ID NO: 414238 - DNA, 487 bp, Homo Sapiens
  misc_feature (245)..(245): n is a, c, g, or t
  misc_feature (417)..(431): n is a, c, g, or t
ttttttttaaacagcgatgatatttccacacatcaccagtccaattattgtcagtgacacatttcagccttacttgtagattttttcccttctggccttaaaagaagctgtgtatacagctttacataactttccctttaaacttaaacctttatggtagtcccattcaaccacttgacagctccattaatctatttttactattaaacatgccattttacaagatatttattccacttgggcgnccttccaaacgctttttgacattactgccctgggagtgaactgcttaaactcgctgccctcataaacagaaaatcaccttttgactcaaatcttgaagagctctcagaacctcacccccttcacttctacaggcattaatttctgccatatataaaggagagagtgagtaannnnnnnnnnnnnnngttttaagagggtaattgtgggaggtctgggcaattcaagaagtgctgggggaagg

SEQ ID NO: 414239 - DNA, 248 bp, Homo Sapiens
ttagcttcataccatttaaagtgtcaatttaagcctaatctatcttttccttcaaagtatcaaaaaacttttcagatgccctcaaatatttttttctgagataatacatcctagaatgtaaatgataattatattcagcatagatacctcttcattattcctggataaaataaaaagaaacaaaatcaaatataactagaaaagtttcatctgcattctatcatttacttataattcccccctgggac

SEQ ID NO: 414240 - DNA, 502 bp, Homo Sapiens
tgttgtatggttcattgttaagacgggagccagacttcttaggaggcagaattagggtagatagaccgctatgctctcgtggacaacccctcatcggtgagtatataagcagcatgcactgggcttggtgagttgttacaacatcagcaaaagtaaaggaaaactttgggaggggtgagaagtagaccaggaggagtgagggaggatggatataatacaaaataccttgtatggaaggaagtatgaaaatcacaaaggattggtaaaatatatatattttcaaaaggattaggaaattactaaagccagagaaatcactgtgaataagcaggcacaaggtcagagacaaaatatatgtgccaggaaaacctctttgggaaggccgttctggatgctctccaggccatgatatgacatctacacaggtaaaagactctagtaaggtgtttagaagtcaggagagaaagcccattcacagtgatactcggacttgtcagggagc

SEQ ID NO: 414241 - DNA, 276 bp, Homo Sapiens
ctatgttgagtattttacttaattttaaagtcagatatgtttgtggttataatatcctgctttcacacaagctgtatgttaaatgcatcacacttacattcaatgaagggcatgtaattgagatctctgaatgtggaacttgttaagttcaaaaacaaagaaaagcagtgtctcattttccagacacctattctccactccctgaagttcaaggatacgtttaataagatagcagaagaatgtttgcattttttaaaatccaaaggcatttaattt

SEQ ID NO: 414242 - DNA, 174 bp, Homo Sapiens
gatgggacaagttgtggtccaagggataaaccataaacattccatttggcccaaaggggacacaaggatggcctgaacctgcaatgtcaaagcccaaaaagctaaaagttttcaagaataaaactctttcttctccccccttcctgaaacaaataaaaacatagtgcactttca

SEQ ID NO: 414243 - DNA, 410 bp, Homo Sapiens
aatttataaagaacaggattttatttcttagaattatagaggctcagaagtgcaaggttgaggggctgcatttggtgagggctttcttgctggtaaggtctctctgcagagtctggaagtaatgcagggcatcatatggcaagggggctgaggatgctagctcagatctctcttcctcttcttatgaagccaacagtctcaattccagcataagccattaatccattcacagcaagaccccatttctaatccattcatgaaagcagatccctcatgacccaatcacttcttaaaggccccacctctcaatactgtcattttgggaattaattttcaacatgagttttgaaggggacaaatattcaaaccatcttaacaatactaaatctcccagcccattaacatgaaat

SEQ ID NO: 414244 - DNA, 253 bp, Homo Sapiens
gcacaataggcaatccctcacataatttggaatattaagtttattcaagcatatttggtcagaaggagggtgatctcacattccagatttctaggcagccctaatttcaaataatctgtcccattatctgatttccgtatgtactgatatttatttggaacctatgattcctaagtgtagcaatccagctaattctaatattacctttcagaagattaaaattcatttttctactctgaaattacatgaagct

SEQ ID NO: 414245 - DNA, 124 bp, Homo Sapiens
caaaaaaacccgggaaatcccggcccggccccccccggttttttggacaaaactggtttaaaggggcccccaaaaaggcccaaggggcaaaaggggttcccggggaaaaaaggtaacccccccc

SEQ ID NO: 414246 - DNA, 296 bp, Homo Sapiens
tagagattcagtctgatttatttgaagataccttttacatttgttttaagataagctgtgaaataaatattttgtataaatgtattgcaaggtttggaggtaaacaagcaggtatggtagatacattcagccctggctttgcagagcgtgagttcagaagaaatacaggactagactgtgagacgctctgataagtgatacatttctctgacatttaccagttctacgcactgactgatgtttatccagagtaaacatactgttgagaattatctatttacaaataaatggaggcc

SEQ ID NO: 414247 - DNA, 133 bp, Homo Sapiens
accattttgtttccatgtctttaactctcctcccattccttctagaaatgtcacatctgtcacaacatatttggcttttatagcttttaacttatctctaatccaaacctatacccaaatttctccaacttcc

SEQ ID NO: 414248 - DNA, 428 bp, Homo Sapiens
gtaaagtaaataatgacattttaaattctcccccaaattttgtttcttataattcttctccaagtcaggtactcataaacccaagggatttcactgagcactgtgctaggaacagatgtccccaaaaagcaattaacgtacttttctcagttacctgaatctaaaacaggtacagaaagatccattcttggggttcttgctctattcactataatttccagttgctagtttcaaatatacggtcatagcagagaatcagcttgggtaaattcaggggccttcttctctaacacagtgatgtgtgagaaaaatgagattatctggataaagttctccaagcccactggaggaaaaaaatacaaaagagatgcaatgtattgtattatatttctactgagccacttctgaagcacagccatgaatgcctg

SEQ ID NO: 414249 - DNA, 371 bp, Homo Sapiens
agggttgagggggaatcccggaaattggaatgggtatggagccctatcatataagtaatgccagggggaggggtaggaagttttttcataggaggggtatgaattggccctacccgaatccggggtatgccgttccaattcctaaaaaccgggaggttagaagtagggccctggtgaccaaatatgttgggtagagttcaggggaaagtgccccctatgttgttcccaggaagaatggagtgggggaggtgtttattataaaaaaagtttgggtattccgctatgaaaaatagggccaaggggcccgccgcgtattcgaatgtgaagccccaaaccagttcggaccccccttcggcaagggccaaaagggt

SEQ ID NO: 414250 - DNA, 178 bp, Homo Sapiens
caagcacaagcagggccgagacctcagaaacagaagcccagggaccctccggctaagagccaagaacggaaaaacacccaagcggccggggcggaaagagagacgcccgggacggacgcaccccaccaagaacccacgggccgaacagacggaaggaacagccgcggaggaggagacg

SEQ ID NO: 414251 - DNA, 417 bp, Homo Sapiens
ctgttttcttttagtgactgaggcctcactttgttgcccaggctggagcacagtggctattcacaggtgtaatcatagttcactgcagccttgaactccgggcttaagctatcctattgcttcagcctctcaagtagtgattagctggtactaaaggcacctgccactgcaccttgctgctatttctaatataagtccaatttttagggagcgatgactccctaggtaaaatctttgttgaatagcatgtgagcagcatttagttggagaattaggtaatgaaaagacatagataatatctcaggtaaaagtagaaatattaattaatgatgatgatgacgatgatgacacttactgagtgcttactatgaatctgaggctttccccaagcattttacaagtattatctcaatctgc

SEQ ID NO: 414252 - DNA, 277 bp, Homo Sapiens
acatcttttgtgaattttgttttaaccacatgaaacaaaattaattttgagcacattaaatggtgtgcataatcactactgtcttgcatcataattgggtataaaatatcagccagtcacacaagaaattattgttatttctgaagaatttagggttgccattagtgtcaatagtcttccttcgcctcagacacttaataacaccctcttttcatttaagactcactatgtgccatgcattgtgataagtattttataaacacaataacatgtaatg

SEQ ID NO: 414253 - DNA, 328 bp, Homo Sapiens
ccataaagccagaaacgagatggtagagaaggaaattatttgacttaaatggtaaatacttatgtcactggctaatttttcctcttccttcaaattagaattatctcattttccaagggatcccttctttttctctctcctaaaaggtgcttcccttcttcactgaacacttctcaaattcagagttctttctttaacccgatgtccgacaactgtccagccagacaaggggccatcatcacccattaaattacaagtccatatttattactcctttctttcccttcattccacaccatctagtttcttgtcctactataaaaaagag

SEQ ID NO: 414254 - DNA, 263 bp, Homo Sapiens
cacatccgcatccaggccgtcgtccaaagccagtgcccctgtcaaacgtgccctgtgtggcccctgtcaaatgtgccctgtgtggcccctgctcacagctccacggctcccctctcgaggcgaggccttccttcctgtgtccatcggccacgtgctctgcatccacgacctgcagaccggcgacctcctagcttgtcctggagaacacaggtgtgtgcccgcctcaagactgcacctgccgtcctgctgacgccacgtggccg

SEQ ID NO: 414255 - DNA, 321 bp, Homo Sapiens
tatgtatgtaactattaattttattgaggtatcaataaaactacaataaattaggtacaatttgataagttttgacatacacacttgaaaaaccattaccacagtaaaaacaaacaagcaaaaaaactaaacatgtctatcacctcctacttttttctctataatccgtctcacctgccccaagccccatataccattggtatgctttgttacttagattagtttggattttctaaaactttatgtaaatagaataatacattatgtattatttgtgtctggatctgtcactcagcataattattttgaaattcacgtttt

SEQ ID NO: 414256 - DNA, 265 bp, Homo Sapiens
aaattttaaaatcatttgaccatactatcttttttcttcacagatattacaacaatttttttaagggggacaatgtttcctgtttcatctctctcttttgtttcttgtgtgtgtggcagctgctgtttgatctgttcattggctctgatttgtttcatgtttcagccaaagattaaaactgctctgtaattctaagcagatgggccctagagtccaaccctataattataccttctctctttttgccctctgcaagccttccatc

SEQ ID NO: 414257 - DNA, 122 bp, Homo Sapiens
  misc_feature (68)..(68): n is a, c, g, or t
gcacagtggcccggaacacagagggtaacataatgaatggatggaggaagttgggggagtctctctangagatagtggaatggaagtggcccagggatggccaagctctcttgatatcttcg

SEQ ID NO: 414258 - DNA, 246 bp, Homo Sapiens
ctattcttgcctaacttatttcagaaagttggttttccagctcaaaatccttttctctgcttggtctattctgctattaataattttaattgcattatgaaattctattagtgtgtttttcagctctatcaggccagttatgctcttttctatactggctattttgtctgtcagctcctacagtgttttatcatgatttttatcttcctttcattgggttacaatatgcccctttagctcagcgag

SEQ ID NO: 414259 - DNA, 132 bp, Homo Sapiens
caataaaattaataacacgtacatatttttaacagacaaatagaactacaaggcttacaatgaaaaaaggcagtcccttgccttgctttgcccaccctgggtcctccccaaagaggcagccactttgtactc

SEQ ID NO: 414260 - DNA, 106 bp, Homo Sapiens
ggggggaaatttaaacaattttgggcccataactttcaaatttttggcctttaccccgggggggccctggtttttaaaacttaaaagggccttttaaaaaaccaaa

SEQ ID NO: 414261 - DNA, 183 bp, Homo Sapiens
  misc_feature (77)..(86): n is a, c, g, or t
  misc_feature (123)..(132): n is a, c, g, or t
atttttggggtttaaaaccctttttcctctggggcacaaccctcctccccccccgctaaggggtaggcaaaaactannnnnnnnnnctccccctctttttaaaaaccagttttggggaaaccnnnnnnnnnnctttaagacagaaagggaggggggaaacaactaaggaaaaaacccccaaca

SEQ ID NO: 414262 - DNA, 200 bp, Homo Sapiens
caatgaaagagcagcaggagcctagcgcttcccaaggcacaaaggcaaacatttttaccatttattctctgggaggatgggctctaggattaaagccttgctacttctccttctgtaacctttaatcatgatctgcctttctttccatgtctacccctccatacgggaaaacagagaaagcagaggataagcagagttac

SEQ ID NO: 414263 - DNA, 262 bp, Homo Sapiens
ctgtttttatgggtaatgtatacaactattttgtttatttttatggggtaccagtgatgttttgatacaagcatataatgtttaatgatcaagtcaggataaatggggtatccatcacctcaagcacatataatcatttctttgtattaggcatattcaaattccactcttttagttatttttaaatatccagtaaattagatcttattcattctatctagatgtatttttgtacctattaatcagccatattgtatccccc

SEQ ID NO: 414264 - DNA, 326 bp, Homo Sapiens
  misc_feature (153)..(188): n is a, c, g, or t
ggttgttagtgatgctttcatatcttcagatagatttctctgaggttatactagcctctgctggagagaggtcttttgtctttttcctcccaggaaggagtctctatcagtgacatggcatggctttaaactctaaagagccggtctttaagnnnnnnnnnnnnnnnnnnnnnnnnnnnnnnnnnnnncgctctcttgacccccagttagaatctgactgctttgagtaactgctgtaaactgcaaatcatttgcaaggcttccacctcacagcttacaacttccatttaatggtttttctcagaaatttctaaactttcccccag

SEQ ID NO: 414265 - DNA, 355 bp, Homo Sapiens
cttattggtaaattttctgttgactacaaagtcaaagacacaggaccttatcttttgcccagactcttgcaataatgtcccaaactggcccctctgctacgggtctctcttaaccacaatgctacccactgctcccaactatcttcatatatgcacaagagtcagaccttatacaggactttgacagcaagatttgttaagacagacaaagaaatgtaacaaggtatatttatgataggaaatattttatatcactaaactaaatgggataaaaaggagaataatagttgagaagattgaagtgataaactgacactaggaagtgggccttgaattccaaattcaagagtttagt

SEQ ID NO: 414266 - DNA, 271 bp, Homo Sapiens
atgataattaaatgcttttatttctacatctacaattaaaaattaaacattaagatatttacggaagcatgcagcttccttcttaatcccataatcaaggagataaaatttaaattcctgtaccttccacagggatgaaatatcattgtttagtgacatcatatcaaacacaacgtactgcagaattttcaaagcagttatatgtccactgtaccaagaaaggaagatatgtgaaatatttcatgaaaattttccaagaagagtttaaaac

SEQ ID NO: 414267 - DNA, 254 bp, Homo Sapiens
gggaggaaaaagggcttctcaaaccttcctaaagtttcactttctcatttaaaccacaccacccttggttaacaaaaccaggcaagcaaacacccccaggaccttgacttttttggcacccaccccattccaaaggcaaaggccccagttattttcctcccccaattcaggaaccctgacaaaagggtgaccttgttcctttattaccaccaatctgacaacgaaccaggaaactaacctttttgacccacggc

SEQ ID NO: 414268 - DNA, 237 bp, Homo Sapiens
  misc_feature (71)..(84): n is a, c, g, or t
  misc_feature (191)..(191): n is a, c, g, or t
aaagggcccaacattgggctttatttttccccaacgaaaaaagggagcaacagggccctgaaaattaccannnnnnnnnnnnnnggggggcaaaaaggagggggggaaaaggaccccaatttttggggagagggaaggcccctttttcgcccttaaaggggaaaggaaaaccctgaagggggcccccccanccccgtttttgggcaaaaatcccaccagtttgttcaccaatttgtt

SEQ ID NO: 414269 - DNA, 190 bp, Homo Sapiens
aaaggtttatggaaatgaaagggctttattgataattttattataaaatttcataaatcgggtttttcaaaaaaaggttatataaaatccagcttcccaaaaacactaatagttcagcatgtcaagggactaactaaatcattcacttggccccatggggaaaattttagggttattgccctccacaggg

SEQ ID NO: 414270 - DNA, 166 bp, Homo Sapiens
aaacacaaatatatccgtgatgatgttaagaggtctaactgcaggcatctcatttctaaccactggactcttaaggaccccaagaccttatctcttgaggctaatatgactttaaaacccaagcctcttgaacagtgagacctataactctttcctatcagcagtt

SEQ ID NO: 414271 - DNA, 341 bp, Homo Sapiens
ttttttctttaagatgcggtagaaaactctaatagctcagcaatactggagagagaaaccacatttacaaaggactaaggccacactgagaagagctggagtgaagaaaactagctttcactttgtaacttgtgcatttggaacaggcaaatgcaaatgattatcaattcacataaaatacgaagtatttttattcagcaaacgtcttcatcaagaaggccttccttgtttctacccatttcattttactgtccaaggaaacaaggtagttctttgtctcttaagtgcctcaatatttgaaaattaattattccagatagccctagggcagcatagactag

SEQ ID NO: 414272 - DNA, 193 bp, Homo Sapiens
  misc_feature (142)..(142): n is a, c, g, or t
atgagccagaatttttaaattaagccttttgcatattgtttccaagggacaagtgtcaatcaggcaggcagtaagcagaacaccccctactccttgaatattgagcagcactagccagcatctttcaatctacaaacacttnctggattgaaaactggataaggctgtagctgagattggggagaaagaagcc

SEQ ID NO: 414273 - DNA, 262 bp, Homo Sapiens
attatcaaattcttgtagggaacttttcagccctagaagttcactttgattcttctaaaaatggctattttgtctttcaactcttggattattttactggattccttggattgggtttcacctttctcctgaatcttaatgaacttcctcatcattcagatgcggaattctatgtctgtcatttcagccatttctgactggttaagagccatcacttgggagctagtggactcatttggtggtataaagaccggacgcgtgg

SEQ ID NO: 414274 - DNA, 244 bp, Homo Sapiens
tcgtgccttggaacagccgcgggaagatgcccgagggggccaactgatggaagacgcagggcaggaacagcaaggccacccccgccgcagggccgggaaccatcatgctgtgcagcaaattagaaaagggggcaccggacgccaaccgggccacagacagcatgatatccagaagcagaggggccgccaggcctgggctaaagagaatgaatgtggagaggaccacgacggctagcccaagtga

SEQ ID NO: 414275 - DNA, 383 bp, Homo Sapiens
  misc_feature (71)..(71): n is a, c, g, or t
  misc_feature (197)..(197): n is a, c, g, or t
  misc_feature (320)..(320): n is a, c, g, or t
caatatccatcattaagggttaagttaaaatagcttataatagtcataggatttagatttgctatttgcangtaaatctaaaaaatgatgtatcaaatgttacaaatattcaaaagataaaaactaagaaaacagtttatataaactaataattacatacagggtatttcagctctttctggatactcttacctctngagattttctccccaataacaaatatggtagctggggattcatcgatttcatcttactaaagagatcttgaatttcttcttgtgaatatcccatttccacccatatatctattcttttttgtnctgggatgctagctctggggtcacaaatgggttgagtcatcttcttcatgccctgcattgatc

SEQ ID NO: 414276 - DNA, 428 bp, Homo Sapiens
  misc_feature (95)..(185): n is a, c, g, or t
tccatagcatccaccaccacctaacagttaaagaattttacttccttactatggttattttttctactgcttcttcatgccctttaagttctatnnnnnnnnnnnnnnnnnnnnnnnnnnnnnnnnnnnnnnnnnnnnnnnnnnnnnnnnnnnnnnnnnnnnnnnnnnnnnnnnnnnnnnnnnnngcaagcaaattaatactaccttccctatgcagaggctttattcgtattttcttgttccataatatatttgcaaaacaaaagcaaagagtctccttgttcggctgctttctatgtctgactatgctgttccggctgatgctcactcacaagcacccctttcccacctttgccctagtgggctaggtgctgtccttacaggctcagacattctctatgaacatctgaatttgagatgcccatgca

SEQ ID NO: 414277 - DNA, 180 bp, Homo Sapiens
  misc_feature (43)..(51): n is a, c, g, or t
ccattaagattcctaatttattattaaattccatcccaaagcnnnnnnnnnccagccagaaaaggcccttttagataagaccaaaatttaggtccaaatccaataaaatgggttccaagaagcttttttaaaagcaaaaccttacaaggggctttgggaaaccaatgggttttaaaaatc

SEQ ID NO: 414278 - DNA, 302 bp, Homo Sapiens
ttttgccttttggttgccattcgcagattcttctgaaatcgataggtatctgcttctaaaacaagctaaaaataatgcatatttagtaggtattagttagttacctatattaggatctgtactttacacagctgtagatgaggtatcctagaaaaggttaaataatctaccccatttaggcttcaaagacgaaccctactgcatctttttaaaagcattttctgacttgcagatgctgtagtagcaagtacatgagaaatgggttccgtcatggataaattggtaccctgccttagggggca

SEQ ID NO: 414279 - DNA, 449 bp, Homo Sapiens
  misc_feature (183)..(206): n is a, c, g, or t
aataagggtactgatcctattcataagggcaccacacttatgaccaaatcacctcccaaggtgccacctcctaatgccatcactttgggagtgtaaatttggggaggaaataaacattcagaccatagtagaatgtttttgtaaaataatatatttataaaaaccagttactaaagaaaactnnnnnnnnnnnnnnnnnnnnnnnngtgtgtgtattttcataagaatagtaaaggatatgaaataaaactcattaaactgttaatagtggtttatattggaaacttggaggggtggggaacaatgctgattttttttacttcctacttttgacagattatttaccagtgaaggtatacttctttagtaatggaaaaaatttaaataatcctaccaaactaaaatccttccagttgctcaaacatttcattctccttcacatttcaagg

SEQ ID NO: 414280 - DNA, 139 bp, Homo Sapiens
ggggaggaaagagctgcttaggagggaccaggaagcgcacaggagcctgaagggccacgtcgcggaacacaacacactgaagaccctcatagagaagggcaggggcaaggctcttgcccaggaaccgggagaagaaggc

SEQ ID NO: 414281 - DNA, 238 bp, Homo Sapiens
  misc_feature (108)..(108): n is a, c, g, or t
  misc_feature (175)..(175): n is a, c, g, or t
cccaacttttgcatgcccggatcttggccaacaggccaaaaatgaaggcctttgggggtgttgaacaaacaaccaacagctccttgaccctgggaggccgggcattgnaactctccatgtccaggagcttatccacgtaaatctccaagttttgggatcccctttccttggcagncgaaggggcgcggggctggtccaggacccacttccttagggtggggcccctccgaacctcctt

SEQ ID NO: 414282 - DNA, 408 bp, Homo Sapiens
cctgaagcatgctctaaagtatacattttcatataaaatgtctaggacaaaattttttcatattattatatgctgaacatcgtttttatactttgctcttaagcttgtttgagaacgttcctagaaatagaattctaggtccaaatgttttctattcgattttaaagatattaaaatattgtattcttgtattcaacctgttatcagtctgattcttaatgcatttgaaatacatgatcttcttattctttactttctgaaatatgagtagtcaaaatttgatacttgttttgtcataattagattccggttaaaggacatattctgttctctaacagccttttatctttgatggcctgtgcctgaagtaattttcacattagagagattacaaagtagcaattttct

SEQ ID NO: 414283 - DNA, 419 bp, Homo Sapiens
aataatttattgtatttattaacaattaaagacttttgctgtgtgtagagctgacaaaaacgacgacagaaagactttgagaataatacagcataatgaaggcaaaataatttttacttaaatctgcacgtaagggaattaatgcaataaacgttcaggtaatcccaagggtctgttaaaaacaaatctcgcaagaaataaataaaaattctcatattggcttaagtcatgaccattccatgttaaatgttcaaactgttttgttgaagagtaagccaagactcacttaatggtattcaaatatatagagaaatatttttaatttcccaggataagaaaaaacagcttttacttgacccctaagaatgtcctttaatttataacaagcgcttctttcaaacttatcaaagtacaactgg

SEQ ID NO: 414284 - DNA, 284 bp, Homo Sapiens
catatgtggccatgtatctgtattaaattacactatatgaaaggcacatggccatgtacacattgtctgttcttcatttaattacctcattaaaaggaggatcaggaaaagagtccatgtattcattataagttttgttttcctatacaaccaactcaattttaaatttgcaggaaatgtttaatgagctcagaaataaactttttataatttcccagatcaaccctaatggagatatgtatgccgtataatccattctgcatctgcattttcaggaagcttcc

SEQ ID NO: 414285 - DNA, 327 bp, Homo Sapiens
  misc_feature (145)..(216): n is a, c, g, or t
tatcagtacaaaactcatgagtttttaataagcagacacataaatgtatattcattaatacacatacatgtatttcccagctgtatctcctgaaaggcccaagaggcaatgacaccctattggcaattagtatacttaaatgaannnnnnnnnnnnnnnnnnnnnnnnnnnnnnnnnnnnnnnnnnnnnnnnnnnnnnnnnnnnnnnnnnnnnnnngggagaggaaaaatagatggtcctgtagtattctgtggtgccagtaaagaagtgttcaaaaaaatatgggaacttgtaaagaccctagagttaactcaaagagttctaatg

SEQ ID NO: 414286 - DNA, 172 bp, Homo Sapiens
acgcgaccggccggggaacaaaacgagctccggtgagaaagaccacccacccgacacgccgaccgaccacaagcggcggaggggcggagaaggcacgacaggcaggaaagaccagacgacgggggggccaaacgcaccccccaagacgcgcaacgggtggggaagcggaaaa

SEQ ID NO: 414287 - DNA, 391 bp, Homo Sapiens
tgatgtgagcccacagtcaaaccactgagccacaggcaggactttcatactaaaatccccaacagaatttttaaaaattcttatcagtggcacccctcctctggcctcaaaatgtgctttgggattaaccctctaataccacttctggcaaatgaatcatggccccaccaaggattaacactggggcccttcttggctgggagacagacccggagcttcaaaccccactgcagctgcaagagcacgcaggatgccataaatgaggctcgctgtatgcaggggaggcagcaagccctcttggaggggcctgttgtctgagcttcgcctacagctgaagagataagaacctacaactgcagccacaggaaatgacaaagcagtgactgatcgg

SEQ ID NO: 414288 - DNA, 265 bp, Homo Sapiens
tcggaacaatgatcatatattttccattgctggaacgatacacaataactgaaatgcttaagaggacgcgggaatacgagggcggtatgaagccctcattacaaagtttaatctctttctgaagaaggtaatgcaacgtctggcttttggcaatgcagcgtgtctgctgtttttcctcactttactcctagaaacattaggacaagaaaagtcctcagctgcatctggaaagatgcaggggcaatgcatgcgacgctcttcaccc

SEQ ID NO: 414289 - DNA, 263 bp, Homo Sapiens
  misc_feature (48)..(92): n is a, c, g, or t
agatggaaaaaatttaccacgtttgtaataatctagagaggaataatnnnnnnnnnnnnnnnnnnnnnnnnnnnnnnnnnnnnnnnnnnnnnttgcagcagccatttcctggatgtagtacatggataggggaggaatcacccacagacaggagcaaggagagttcacctgtggtgtcaggtgggcaggcagagcatgtgggtgcaggtactggtcactgcccaatgtggtgtgcatctataaaactcttctgcttgctttag

SEQ ID NO: 414290 - DNA, 470 bp, Homo Sapiens
aatctgacttcataaaggaaactcagatcctcccaaatcaccctggtgcattcctgcgaggccagagggtgacttgagattgcaacctcaagttcaactgctaataccacaccagtcccccttcactgccagctgagaaccaaccctgtttcctgagacatcataagacaagataccttagcctcccttgaacatttccagacaactagcagactggcaacttgggtgaaagacgttcatccctcccctggtacagctgctccccattttgttctctgtggatatggtgagggttcagcccagcaagcagacaaagcctatgtctcccaacgtgaaggtgtctactttaacagaaccccatggatggactctcttctgacatgtaattatcttttgaatggctcctgtggtctcccattccttctggctgtggacccctaacagctagctcagaagcactgcaccctagc

SEQ ID NO: 414291 - DNA, 247 bp, Homo Sapiens
gaaaaggagactttatttctcttttataaagggttacaacctgcaggctggccatcccactggctaggaagcagagcctccagccaaagccttaacaggcactttgagggagggaggagtgagataggaattttagttgaatggattggtcaacaggttactggaggagctacgaatatttacggaaggggtcctgacatatgcatatcgaacaaacatgcatgttatataccatccatgttcacct

SEQ ID NO: 414292 - DNA, 217 bp, Homo Sapiens
gcaaatagtaaagctcttcaaaatgcctcggcgtatgtgacatggcaaaatttctaactctctgtgatgtaaattctatatgtgtaaaaccacttcataatcagaccattaatcatcagaagctgtcagcgttgacttgggggacaatttgtcatgtctctgcctaggcccaggccagagtgtcaggcaaaagcatagttcgggccgcggggcgcgt

SEQ ID NO: 414293 - DNA, 502 bp, Homo Sapiens
ggaaaatttaaagacatttttaatactcttttctttcaaatatacattgtcatcatttctagatattattctttacacaaatgtgttgattcatccattctgacccattctcaccataatcaagagtcctaccacttcacaatagttttattggaacatcctgttagctaggctaagattattttattcttttctaaatgactctaaaagtgttactagattattttagtagttacttttaaaagcgctttgtaaaacagttgcagtctaagctttcattccatattcatgaaacccttttctaactattgtaacaaatcctaaaactatatctcttacaaacaaatatttaaggtattctttaattcaatatacatttgtttacaccttcttcatatcagtcataggcatgatgtacccccaaactatttatgtgtccttcacacagaatatttgtgtggatcttgtccctgtggagtttaaccatggagtcacgacaaag

SEQ ID NO: 414294 - DNA, 540 bp, Homo Sapiens
  misc_feature (488)..(488): n is a, c, g, or t
ttgctttttttcttcttgcagtctatgacaatatctgtgattttcctggaagaagtttattctttaccaaattgggagaggagtaactactcaccctcaaggccctatcacgttcatgacctactccaaccactgatggtcttgatggccttccatggatctctgatctacctactcatgatccacacagattggtgggagagtcccacactctagaactccctctctggagattccaggtgtgtgaattggggaatctagctaatagggaacagggatggcgagagagctagagtgggtagggttcaatgtgaggaactaagtgtatgagtttcctgttgcttatgtgacaaattaccacaaaattagtgcttaaaatgccacaaatgtattatctacagctctgaaggtcagaagtccaaaatggatttcagtgggctaaaatcaaaatgtcactaagatttcattccttctggaatctctaaggnggaattcatttctttgccttttctgacttctagggttgttcacattctttca

SEQ ID NO: 414295 - DNA, 521 bp, Homo Sapiens
ccagtaaagccaagcacatagtcattgttagttttaaaaaatgtatttggatggggtatgaagttcagaagagaaagacattcctggttgggttattcaagcaaggatccctgaagaagagatgctagcatttggctaggtgataggaaggggacaggaaacagcaaaaggcaggatgtggaggcagaatgagttgaaagatgctgttattgaaggcgatggtggtagtttatccctgaaagccaccaagagctcaagagcaggagggaagaagatgagtttctgttgaagaaagaccaaagtcactcactggctgatttgtgcttgggaggagcatctctttcccctgctgattgggagtcttttgtttccctgggacaataggcactggtcactgaagagtgtgtctgtcctccacactttcccatgttcctgtctctggggaactcctccctgactccgagagacaggatggagttgtcaatcaagatgtctgtcactttgcctaccaggggagagct

SEQ ID NO: 414296 - DNA, 364 bp, Homo Sapiens
  misc_feature (155)..(180): n is a, c, g, or t
acgattttgcacacaatttttaatttatgccttattttgcaaaacggagctggagtttagggctacacttaaaattttttcttgacttataattgttacaaaatattttaaaatacagaaaagtataaagaaaatagccatctatttcttaggcnnnnnnnnnnnnnnnnnnnnnnnnnnaattgaaacagggtcttgctttgtcacttaggctcaagggcaggggggcagtcatggctcactgcagcctcaaagtcctcgactcaagggatcctcccacttcaggcttccgagtacctgaaactataggcatatactaccacacccagctacatttattttaattttagtagaaacaaggcct

SEQ ID NO: 414297 - DNA, 165 bp, Homo Sapiens
gggaggcaaggcaaaagccaaattaataaaaggggggcgagggggacaggtgacgggggcgcccttaccccggacaaagggtttaacattaagggaaggacaggctttaactattaaccactattaacacgtccgttaaacactggaaaaacccggtacaaaaac

SEQ ID NO: 414298 - DNA, 139 bp, Homo Sapiens
  misc_feature (78)..(78): n is a, c, g, or t
gcctgggggacgtgacaaagccccggggggggaaaccctagggagaagctggggccccaaggccccgggaaaaacctntgttcccgcccaagcgggtgccggggggggccccttgggcctcggggcccaaagaccggga

SEQ ID NO: 414299 - DNA, 196 bp, Homo Sapiens
caaataagagcaggaacagcttttaaaaggaaaaatataatattttggaaaaagcaagcaaaactaatatagtttatttaaaggggaaatccaaatcgtagtaacaggaaaccctcccactaaacgggaatttcccctaatttttgggtaagacccaaataattaaaaggcactctaagggttatggagggctcta

SEQ ID NO: 414300 - DNA, 381 bp, Homo Sapiens
caaaatagcttcaaaccaatatgaaaatgtgaggccactgatgccaagtgatgcggcaaaatatttacaatgtacaatgattccacagactgggagctgataggctctcaggcttaacccttcctgcagtgattttatgcatgatatcgaacaattccactattgtatagtggtgaaatattcacaacattgtgattatcctaagtgtttcagcctataaaaagatacaactggggcttctagctcaaatagtaatgcatttcatttaaggtacatacagcattgtggaaacgagacggattcaattatatttgtacatctcatggctatgatataaatttgttccaaacttgacccattctgcctgtttctaaatggcta

SEQ ID NO: 414301 - DNA, 146 bp, Homo Sapiens
tgagccactgtgcccgccatagttcactagtattatttcaattcctacaggaattaccaggactggggcttatttcccaggggctgggttcagttgcttcactgccagggttgtagagagcatcttgtggctaggaaaagattagg

SEQ ID NO: 414302 - DNA, 511 bp, Homo Sapiens
ttggacaatctcatgtcaaaattctacttatcatctgcagtccacttccccaaagtgttctttttctgaattcccatgttggttaatagtaatggcatcaccatgtacaaagtagcccaacacacagtagccttcccttacttcatctcccacttttagtcagtcaccaagttctatgcattttacataaagttttcctaaactctgtcttcacagtgacctaattcaaacccacttcagtcctcacctaagctatcataactacctcctaactagcctctcaactgttgactctccttctagttctatacatccttgtaacagacacaggtactttcacacagatcctttcctttaaggagagtctctggtcctgagacatacaagaaacccaagcctgaccagagtactacccacccctaacaacatgtctcgttcaggaaagagcacatgactgaaactagacaatgtcttcctcaggacttcactttcctgccaaggctatcagaga

SEQ ID NO: 414303 - DNA, 130 bp, Homo Sapiens
ccataaacctttggaaaccaaccatcaaaatttaccgggttaagttaaggggcaacctcccctaaaaccattcccaagagtccccaattccagggctaacctccggataaaggtaccagggtcccaaagg

SEQ ID NO: 414304 - DNA, 370 bp, Homo Sapiens
gatcttttgttcgtatgtgttgtttcttcttttctttgtaggctatgagaaattgaagtaaaagaggagggctagtgatctagtaggaactggatttcaattttgaatctgagtacttggtgacatgagatagggtgttgataggttcacccatcacctaacagcagagcaaggagaagataagatgggatgccaagcacaagaatagatttctgaagggtcccagggcccatgaagaggggccagacccacacagatccctacagtaacttaggagctggcacaaggcagtgaatttaagggcagttggtccttcactctaggtatgtccctttatggtttggcagccaggtatatgccagcttttcag

SEQ ID NO: 414305 - DNA, 184 bp, Homo Sapiens
actggaaattaatccccttcccacccgggggactaaccaattctttcttccagaacccgtgggtatttttgccaaaccttgggggttgaaaaagaaaggttgggttccggccaggtttttcttttgcctggggcaggtagggcaacaaaaacccaaaggtttggcttttctgtggggggagggg

SEQ ID NO: 414306 - DNA, 455 bp, Homo Sapiens
gctgggtggggggattatacagggtcttaaatggctgttatttgtggatgcatatgacttatctgttcacctggcaatgctgcctggaaagaattccatgcctaaaatcatccacttccatgttattttcaagcctatacagggttctgttagaataacagtcataacatgcccagccgttcctgatgctgacagcttggctgggttcagtgtctattgttacaacttgtttggacctaaccctctgtatgccaggatgtaagaggggcaggtgggtcaaggactggggtttttgatggtgaaaaaaatgtttctgtacaagttttacataaattaacttttggtaaattaaaacctaaccaggagctgcctatgaaagaaccatgtggtgaacgaccttagagataaagtaacttttctgtattgttaataatcgacccaactcaactctagtt

SEQ ID NO: 414307 - DNA, 427 bp, Homo Sapiens
  misc_feature (80)..(96): n is a, c, g, or t
  misc_feature (381)..(381): n is a, c, g, or t
tatagctaataggtcaataatgaagatggagaaaaagacagaaccctcagaaatactcaaatattctgaaagaagggagnnnnnnnnnnnnnnnnncagatggagcaaacagaaaacacatagcaaaataatagacttcagcacacacatataataaatacatcaaatgtaagtgatccaaacattacatttaaatggcagagactgttaagctaatttttttagaaagcaagaaccaattatgtattatgtacaagaaatctactttagatatgaaaacacaaatagattaaaagtcaaaggcaggtaaaaattataccatgtaagcaataaatcataagaaagctacagtagctatattgacatcaatgaaataggctnttgaaaaaggaatattaagagggataaagatgaatattgtacaatg

SEQ ID NO: 414308 - DNA, 224 bp, Homo Sapiens
  misc_feature (53)..(96): n is a, c, g, or t
caaggcaaaagggggggcaggcaaacggaaaaaccttaatgggggaaaccacnnnnnnnnnnnnnnnnnnnnnnnnnnnnnnnnnnnnnnnnnnnnggaggaaccccggaggggcagggcaaaccagggccaggcaatcaaggaggggccccagggggggcaaattccccggaataccccccggaaaagcacccaaagaaaaccggtttttttggccatgaaaa

SEQ ID NO: 414309 - DNA, 123 bp, Homo Sapiens
taagcattctaattttcaacctatactgcctttttgtccgtgtcaggagccctttttattcgaataagttgcaatgcatttgagatgtctaaaagactttttgattacgcaatcccaaattaa

SEQ ID NO: 414310 - DNA, 160 bp, Homo Sapiens
tgaatgtgaacataatttatttatcttgaatattgacactggagaaaagacagatttaattttagcaagtgagaaaacccaagagatgtttgtgaagatcagaagaacttccggtcattcagaaactttttgaggttagtagccctaactctttaatatg

SEQ ID NO: 414311 - DNA, 293 bp, Homo Sapiens
ttatttttcttgatcgacagctctaagaacataaaccacctgtgatgccacaaacatgatcatatgctatgtttcatccagcactcttgaagcagtatggagagcctattggccagaagcagctgaaagtaggtgacttaggagaaaattgtgataatccaaggaagaggtaagaaagagaacaatcagtgagcagcagcacagactgaaaggatagaagggtttgcaaacaagacctgaaactacatagacaattcttgaagactggatgtagaatatgacctaaagagaag

SEQ ID NO: 414312 - DNA, 115 bp, Homo Sapiens
tcctggggcacccacccgggggggaacgggctctaccccggaaacacaacccagcgcggggagagaagggcctctcactctcggtgggagaacgaacgacaccccccgcggggcc

SEQ ID NO: 414313 - DNA, 551 bp, Homo Sapiens
gtaaaataaaatattggtgtatacgattcctttgttagaaaaacatccaacacttaatgttccaactatgtactgctgtatcacaaatcttagccaaaacttagtggcttcacaaaagtccaatcatttattttgtctgcagatctgaaacccagagagcttctgtccggggtggctcatcgcaagccaggcctggtcactggagctggagggtgcagggccaggatggaggccctcaggagatgcaggtccggctgctgtcctgagagctcagtttagcttgaagggcccagtcttttccatgggtctccttgtggcttccaaaagcaagtgttccaagaggtgggagaggaagctatgatctcttaggagctgagcctgcaaactcaagcccggcatgtccttcagtcaataaccccaatactcagcagtgacaatttcgcaggagccggccgagctcaagggcaggggacatagacagcatctctcaaggaaaaagcagtgccagccatctgtgaccactgcagtgaaccacatttagagatgtagtg

SEQ ID NO: 414314 - DNA, 491 bp, Homo Sapiens
aaatgtctgcatgtcattttggataagtctactgctatgtcttcaaatgtaccacttttttattctacattgtctaatctgccaataatgccatccagagaatttttcatttcagatattgggattttttcatgactagaagttccacatgattacttttatatcatcaattcctttcctcaccatgcatattttttaaatagctgttttaatgttcatgtctgctaatatcatccccactatcatttctgagtcagtttctattgacagttttttgtcctggttatggatcagattttcctgcttcttgaaatatgtaatatttttattaatactagacattgtggattttatcttgtttagtacctgaatttcattatctatctttaaaaagtattgggctgtgtttgtgttagacagttaagttacctatgaataaagcaaattatttcaaggtttgttctcagtctttgttatgtaggcctatagca

SEQ ID NO: 414315 - DNA, 113 bp, Homo Sapiens
cccaagtctgtttgtctccttggtggggccccactggattttaaaacagggttaacacaaccataaccccccactggttaatgccaaaaaatttttgagggtgggaatatgag

SEQ ID NO: 414316 - DNA, 492 bp, Homo Sapiens
cagttcattttcctctccaccccattatttcaaagggcttaacaatgtccttcctttagggtgaccttgtgtaagtttttccttcatgggtatgtctgcaatgcacctctgctaggttttttgtcttgagccagcattcgtggtttactctctcctcagtctatcttgctccaattacagcagagaactttatttcaattcccatgagtttacatgtagagtcctagtactgtctagtggaataaatctcatgttcctattttctattattggataacacgtctcatgagtttctactgtttgctctgccacaagttaagaattccctgtcctaaggtttgttgtctctcactcctatcaattcgggattaagttttttcctttatctccacctctctttcttgatgtctagaagcagagatattttcttggtgtgatgctcagcttttggcccaaattatggtttaaagaatcatccacattgacaatttt

SEQ ID NO: 414317 - DNA, 113 bp, Homo Sapiens
aaatatactggataattatgcaaggttgccagcaatggaggcaatccggggccacaaggcggcacactcccttgccacagggcccgcaagggcaaaacccttcaacccgcctt

SEQ ID NO: 414318 - DNA, 130 bp, Homo Sapiens
gggaaaagaaaaacgcgcgggggcgagaacgccaagcccgcaccggggggagacacccccggccggaagggcagacaaaccaggggggccagaaaaaacaagcagcccggagaagaaagacaccaccccg

SEQ ID NO: 414319 - DNA, 280 bp, Homo Sapiens
  misc_feature (91)..(91): n is a, c, g, or t
  misc_feature (132)..(132): n is a, c, g, or t
  misc_feature (134)..(135): n is a, c, g, or t
  misc_feature (144)..(144): n is a, c, g, or t
  misc_feature (167)..(168): n is a, c, g, or t
  misc_feature (184)..(184): n is a, c, g, or t
  misc_feature (186)..(187): n is a, c, g, or t
  misc_feature (229)..(229): n is a, c, g, or t
  misc_feature (257)..(258): n is a, c, g, or t
taacaccaaatgttcctggggcagcctcccaccaagtagacattgtatgttgttatcttaattggtcccagaaaactatcctgataacggncatatccacttataggagccctttagaaaattgagaaatcntnnttttttcgnttttaaagcggtgggccacattnntttccaccacaacaanannattggggtacctggtttaatgagagaagaaagaagatacctnggcttaggagaattagcagtgccttgcnnacatgcgagatattacttaccc

SEQ ID NO: 414320 - DNA, 485 bp, Homo Sapiens
gcataatcagttgtatggtcaactgtgcactaattcatttggtcacaaatatatacaatcaaattaaggttgaatgtaaatttaaactttacttttgctttcttctcccctcccccccagaaagatccatggtccaatataacatatcttcttcaagtatttatggggtaagaaacattttaaaaagttgttacattctttcctctatcttaatgatttaaatatgagcaagttcggtctatcaaggcaggctctgaatagctactatcgagaagtatttgaggagttcttgaatgccaaatcatcattgtctgctgactctgcagatttatcacgtgctgaaagcacaggttttccaactgtcaacgtctttacgaaattcacctgcttaggctttcgtggggtcggcctcttggagctgagaacacagcttctgcttacacctgtgtcctcaatgaagctagagattcctaagagaattctag

SEQ ID NO: 414321 - DNA, 410 bp, Homo Sapiens
ctttaggtcttaaatatttgatgatctttaattatccatttataattaacagtcactaacacactgaatgcaagctcagtgtgcaatgcgtgaagcattttgaatagtggacctcactatagaggcgtggccagtcatttcacttttcagtatccttaggttctctttggttactcagttttgacgaaaagaaattccagtcttctgtttgcagattataaatctgacgaccagactttcacttaatccccattattagtgcagcatctcaccagactctgatttgtttctggtcttccagaatccagaacttctctggctcagcctctccagagagcaagcttcaacccggtcttctgtcagaggaagataagggtaactatgtggctacatggaataaggaagatctg

SEQ ID NO: 414322 - DNA, 130 bp, Homo Sapiens
cccccgctcgtcgaagaaaggacaaccaccaaccgcgggaacccgactaccgtcggaacgccgcaccccgctcccacgcgcgaacagacggacaccagcgcgtgccaggcgtccaccggccgaccgacgc

SEQ ID NO: 414323 - DNA, 158 bp, Homo Sapiens
ggacggaaataaaggggttttaatttccaaaatcccggcccgggggggcaccaaacccccggaaatcccggcccggccccacccggcttttgggcccaaccgggtccaaaggggcacccaaaaaggcccaaagggccaaggcggcccccgggggaaaa

SEQ ID NO: 414324 - DNA, 181 bp, Homo Sapiens
  misc_feature (46)..(46): n is a, c, g, or t
ccacaaaactgtcccaccacgccccattcttaatggcccgcacagnggccaccgctgacaccccaaactcaaagggggaggcctgggtggcataaaaaatccccttggccataacaaccttccccggcttgttggcacaaatttttttaacctcgggccccagaatttgaggggccacaca

SEQ ID NO: 414325 - DNA, 173 bp, Homo Sapiens
tttttatatatttccctggcaggcattctatattttcttaaatatggaggcaaaggataggaaacctgagtaaatttaagagatttacctgctgctacagtcagtaaaatttaacttttaatccctgagtatcagtaaagtgtcaaaaatagtattttcatactttcaaatgt

SEQ ID NO: 414326 - DNA, 197 bp, Homo Sapiens
ttgccaaaggtacagctgggtggacctatccgtgcatcttcgccggacggccggagcttctgcacccttgatatttccggggcaaacaaggtgatctctgagctttgaaaccagtgtcgtaggtgctgtagtacggggctactgagggactgccctgacacagaagcctagactgattaggctgtcagagaccacag

SEQ ID NO: 414327 - DNA, 511 bp, Homo Sapiens
aagatttaaaagcaagtttaatctctaatttcacacatgccaataaaatcactgacaatgatgactttggcaaatacttataacaagcatctacatgacttttatggttcaatctcatgaccagagaagaatacagagtgataataaaatcagcgggaaaaagactacattaaaatcctagaaacacttttaagagctggctaaatctttccagctttactgaaaagtgtatttcattagctaactaaccattttgactctaatggatcgtcattcaatggctgcatctaagtgaacactgtaccacatagtttgccctcttcctaatacaaaaattaatttagaagagtcatctctttcctttgtaaaaatagtgaattcaagcctaagtttctgggtaataattacaaacacataaaaaaatcaaaatgtttcccttaatttgtaaatcacaatgtaactcaaatgagatagtaatattgtttacttaacaatataaagaaatcttgaa

SEQ ID NO: 414328 - DNA, 547 bp, Homo Sapiens
  misc_feature (518)..(518): n is a, c, g, or t
gaagaccttctatactgttttacataatgggtgtaccaattggcatctccaccaacagtgcacaacaattctcttttctctacatcctctccaacacttattctatatcttttcaataatagccattctaaaaggtatgaggtaatattttatttgtggttttgattagcatttccttgatggttagcaatgttgacatattttttcatatgcctattagccatttgtatgtcttcttttgagaaatgtttgttcaggtctgttgcccatttttattgggttatttgttttcttgctgttgagttgtttgagctccttatttattttggatattaacctcttatcaggtgtatagtttgcaaatattttctcccattgtgtgggttgtcgtttgactctgttgattgtttcctttgctgtgcaggagctttttagtttgatggaatcccatttgtcccatttgtctcagttttaaccagaggagtgacatgatcaactttgtaattaatgagtcattntgtaggcagtgtaaaggatgatgtgttaa

SEQ ID NO: 414329 - DNA, 387 bp, Homo Sapiens
ggatttggagactttcctaaacactattttcacagcattggggcataatctacacagcaagaataccaatatagctctaccagaaagaatcaaggagcaacggtggtaaaaacaaccttttataaaggctttacaagagggttctccttaggtctcactggacaaaattgggttatgtgattaaatcaatcactgggaagagaaatagatcaccataattgcatttcacttatgtaatttattccctggaactggagaaaaaaacatttatcctgaatatgtagttgggtagagaatggatactcaagcaacatttgagtattgcccgtgaaaaagaaagtttggaatagggaaggagaatgtgactatggtttccaacatctgcta

SEQ ID NO: 414330 - DNA, 502 bp, Homo Sapiens
  misc_feature (302)..(350): n is a, c, g, or t
gccttataagttatcaagaagctagagatacttataaaattcaagaactgttaaaacttatgacaaaaataatgactcataatttaagttggaggtcaattagatgtttaaaacatctaacttacacactggtgtacagccccactacaagtacttaatttaatattcttctgtattccagatttgacaaaacctgagacttgctcaagtgccaagatttaaagaatacataataatgtctataaaattacatggaaagttgtatagatacaccccccattcccaccatgcatgcatgcatnnnnnnnnnnnnnnnnnnnnnnnnnnnnnnnnnnnnnnnnnnnnnnnnnacaaactttcaaatgtggtaatgggaacagaaaagaaagcttaattactgaactatttgtagttgtcagagttcccgagtttgggatcagttagcaaaggcttctggagagctaaataaataacaaagttgggctggaagtgaaaagcattg

SEQ ID NO: 414331 - DNA, 285 bp, Homo Sapiens
  misc_feature (250)..(250): n is a, c, g, or t
ggggccacactgggggaatttaaaggcaggagggaagcacacaaaggggggaacaggtctttttttactgaaacacaaaacatgggccagggggagcccaaggaccccttggggaacaggggaagcccctccccacacaaacactccgggggaggggagcgagggtcctgtggccaaattgggggtaaggggcttggacatgctgcccttaaggggaacctttggggtacctctaaaaacagaaacccanttgaagtttgtcggggggggcccaggctaggggca

SEQ ID NO: 414332 - DNA, 397 bp, Homo Sapiens
ccactgttgttttttaaaaaatgccatcagggaagcttaactacaacaattctctttcagtgtcgtcaattttccatgagttcaggcaggccaccaaacagatctcaaatacacagaaaactgtaagtggaaaccgggttaaaagggaaggaaatgttgcatgcacttaatatcatagaaatcaagtataaagaacagactgctaaattgtagagtgaaatcaggttaaccatattgactggaaaccgaattcaaattaccttgcacttggttctggggagaaatgaggaggctttaaaaatagacaccactgtttttggcctttgtttaaaatagtgattcccaagactaaatttctcttactgtctcttacacgcctggatcaaaagaagcaaat

SEQ ID NO: 414333 - DNA, 145 bp, Homo Sapiens
gggcccaacagcctggatgggggccccaacccaggggacggggcaccaaacgaacccgggggataaaaaacccccaccggacaaaccaaacccccaaccgcgcacacgggccggccccgttacgaaaaggggggaagggccgccg

SEQ ID NO: 414334 - DNA, 120 bp, Homo Sapiens
caaagaatccataatacatttaaagtcagcactctatcctcagatttaaaaaacacaatatagaattcctgtgtaatcaaactaccaccaactgagaagggaggataataaagtcttatt

SEQ ID NO: 414335 - DNA, 398 bp, Homo Sapiens
ttaaacaagatccccaagtgattcacaataacattaaaatctgagccacattggtttaccttgtgccaaatgcttggatatatatgtaaatagattcaacacacaaagagcatatttacaaagtagaaaaattcaggaagctgattattcacttaattaaaacatttatcatacctgtgtgctagatgctaggaattatagaactcaccatattattactattaaaaaagagtctgtggtttcagagtgactcactaagacttccataaacattcaactatgcaaaacaagatataattaacctgaggaacattttaggcatactgcaaacttttctttcccttataaatcatgtgtgtagagagagaattttgatatggtctaaaaacctaagagca

SEQ ID NO: 414336 - DNA, 314 bp, Homo Sapiens
cacctaatggaagtttatttttttctgctccgttccaaaaagataatattgggggaaggtccacacacaggggtcacaagcccgatctactttggagaacagaaaaaatgaaaagaaaacccatgtcatgcttgtttgaaaaagctcaggccctgggccagcagggggtgaccaggggatgaaactgttagcgagggtcataggaaatatttcaaaatgtcgccactctggttaaagtagctggcaaataactaaactggggagggcgcaaatctcacggcctttccacaacgttcccatttagtataaagccc

SEQ ID NO: 414337 - DNA, 298 bp, Homo Sapiens
tgcctgtaagggttaacacattgctggacttggagagcactagtagatggggccacactgatgactgtcatgaagccaccaggcctgctctgctctgggctgtggatttcttctctttggaggatgggagaatgttagcctctgggagactgtggggaggaatgtggagcaggagaaataaagcacacggattcctctattgccactgattggagctgaaaataaaactgaaattcagctagaaaaaaaggagcatatgagtcactggggaaaagagtcccctctgccagccactaag

SEQ ID NO: 414338 - DNA, 217 bp, Homo Sapiens
  misc_feature (41)..(58): n is a, c, g, or t
cacagcccctgctttatttccatttgttcacaccccctttnnnnnnnnnnnnnnnnnncacatgccctcccccaatccccaaacataaaaattagaggggcataaaacggggggctttatgggctgaaaaaattccctgaccttaagaccaaaatcccaatcaaatttggaaaattccttggttcaaaacacaaagaggtttggtttttaaggggag

SEQ ID NO: 414339 - DNA, 707 bp, Homo Sapiens
  misc_feature (137)..(249): n is a, c, g, or t
  misc_feature (579)..(579): n is a, c, g, or t
  misc_feature (604)..(604): n is a, c, g, or t
  misc_feature (634)..(635): n is a, c, g, or t
  misc_feature (641)..(641): n is a, c, g, or t
  misc_feature (693)..(693): n is a, c, g, or t
tgagaagtcactacagctgattgatgttcaggcccttcccttgacccagctaccactttcccttatcatcctgtgtccttcttattatctccctgccacatttgctttctcaatatgttttattacagcatttcttnnnnnnnnnnnnnnnnnnnnnnnnnnnnnnnnnnnnnnnnnnnnnnnnnnnnnnnnnnnnnnnnnnnnnnnnnnnnnnnnnnnnnnnnnnnnnnnnnnnnnnnnnnnnnnnnnccaaaaaatatttacaaagcagccaggccattgaagccctcataaaacatccccttctccatgccctcactctcattctggtttgtaagtgcttgcttggcaggcttgtgataaaggcccaggcccctgtgatggttgtggtattgctcagcactttgcctggggaactactattggagggctggaaattaaagccaacctgaaacccagtggggcaccagtcatcaaccaagtgtatggcacacttggtcttgtgggacaatggcagcattcagtctttaggctacaaccctggggcagaacatgcagagcaagctctgtacttgcttnggtcaggtcatatctgccatctgantggagagtacaaagtagtacctggcatctnncaatgnagcactgctcaaaccagtttatttgttagtagtacaaaaaaagaagtaattnttgaggagggacca

SEQ ID NO: 414340 - DNA, 124 bp, Homo Sapiens
tcaacaaacgagccttgcgtacataggccccccagcggacaacccttccccacattatggaaagggggggcgaattcggccgcacaacagaaaacacaccggggtatgggcgccaaaacaaagc

SEQ ID NO: 414341 - DNA, 485 bp, Homo Sapiens
ttgttctgcttgaaaatgctgtgataagcttacctggccaggtgcctagaaatgatgctcattttatttaaccaccatagccaccctgttgcctctagaacctcagtgtactcccagggaggggaagggtcaagtacaaagcctgactcaggaaggaaccactttcacaccaaaatgctcgtaagatgttacaaattcacacacggagacctgggaaccgtgtgggaatggagggtagggtattaatgcagctggaccggcttggctttattgatgcaggtacacttactagagattctgaatttaatgcgctagctcacattagctgctggaaatgactctaccagtttacttggttgaatgaaatctggatttgctggcggtctacagttaatgaaggggagatgctggaatgtccctggtgtaacgtcgaggcaggaatcgtgcaaagcaagggccaccctccgtcccagcctgatttctct

SEQ ID NO: 414342 - DNA, 532 bp, Homo Sapiens
tttgtaacccatccctgatcaaatcccagaggtgcagtgaagttctccttcctggctagatctccccaaagctctccctgtcctgtctccagggcccacatctgctcccccaattccacatgggacaggtacttagctgtcttttggtccatgcatgttgcattgccccagttagcctggacaatccttgaaggcaaggcctatataccttttatgcccaaagtgtttggcatacacaatgtgcttaacagacacgtaccgattgagtaaattaaatctctgctcagtgggcactggaaaagcaagagctttcccaggcatcactgacatctgggtaaaccaggccagtttccatgacttgaagcttaaactgggggttggctcctaactgctgttcctcagggcagctacattttcaaataaaaacactaaatcccaaatgagatcagatgacatggagcttctgagaggcacatgccctaccaggcatgtcagtcaaaagaaagatgaatgttcttgtttacaaaaggat

SEQ ID NO: 414343 - DNA, 363 bp, Homo Sapiens
  misc_feature (61)..(78): n is a, c, g, or t
  misc_feature (210)..(220): n is a, c, g, or t
ccgatgggcacttttgtttattgagtaacaagttgaaatgggcaggttggggggcgccagnnnnnnnnnnnnnnnnnnttgggcaaaaaaagctcccagcgccgaggaagggggggtaggaagggtctcggataacgggatggggccctcaagggtccctggggggctcgggggtcccaaaatcaaacacggttgacacggaaaacagcnnnnnnnnnnncctgccttggccgtggcgttggggggaaggggagggaaagcttttgtacaaggtcattttccgggagggtcccggttgcggccccaaaaccccgatgggccccgcgggacggaagcggaaagcggaatgtccgttgggctccc

SEQ ID NO: 414344 - DNA, 328 bp, Homo Sapiens
  misc_feature (88)..(108): n is a, c, g, or t
  misc_feature (210)..(210): n is a, c, g, or t
ctaaggaacaagtttatgggggggaacacactaccctttttaataaaacccaagggcaaaaaaactacaaaaatatcgggctctcgannnnnnnnnnnnnnnnnnnnnaccgggtctgagtaatgactggggctgccctgcaggccaaaggcccgggagctttccggccactccccaaagaggcccggggccctaaggggggggaaaggncccttggttgtttccacagcgggaaggccaaggctgagggggacctgggctgaaggggtcccaaaaaaggcttaatcgaggcccttaaaggttgatggcaaacccagggtagggaaac

SEQ ID NO: 414345 - DNA, 302 bp, Homo Sapiens
gaacaaaatacaggagttgcatttattatagaaagaaattaaacccctcacacatatccaacgatgagggagggaccaaacaaaatgatccataaacatgagggaatgccatggggccattaaaacgacaagacaggaggccctgccaccccgaaaatgaccgtgtgagtcgatgttaggtaaaagcaggaaacccaggggaagggcagggacactggaaacatatatcccaggggaaacagctttgcaccagcacagggggaaccaggttaaaacctaggctcagttgttaacatgcctta

SEQ ID NO: 414346 - DNA, 394 bp, Homo Sapiens
gatgtgtctttgtctgggtttggtatcagggtaagagaagcctcataaattggcctcttagaattaatttgaaagtattctcttttcctctatttttttgaaatagtttgagtaggatttggtatcagttcttcttcaaatgtttggtagaattcagcagtgaggctattgggtctcaggattttctttactgggagactttttattatggcttctatctcattacttgttattggtctgttcagattttcagattttggattccttcatggttcaatcttggcaggctgtgtatgtctaggaatttatccatttcttctagattttacaatttattgatgtatagtcactcataatgctcatagtagccactaatgattttttgagtttctgc

SEQ ID NO: 414347 - DNA, 295 bp, Homo Sapiens
tttaatgtgttttctgtagctgtaataaaccataaacaggtgtctgacagcttttctgagtccagaagcacagaatgctctatgaaagaccatgatccattctctctcctatcaacatgtttttgtttgttctgtaccccatttgttttgtctaggagcaaacacacagagatcttaagcctattaaagttgtgttttggcttagtttcggtacacatatccttttaatacagcagttattaaaaattattttaggcaattagaaagggtaaagagttcttggtggaattttcca

SEQ ID NO: 414348 - DNA, 180 bp, Homo Sapiens
actctctcatgtcttatctctatttccattaagacaagcttcttctacctgatctttaaattccagatcaaatatccattctttttatagcttcccatacccttcttgaggtagacccattcttttgtcatatgaattttaacatgataattttcatacaatcctcagaacaagagttac

SEQ ID NO: 414349 - DNA, 167 bp, Homo Sapiens
ttctttaaaaacttgcttccaagaactatacttttagagtaggagaatttagatcccacttacatccattctttctatttttggtgggggggatagcatttaggggtaatactaatcttttcacttaggattcctccccttattagtaatccatcaatcagatacct

SEQ ID NO: 414350 - DNA, 216 bp, Homo Sapiens
ccttcactagcccctccagtttatgccttcccctagactcactctctctgtactgctacatggcaccactcaggcagggtgacaagcaagcagcatttggcctacaatgctacctggtgaccagtgcacagaaagacttctttcctttctgctgggactgtgcatcaatcatgctcattcattttcctttcactatgcacaatgcaactaatgcca

SEQ ID NO: 414351 - DNA, 218 bp, Homo Sapiens
ttaatacttcatttcctttattacctagttgtatcgttaaaataagaacaaatacagtggaatggaatacttcatatgacttcatgtgaaaaatacttcattatacaataaacaaccctcatgcatttcaacattgccaccagtaacactaaagactcccagttctattatatggtgatcatcactgccctacaccccaaccccagctcctccaagct

SEQ ID NO: 414352 - DNA, 146 bp, Homo Sapiens
actataaagctattatacattttaatgataaaaattaataacaagatacaaaccaaagaaacaggaaatttccagtcaagtattaagataaaatgcatcaattttttcagtagccacagcaggggccttcaactcatttccttttt

SEQ ID NO: 414353 - DNA, 187 bp, Homo Sapiens
ttgaagatgcacatgcagatttatttaaaaagtatctgaaaatgatgacaaaaatttatcattacaaatatatgaatgatacaacaaaaaatcctacacttttatatttgaaagtatccttcatatacatctaaaactattgctgggcttttaataaaaccgaagaagaaattaaaatatgttaggg

SEQ ID NO: 414354 - DNA, 219 bp, Homo Sapiens
acctgcccctgtccccccaaaagaaccatgggggcccctgggaatttcttttggccataaaagccaactgggggattgggggaaacaagcaggggtctaaggggccctgggctccctcacccaaaccccgtggaggaggggggcgatccacccgggtaactaaacgctaaaaacaatgaacgcttccttgggaggggggggatattaacaccatccccc

SEQ ID NO: 414355 - DNA, 183 bp, Homo Sapiens
ttcacagagaggggtgtggccggcattttagttccgcccctgccggagtagccgaaggcctcattggcgccttcacgcttcagctgcgcttagtagccgcggcgtaattggataaaagcccgtggagggggcggaatcccagggggtttctacgattagtcaatacccaggagggcgggatag

SEQ ID NO: 414356 - DNA, 476 bp, Homo Sapiens
  misc_feature (216)..(216): n is a, c, g, or t
  misc_feature (450)..(450): n is a, c, g, or t
gtttttgtttaatttatatttgctcactttgcagttacagctaatgctattaatatatgtggttaaaacttttcattaatttgacaaaaaggataataggtaataagaatgttttgtttcgtttaccaagaaaaagaaactacaactgtacaagcagtataaatttaatcaaatatttaaattattgcctcactttaggacagagagaaacattanggcaaagttgtaattgcatatctggcaatatacatagcaatttattggacatgcagtttaataataaatgacactgagattaatctaaaagatatgatactaaatcattgatttgaatcatttaatttgactgtgtcatgattaatggcattagataaatgtttatctaaggtgtatattactttaggtcattctaatatacctagtttgataagaacttttgattaacttatnatttatgtcttttaaaatcaattctg

SEQ ID NO: 414357 - DNA, 285 bp, Homo Sapiens
aatcttaatgccatctgtagccttcattctcctttctccctttgctaattcacatattcacaggtttcacagataagcacacgtacatattgtgttgtgggggtattattctgcccccaggtcttatagccaaagcctccaatagagtgttgattaggaacttctggtatttattagtcgtcttctggacattcacgaaaataattttacaaatttatcattcttaaggtatttgtcatagataccttttggtagttatatattattatataagttttctacttc

SEQ ID NO: 414358 - DNA, 190 bp, Homo Sapiens
agattcctcttgtgacctcacctttggatgctatactcaatctatctctcatgtcctcaataaccttccatgtcttaatttttacattgaactgcccaacaagaagttctctattgaatcttatcacaccataaacactctacttgcaaccctaaataaaacaggaaagactgttttctaccttggcctt

SEQ ID NO: 414359 - DNA, 438 bp, Homo Sapiens
  misc_feature (252)..(306): n is a, c, g, or t
  misc_feature (309)..(322): n is a, c, g, or t
tgaacacagcctccttctttcgacttccctctctgtcccctcgcgagccagactcattccaaaccaccttcaatctgtaaagtcaggttggaagcgtcagtgcttaagaatttgagctttagagtcaaaatgctttctggcccttttcttactggttcggtgactttaggcaagttggagactgggtttccttaagtgtagaatgaagacagtagcatctaacttatagagttgtaaaaattcgatcagcannnnnnnnnnnnnnnnnnnnnnnnnnnnnnnnnnnnnnnnnnnnnnnnnnnnnnngcnnnnnnnnnnnnnnccaattgcgcataaggaaagaaactcgttcagcggttttactattctggatacaggatacagagataaagcagttaaactttacactctaaaggtcattttcacatttagaggctg

SEQ ID NO: 414360 - DNA, 504 bp, Homo Sapiens
acgcgtccgaaaccactcattcccttaagttacatttaataacagtgacaatgaccaacattgagcagttgcctcgtgctccggtctcagcactggcttattaacatactcttaccactcagagagggacactgaggagaagagaaatggtaaacatcataagaataaaatgagaggtaagaataaaatgagagtcagaagcaaatgggaggaactctgagtcaggaatttggtaaagatcgggggaaacagagtgacctgagataatggggggttcatctttggggaactgtaggagattcttggtgcctggagacagcagggcaaagaggaaggaagaacctggatgccctagcgagccaggctccggcattctatccccacatccccgtggacgtttattagggtccactggccaaatgacaagctccaaagatcaggtaatggtgggtgttccgtggacttcggggtcccagaaccttctttatgttccttcttcatctg

SEQ ID NO: 414361 - DNA, 122 bp, Homo Sapiens
acgcgtccgcaaatgcataaatattcaaagctcattttctgcagaaacacttctggtatatgaaattattaaactgtagaatgctaaagatcagaagaagctacagtttttctttaaacttg

SEQ ID NO: 414362 - DNA, 479 bp, Homo Sapiens
actttggaaagtagaacgacagctgtaggtttccagagctcccctaattgttgagtctcaaacaggcatttatatgataaaggaaaatgacttcagggtcattaaatcgttttgttttccactgagggcccagagaagtaaatgtaattaaagaatgtagcaccagattgatctaggcacgtcattcccctgttgaatctgggagtatttctcgtttgtttctggaactttggttcctgatttccatcaggtggttacttcaggtttatttcaggctaccgttgggagaccctgaaaccaaattcattcacagaaaatgagtttctgttctgtttataatttgcagttgtccagaatggattaacgcatctggaaacaggacaggtttctgtaattcaataatacaaatttgtactaggcatgtgtcataacattttcttgtgttgactcaccacatttgaaaccacatacctctgtag

SEQ ID NO: 414363 - DNA, 425 bp, Homo Sapiens
gagataattgtagatttacatgcagttgaaataatacagagattccatgtgcccttcacccaatttcccccagtggtaacatcttgcaaaactatagcacaatatcacaactgggatactgacatcgatagctgtgatatagaacatttccatcatcacaaggatccctcatgtttctcacagccacgcccaattctctcccatcctcaccccctccttaacacagccaccactaatctgttctccatttctataattatgtcacttcaagaacgttatataaatggaatcttttggtacaaaacctttttaaattggcctttttcattcagcataattctctggaattataagttgctgcctgtacccatagtttgttcttttttattgctgagtagcactcacggtatgaatgtactatggtt

SEQ ID NO: 414364 - DNA, 528 bp, Homo Sapiens
  misc_feature (378)..(378): n is a, c, g, or t
  misc_feature (484)..(484): n is a, c, g, or t
  misc_feature (495)..(495): n is a, c, g, or t
tgatattattttatactttgtgcttggtcttataagcattaatctttccatttgtttgttgtattcagatgcactcaccttttttaaagctgcttctctttttttgtctgttgtcaaatctagtgctgcttctaatgacttttacagatttttttgttgatacggtattttggattttctgaatcttaaaatgttctttcaaaaaagtataaacttaagtagatatccaactcatgatgaaacttccatttatcttaactttctcctttgttggtcctccaaagtaattgatattttttcagattcttactaatgatgcatacaaatgtgtcaaatggccttaattttcaagggacaacacagtcttcattaccctgngcttatcttttatacacagcctattcaatgactccattttctttataggcaaattcattttagttttgacattatgaaaaacccacaagaagatacattgtgactnttctatgtttntctatgttttgcaatatataagcccatgtctga

SEQ ID NO: 414365 - DNA, 335 bp, Homo Sapiens
actgggaatttgtgctgatggtaaatagatatggtttgaatcctggccactgcccaccagccatgtgaccaagacttaaccatattttttcggggtgttatgcagagataatgagatcaaaattgtaaggcatctagtactgacataataagctctcaacaaatggtagctatttaagtggtaataacaaatccttttcagatggtttctataacagtgaatttgcaaatagttggaacctctgaagtgcttcctctcctggactggaaaccccttgaggtcagtggccttgtctgcctattcacaatgtccgtctagcacatggtaggctctta

SEQ ID NO: 414366 - DNA, 518 bp, Homo Sapiens
  misc_feature (321)..(334): n is a, c, g, or t
ctctccagacaccccttgcccgggagcagctggacccagcctgccttctccagccccggggcggctgcttagccccaggtgccgttaacaatggccggcctgtgtcagggtccccattcaccatgtgcacaggaagcccagctcgggccatgcatctgattttgcaccagctcctgcccagcccacctgagaatgcagatgtttggatccagtggggaatgtgttcctgctccatgctcccaatttcagaacaaactttgagctgagctacagctttctcattgatccccttctagtcttctgaacaaattagtctgtgannnnnnnnnnnnnnccatttattgctgacccttttggatttatgaggccgtgtgagaggaattatgtatctcacacacacgcatctggcatgacgataaatctccaccactgaagccccgcagatttgcagcgaatctgatggctcccaggctcgctgccacgtggttggtgctgacgtgcggcgcaatgcggtggcg

SEQ ID NO: 414367 - DNA, 137 bp, Homo Sapiens
cagcttcatgtatattcatacttatcagatagggtcaacgcctcttagtttggtttgaaatctcactgggaaatgtacttcttcctttgatagatttatcaggtgatatagtccaaccattcctgaaacaatacatg

SEQ ID NO: 414368 - DNA, 220 bp, Homo Sapiens
atgtgatatacagttaggttcattgtattccatttgtttcaacctttagggattccttttaaactttaaacactacttttgattgaacagtaactgcagcaaatagtgatttaacttactacagccagaaactgtgccaaatcttaaaagttaaaaggtgtttagaacattgttcataccatttaaattaaatgggaagatgaaagatacagaatgcttt

SEQ ID NO: 414369 - DNA, 325 bp, Homo Sapiens
tgcctgggcaggcgtggagaattgggtactgtgggcgggagggcaggccctgaggagcagggggtgggatcctccagtcttagaatagtcccagtctggctacaaccttcaacccaagacccggattcttcagcaccgagtgtgagtgttccttcatgaggcccccaccccattcctgggtctccttagtggagggaagtatgagtgccgaggggagattgggtcctaggccttttaatatcaagccatctctgtctgcctcagcttgatccagagggaagcccagcttgaggggtcaaggtgtttgggcagtggggttgtgagg

SEQ ID NO: 414370 - DNA, 490 bp, Homo Sapiens
tggaacaactgatccctagctttccaaaatatgagaaattgagatgcagggagtagtaagcacctagttaatgagtcaaagcatatttataaagttcacagggtacatagcatatagcagctgttctctatctcagttgagttttgactaggaaatgggcttaggataaaacacataggcttttgagtaatcatttgtaagaaattgtagatagtgaccacagtttaatagcattagataaattatgaaaagtcactgaaataccttctctggaaaatgttagaagctcaagtacaatggcttagttaaaggcaggtgggggagaaacttgaagaatgtggtccagtacaagaataccccatttttcccctaaggcaatgaaaatgacatgaagtaatcatagttatttatacaggaacaatttaggagacttagaatattcacttcttttgccttctagctgagcatcaaaattctctctctgtctctg

SEQ ID NO: 414371 - DNA, 216 bp, Homo Sapiens
attttcttctctttgaactgctgtcccaccctgggcagagccttcattagattgtccccatgatgtggtaccattcatacctgcacatgggccacagaactggtgcatacgcaccacccactcatgtgcttggcttgcgttgcacgcttatgaacacgcacacaggaaccggtgccgtcgcagctgagctgagggcagagttgccgaccggtaaaa

SEQ ID NO: 414372 - DNA, 495 bp, Homo Sapiens
agaatctttacctagaataagagtgaaaaaaactcaacaattgaaagtcaaaaagaaaatattgaaacagtcatacagaaaaaatggaggagacctgagactgctccaagccactcactttactgatgttgaactgatactcatcactctaagatttatagacaaaactatttatagctatttatttgtagctatttatagacaaagccacaatgggaacccgtatcccttatgtccagtgcaccagttatatgtgatattctgagacaataggcaaatgaatttttatataaagaaagtagttcacttttcaaacttaaaagggaaatatataagaatgcagtcatcttttacatgttcaaaataatgagaacaatatttagcaaatacttagaacctgtcccaccagctaaacgtgttaggcaacaaaaagtagtagaaataagaaaaatgtaatctcttgcctcttgcagtactccatgatggaggtttgtt

SEQ ID NO: 414373 - DNA, 524 bp, Homo Sapiens
tttgaaaacaattggccagatagaaatactggtaaaaattactgagaatgtcttgaagtgggtttttgaagattaaccaataagatcagctgcatatctcattacctaacaagtcctcctatgtccattaatctacttatgtatggatagataagcgtttatccacttattcatgcagaaagaacttatcactgtccactatgcaaggactggttttcagtaatagtaatataggatagtattagtaataagtcatatctcaagacgtgtcttgaacaatttgctgaatttctagaagataatcggcaatgtagtacagaaatgattgtaattgtatctaccgtttacttctatgaatgttggccttgtgtggaaatagacaaaaatagatacctgtctctgacaatgaagttacaaaattgaccacaaaagtagatgcaaatgggtaggacattgtcagtgttggtgagtgcaaacttgtatctccttcagtgctaaatatcacactgttaggtattttcagt

SEQ ID NO: 414374 - DNA, 470 bp, Homo Sapiens
  misc_feature (389)..(389): n is a, c, g, or t
gagagggagaatgctcaaagcagaggtggcagagggctaggaggtgggagcagtggtgggggaagaattgaacacacagttttagaggccacagtggggttgggtattattgatcatcagagcaacgggagccttttcaggactgcgcttgaggaggagcaagacaatgagatttgcaccccagctgctggatggggaggccagtgtggaggcggagggggtcagtgaagagactgttgtacaagatgagggaaaacatggtgataacttggaataaagtggatgtggagccagagagaaatgggtggatttcagagacacttgggaagaagaaaaggacatggagagaggtgatgaaatcagtaatggctcacagatttctggcctgngcgttggatggggagtggaatcgtgcttgagctagggcacgtgggaaaggaaaggtgttctctttttattggcagaggtaa

SEQ ID NO: 414375 - DNA, 184 bp, Homo Sapiens
aaaaacattttctcctacctacattctaacaccccttactcatataatattaccagatatgttgttagtaaaaatcagtagtgctggccagcgttttaaaacaaacatcactgactacaaagatactctacttgaaatcaggtcacaaaaaaccaacgctgcttttcaattaaaactcaaaaag

SEQ ID NO: 414376 - DNA, 246 bp, Homo Sapiens
  misc_feature (144)..(172): n is a, c, g, or t
tgtcttattgaaattctatctccactgtgaagcattatcatggtgtggccatatatgatctatccctatctgaagtcactgcatttattccctgatcctcatttgcaggtccagtaccttgtacaagtttctttttgtgccatnnnnnnnnnnnnnnnnnnnnnnnnnnnnncccaagtcttatgaatttgtgtctgcatagtgtctagtacttgtctgaggcccacaataaaattcttttgaatg

SEQ ID NO: 414377 - DNA, 531 bp, Homo Sapiens
ttaattgacttacagttccacatggctggggaggcctcacaatcaaggttgaaggccaatgtgaagcaaagtcacgtcttaaatggcgggaggcaagagcgcttgtgcaggggaactcccatttataaagccatcagatctcatgagacttattcactaccatgagaaaagtatgtgggaaactgctcccctgatccaattgtctgcacctggccccacccttgacactagaggattattacaattaaaggtgagatttgagtggggacagagccaaaccatatcagggatattgacctttaattttcttttcttgtagtgtctttatctgactttggtattatggtaatgctggtctcataaaatgagtttggactcaaataacccttcaatttttggaaagaattcaggaaggattgatatctttttatgtttggtagaattcaccagtgacaccatctggtcctgaacttttctttgttggcaggttttgattactgattcaagctctttactcttagtttcattgat

SEQ ID NO: 414378 - DNA, 484 bp, Homo Sapiens
  misc_feature (419)..(419): n is a, c, g, or t
gctcttctaaaaaactgctcaacatcaggatagctgtgcttgtacaacatatagtatgtagaacatactatataactacagtatgtaggacataccacataactatagtattagaacataccatataattatagtatgtacactatagttcatgtgtcattttagtaaaattctttttaactgtaaggtaaatttacttgaatccaatggaacaaatttatttaaaagtactaggagttacaatgtatatcatgacaagggaatatactatttctgaaaatcagttaaggaatgctatattaatcattgcagtttgcatttagggaattctgcagtgaagccacagggcaaggattttattatgctgctgttctgtacatctattccttggagtatatgttaactgtgagctgtaaatngcttgcctttgaagatagcttttgtaactctaaagataaaatgcaaagtcagcactatgactttg

SEQ ID NO: 414379 - DNA, 553 bp, Homo Sapiens
  misc_feature (540)..(540): n is a, c, g, or t
agtctgttgccaagtctagtctgctttagctgccaagtatctctggagccctacatctcccacccaccactccagcccaacttgatacggacctctgcagccactgaccagccggcctctgactgccctccccctgctcctggctgttctgaccccagtccagccactcttccctttaaacctccttgagccctggcccatgtcaagtccgtgtgtcagccctgtccagcaagatgcccgcccacccatgaaaccccaggtgaggactcgctgagtgtgcaaatgaatcctcaaaaagagcagcccatccccaggccctctgccctttcccacaggctgtccctagatgtgtggccatggccacgtccacctgtggattccatgctggggccacagattttagggtgtcactgtgtctcctgctctccaacatggaggttccccattactgttagtggaagaacacaactccaggcccttcatttttctgtttgtatgccaatcctgataagatctttgcaggcctgcagaaaacaaatncacacactggtgg

SEQ ID NO: 414380 - DNA, 348 bp, Homo Sapiens
aaacagcatgatacatttcacaactttagtcacatatttcatgttacaggatatttttgagttttatcattatataaataacactatgaggatttctgaatccaaatctggccaagtcttattttgctaaaatcatttcctaggagctaagcatagaaaactcttctatgctatttagtatattaaccaaaacctttagaggtaaagagactgccaggtgatccacatcagtgattcttggtttctagacctctgagaatatgtgagatacagatcccctgaagcctatccatagaaagtcctttttggatcaaagagattatagaactctatttgttgataaagacc

SEQ ID NO: 414381 - DNA, 509 bp, Homo Sapiens
acgcgtgggttgagaatagactgtttccatgtgcccaccttcacctctcatccaccgtacttcatctttttccccaaacctattgcctgtccctgaaatggacttgctttcagacatttcagaggaagacccctttggggaggctgaccagatcacactagacagcttagagcacctttccacaggtgaaatatcggagcagggggattctgaagttgctatgcctgatttggtcttggattctgccatagccccttctcagcctgactgtccttctcccatccatgggaagactcttaaagcagctgacgacagtgattctgagtttggttacttctccttcagtttctccaaatgttttccctccggcttcccctcccttcttgatgaagatggatatcttgctttccccagcctccccaaggtctgggtctccttcctccccgctggtgtgcagcactatgtcccaatcacctccccttcattcattccttcccttatcctcatct

SEQ ID NO: 414382 - DNA, 448 bp, Homo Sapiens
  misc_feature (98)..(132): n is a, c, g, or t
attgggacccccagatcagaccatccaccaataagtggccatcatttgtggtacatgagacagaaaactcacccagatgaactcaacatgaactcatnnnnnnnnnnnnnnnnnnnnnnnnnnnnnnnnnnnccagaaaattcttcagtcttccccggagcccactgagaacaacgtatcgatggctgaatagaaactgggcttacgaaggctcacatcctgcttaactccatatgttagattcctgcagtattattttagctttcctcaccttttgctggaggaaattgtgtggacgtactgaattctcccagagaattagcttgtttttagaaacatgcttacaattatgagttgtgcaattggctgtgagagtgtccacataaaattattgatttttgagcacgtccatgttttcaactctgggtttagtcatatatatcattca

SEQ ID NO: 414383 - DNA, 464 bp, Homo Sapiens
  misc_feature (193)..(350): n is a, c, g, or t
ttcaaaacttaatggaaaaaatgcctggcaaaacttgtttggagctttattgaaccaaaacactttagaaaccgttggggaagctcagtgaacccaggctgtggtccagccccacgctttgtctagggcaggttccgttccctcaagcaggtgatgggaatcccggactggagcctgaggctgagcagccagnnnnnnnnnnnnnnnnnnnnnnnnnnnnnnnnnnnnnnnnnnnnnnnnnnnnnnnnnnnnnnnnnnnnnnnnnnnnnnnnnnnnnnnnnnnnnnnnnnnnnnnnnnnnnnnnnnnnnnnnnnnnnnnnnnnnnnnnnnnnnnnnnnnnnnnnnnnnnncgccggggcctgcctcatcgccccacagtccggaatgctctgcacacgcatcagaaggagagtcgctgagcatcacaaaggaaaatagaaagcgcagcctcactgcccaaggcc

SEQ ID NO: 414384 - DNA, 484 bp, Homo Sapiens
  misc_feature (436)..(436): n is a, c, g, or t
gtgaaacatctaagccagaaggattaaatacatttatattctggccacttctgggggagttgcatcctgttctaggtttgggacactggagttctaatatttttaaggacacaaaagatgactcttctagcatgtgaagacagaagaaactggaactgaaccccttacataaaacctagagcctttcagatctgtcctattgttaataggagaatagaaaaaatgccacagaatgatctgagtaagcagcaatatagctcatcttgctcaagagctattttatgaaaagaaaataagagtcacaggagaaatcaaaattccaataaagatgtgagcccaggtctttcttatttcaaagctcttgatttttgctttggtctctgctggccttcctttctctgaattgtctttatgttatgtagagtaaagagagttntattcttgaacccagaaccaaagctatacacaaactattctcacaact

SEQ ID NO: 414385 - DNA, 109 bp, Homo Sapiens
gacacaggaccctagggacattctcaccagctaaccattcccacaggttgcagaatttcctggtcagaggtggaaatggtatatagggcaaacaagtttgctgaggtct

SEQ ID NO: 414386 - DNA, 435 bp, Homo Sapiens
tctgactcctttgaagagggcatcaagaagtgaaagaacaaagtccttttctgttcgggatctgggcccatcctgggagaggtttttggcagaaatggctgcagtggaaccctctgactgccagggtgaaatagtgctccagcaggctgcggtagactcgctgccagagtgggtcaggactggcccagaggacagggtcgtctcttgagagtcctcccagctccagggcctgattttaaagcagtaacacgaggatataggttatatacaggctcctggaaggcaggtgccgcagctcctgtgacaccccatatgcctgagcaagcttctccagcacaagagatgatgcaagtatgaatgggtacggggggagcttaaaacctgccaacactgagacttgatgccaggggccgtgcacccgctctgccacctgct

SEQ ID NO: 414387 - DNA, 464 bp, Homo Sapiens
  misc_feature (380)..(380): n is a, c, g, or t
tgaacactatgcaagtactcattaaaaacatcccaaaatgctggaggaaatgccgtggaattaaggaatgactcttttgtggtagaaaatttttatttcagagtatagacactgcttgtgctgggtctcttaattttactggatattataattttcttggactgttagattttctcagtgcaacatttctgagagcaaatatgttctgctcaattaaatactttctaaagctagataaatgccttccagtaagcacattaacattcaatatgttatattttaccagaggtaaaacatttatattctaaaacattatattctaaaattttttaccccagggaaaataaaatgccaaaaatctcaactaccacacatagctntgtaataagatcaatgggcaaatggaatcagcttcagtttgcactaatcctacatatatgtattaaggatatgtgtaatgaact

SEQ ID NO: 414388 - DNA, 247 bp, Homo Sapiens
tcaaaaagattacatcatttttggtgaggtcacctttttcagcgttggaattatttcatcctgcatgatacagcctgaaccacaagggggttccctgtttactaaaaggaatgtctgtaattgaatgtgtatataagtttacttttctatcagaaggcgctcttttcttaaaagcaactattgccctttttccaaaacaaacgttttctgttggcttttcctctagaaaataaacttgactaaaagc

SEQ ID NO: 414389 - DNA, 425 bp, Homo Sapiens
  misc_feature (273)..(329): n is a, c, g, or t
atcaagacttttacgaatagttttagcattggactgtagttagcttactttgtaaaatgtcattatcttcctagatttctatgtagaatttactcactaatttccataatagtagttctgagtgtccctttgaatcttcctggccccataaggaaggaatgtaaattatgctacactttctcattttgtattttcaaatgttatgctgcttccatgtctgtagaacatccttactaatagagtgccaagggagtattattacaaaacctaacnnnnnnnnnnnnnnnnnnnnnnnnnnnnnnnnnnnnnnnnnnnnnnnnnnnnnnnnnaaatatataaagctatggagaataatataacaaatatccatgcactcacacccagaattattaataataaagattaacattttgacattttgcttc

SEQ ID NO: 414390 - DNA, 535 bp, Homo Sapiens
acgcgtgggctactccatacgcaattctcagtctcctttgtcagtttcccctccctgcaatctatctctaaatattaaaattcctcaagactcagttttttgctttattctctatcctctctttctagtagcacagatggaaatagatttaaacaattcatactgtggaaaatgaggggggctgttattggctaggactggctgccctgggttaaaaggagcattatccccatacaatgtaataagtttgggagaaacacttgtactgtatgactttcaaatttatagcttcagattaggcttctctgagctcagagtcagagtcagactgaaatattcaactgcccagccaatagatttttgcatctggtcatgatggagtaacatgcataaatttactttctaccttaaacaacaggagaactggagaaagatatggaacagatgttttttaagtttttgaaaacagggagtatagtatcgggattccaaagagaagagaaataattgcatctaccctctaattgccctagat

SEQ ID NO: 414391 - DNA, 505 bp, Homo Sapiens
gtggttaacgtaatttcttcttctgggacttaaaagaaatgttcaaattaaccactatttaggtttgatcatgcctttggaaggaattggtattatcctttgaaaatgaaaaggcataatttgttgaaggtacatagaattgtacaaaaagaaatcagtaattttcccatttttactattaagttatatcataagcagctatttgaatgacagtatgaaaaagtatgtttgtgttttaaggaggctgtttttgaattaggaaagataaatacgctggtatgaagatcagctcattcaggagcaggcattttcctgcatactaaggagctttaaaggttagacagtaaaaagaaggtgatcattatgtagtctgctccacctcatgcctaccagaaaatttatttcccagcctccctaacttttctacttcaatatacagctaactgttaatgagccctaactctgacctgtgtatgtgcccaggtcacatacatcctgtcattta

SEQ ID NO: 414392 - DNA, 469 bp, Homo Sapiens
  misc_feature (436)..(436): n is a, c, g, or t
ccatggtctgcagctgcgttcctcctgcagaagcagttccctaggtctaggtctccaggacctgtccacagtcactgaaacgccttctagaattgatctagtggaaaatctagatgcagtttaggtctttggcactgtgcccatctcctttaagaactgtgcagtgtggcttggaagaggaaatgtggtccctttgatgggagaaactgaaggacctttttgaactcaaaggagctccagggtttggaattgggggcagagaaggctccaggctgctcattccatcctgggtgagccgaacgggtcctggctgatctgagtgcgaccttcccagtctgccagccagagtcccccagcaggcaggaacatgtgaaggttccgcttcaaaatatgaatgaatgggctcctcgtgcccctattattttctggccacccncaggggtcctgatggaagggaggctggcctgcg

SEQ ID NO: 414393 - DNA, 433 bp, Homo Sapiens
tatctttaaggctcaatgctctgtccatctgttacagtggcattcagaggaaggggaactttctgctaagaagaaaaggtattctctggaacctgccactccccaaaattttttttaattacttagaatttattgaatattaacagaatttgtcaaaagtagcatattcttcaagttgaccctttgttcattgaaggatgaaaggattcactggcagtttggagagaagttgctttaagcttggtagtggggatgtgggacatgattccttgaaacactgaccttgtacaaggtcattgctctggagcaggggtctctgagctggtttcagtgaactttatgaaaagcaatgtgatattttgagaaaagcagttatctttcatcagcttgttgaagtggccttcaatgtagaaaatataaagagtcactagcc

SEQ ID NO: 414394 - DNA, 453 bp, Homo Sapiens
atttgcaatataccatttttatgcatgtaaagttgtattctaacatatttactttttgctcatttgattaaatttattactgtgtatcccatcattaaggtaactaattttcagtaattaaactgttggtcttctgtttagccattattctcagttctgtgcaggagtgagctgaaacaaagttgtatagcccagagagtgagaagctgcatttcatgtctcccaacagtcagaaagggattatgtactgtttaaggaaggagattggcgaatattttgaaacccttttgggaaagcatagaatattgaaaatccaaaattaaccaaatccgtgagtgtgcaagctcaaagctagagaccttatgaatatcttatgatgtgcaaaacaagaagaaaacaagaactgagcatgcagcactaagtaagtgtcatatagcctccccacccaccctt

SEQ ID NO: 414395 - DNA, 443 bp, Homo Sapiens
gtttccaaggctcctcttgttattgatttctaattttattccattgtggttagataagatatttgatataattttgatttaaaaaatcttttgagacttgttttgtgtcctaaaatatgtttcattctggagaatctgaaaagaatgtatattatgcagctggtgggtgcaatattctgcaaatgtctgttaggtccgtttggtatatggtgcagtataaatttgatgtttctttgttgattttctgtccagataacatgttcaatcctgagaatgagaaatcccaaatattatttcacaagtgtctatctctccttttagatgtaataatatttgatttatatatctgtgtggttcagtgttgggtggatatatatttataattattatattctctcactgaatctatccctttattcctatataatgtcattatttgtctc

SEQ ID NO: 414396 - DNA, 325 bp, Homo Sapiens
  misc_feature (113)..(121): n is a, c, g, or t
taatgtaatatatgttaactccttaaatattaatgcaaagaagaagtatattatgtgttaaattacatcttaataacatagtgcttgaaatatatttttaaaactgcagtagnnnnnnnnnaatatataccttgtttagtattgtttttgagtactcaaacagcactcagtaaccagagttttacagctaaagacactctcagtattctaaatgcctatgattcatttcataaataagaaaatgcttatagacatttagagctttttcaaccatcatgttgaagattttataatgtttttgaattcaaaaccactaaaaatgaat

SEQ ID NO: 414397 - DNA, 453 bp, Homo Sapiens
  misc_feature (346)..(346): n is a, c, g, or t
acggtggttcgggaggcggcgcgcgggccggggtggaggtgcacggagccgcgggcggggactgctggccaccaccgttctgactcccgccgtcggggcgggagctcgctcggtccaaggtcccagagccggatcgccgcccttggactttgagcgggcgcgtgcggcggccacgtgggcgaggagccgcggccgggctgcctctcgggggtggcggccttggttcctcccgcggggctgggcttgccggggcccggagcccgccgggaagagttcggaaatcacacgtgtcctttttcccgctctgtgccctccttgtttagtgcgttgccggtgggcgctttangaaattggtaggaggaaaagcggcttcttttgaaaaggtaacccttaacagagatgaaagtgaaagccaggtttcattgggaagccgatctgcacctaccgagggct

SEQ ID NO: 414398 - DNA, 413 bp, Homo Sapiens
ctcaagagatcctccctcctcagcctgcccaagtgctaggattacagttgtgagccataatgcctggccagggttgtctttaacactaagcagtaaatgtctttccatgtttcactgacatgcatatgatgtttgccacagtaaaaagtttagggtagactatatcgacttactgttagaaaaataacaacgcagacctacttagaaccttggtttttgtctttgttttgtggcccaaggtcacacagttagtgcatgaagtaaaattaattgcaccctgattgacagactccatcaggtgcagttagaaggagacaaaacttgacagtcttgaagttgcctatgagtgctattttattaaaaaggtcttattatagtctaataagtagcatcttactacataataaagctgg

SEQ ID NO: 414399 - DNA, 422 bp, Homo Sapiens
aaagcatgctccaaactctccttccagataaccaactttgttcaatctcacaaaggacaactttcctccaagggtccagtagaactggaaagagggacaggagtagaaataatgttagtcacgggcatcgtttatcagaaagagcatctcctgtgtttgagtttcacaagaacaaaccaaggtgaaagccgaaggaaacacttgaaataaaggtttcacctcacagagactcaagcactggaagacctgctaaaagctaccgtgaaagagcttgcgaacgaagggaactccacgttggtaaaccagatgttccgggttccaagttacatttttactcccaacccctccatgctttctaacgttattattttttggacgtgatcaaagtttgtaacatttaacttctgttcctcacaccgtgg

SEQ ID NO: 414400 - DNA, 187 bp, Homo Sapiens
aaaaattaatattagagtgaacaaaaatcactgtttgaagatagcatggttttgtatttagagaataaaaaaggctaatcagaagcacagagactacttcagctgtatttataatgttttatttaagcaggatggtgggccatatgatagatgacactgacactcctcattaaagatgacagtttga

SEQ ID NO: 414401 - DNA, 514 bp, Homo Sapiens
acgcgtccgggcaatttaaaaatgctaagaattttaaaacaaaacttccaggaaaaatgtatcctgcaagttgctgaacttgtgccagaaagtggttaaacaattataaagcacagaacaataacaaaaaagtaaaacttctaaaacaataagcaaatttttaaaactcattaacttgtttttctttctgatgatatgcagacttaaaaatactgagacttttaagtaaaaatctgttagcataatgtaactttaaaaactgtaaaatctgtgtctgggttaggaacaaagtgaaaaaatgctaaaacaatagtaaaaacaaattcttaaaactggcattactttttcccaatgaaagtcctaaaagtaattatgcattatgtagtcttatgaaaagaggctatagatggaatatataaggcattagattcagttaaataaaattaggttaagataagttcagttgttagattatatggtaagatcaaatcagtaataaaagcgtgaataatct

SEQ ID NO: 414402 - DNA, 496 bp, Homo Sapiens
  misc_feature (454)..(454): n is a, c, g, or t
  misc_feature (483)..(483): n is a, c, g, or t
atattatgcaatacttgccatagttttctaaaagctgaactcagaatgttaatgaaattaaaatgggaaagctattttgcttagaagatattttgttataaacatttcttaaatgaagaggctctagaaatatttattttatagaatttaaaatatagccatcactaataaaggcaggcataattccaacgatttcataacacatcagttattaaatctaattaatatataaatgtaactaatatgtaatttaatataaccctaattcaatgtttaaccaactgaagctggttaaactatgaagaagaatcttcaaattgaccatttctttccaagcggtaaaggtgatacgggattttgtctatacatatagagcaaaggagaattaagccaagatttagaattttaggcaaaaagtgtttatagtatcattaagtggttacatatgtaattntactgttataaatatgactgagtcaattnttttttcaaagat

SEQ ID NO: 414403 - DNA, 253 bp, Homo Sapiens
  misc_feature (47)..(47): n is a, c, g, or t
  misc_feature (121)..(121): n is a, c, g, or t
  misc_feature (141)..(141): n is a, c, g, or t
  misc_feature (156)..(156): n is a, c, g, or t
  misc_feature (165)..(165): n is a, c, g, or t
  misc_feature (205)..(205): n is a, c, g, or t
  misc_feature (210)..(211): n is a, c, g, or t
  misc_feature (217)..(217): n is a, c, g, or t
cccaagacctccgttgaattgcaccaccagctattttaatgatcttnataaaatatctgtgtcttttaaccctaaggaagtgaagctgacagaatgaagactgtgtaactattcaaattgnttttaaaaactgatgtttgnggttactcggactgngaagcatgngttttatatcaattcactcataaatgcagcattcacttangccanncacggnggcttacgcctgttgcagaatgttgctgggtatatt

SEQ ID NO: 414404 - DNA, 510 bp, Homo Sapiens
aaactgattaacatttcatcaggtttccattttaaaagaaaatggcactgaagagacaaggcaagttttccaagcgacaacactggcttttctgaaaggggaaaggaatgttaaggaaatgggggagaaagcttaaaaagagtggaacactagcaagcagggcctcttctccttttcaccttaagtcttttttctctcccattcacagctttaggtcctttgtttgtttaacaaaccattacaatcatacccagttcaatgggggaggaatgtgaactctctgagtagctgtccttgcaatccacatgtgtggtccatcccccagctcatccgcaggcagctttcatgtgctgctctgcgctccccgtcgccccggaggccggcaccttgctcacaataagcctcaatttcccaccgctgcctgctcgcagctcctccccagcagctgagagcaatgtctcaagtggctcttcctcccctgcttgccttgcaatcatactgtccaccctg

SEQ ID NO: 414405 - DNA, 404 bp, Homo Sapiens
  misc_feature (80)..(187): n is a, c, g, or t
attatataaaatctttcagaaaacttgcaactgagtttcaatggttcatttaaaaaactgtacagatctacagagaggannnnnnnnnnnnnnnnnnnnnnnnnnnnnnnnnnnnnnnnnnnnnnnnnnnnnnnnnnnnnnnnnnnnnnnnnnnnnnnnnnnnnnnnnnnnnnnnnnnnnnnnnnnngcagttgtctagaacagtgtaaacagggtcatacatttgttttagattatggatgtggggattctgattgtagcctgtcccccagcttccccagaaggtgactcctcatgatcccactttctaaccatgcctagccagacagtccttcctagagggccaagaacatctcactccctaagcccagaagccagagaagtgctagaacaaccccacatat

SEQ ID NO: 414406 - DNA, 161 bp, Homo Sapiens
  misc_feature (54)..(109): n is a, c, g, or t
ccatggtttaagttggtttcggaaggcattaattccccaaattggttaaggggnnnnnnnnnnnnnnnnnnnnnnnnnnnnnnnnnnnnnnnnnnnnnnnnnnnnnnnngccagcataaagccaccagggggggccccaaaattttcccccttaaaaaagg

SEQ ID NO: 414407 - DNA, 139 bp, Homo Sapiens
gggggaaatcaacttaaataaaaaaaggggaaccccgggcccccccaacccggcccgggagcccaactggggcatcgggccaaaaaagcaaccaagggggaacaggaaggccgggggtccccagttaaggcctaaaccg

SEQ ID NO: 414408 - DNA, 437 bp, Homo Sapiens
  misc_feature (212)..(212): n is a, c, g, or t
ccactgtcattatatattaagatatttaatcatatccagtttagactctcctaaagcttcccaaataccacagaactatgcccctagtctctttcacttccagtttactttctggacccttgtcagatcattcagtctcaatgaaaaatgaattcatctatacaaaaaatatttaacatcaactacataccatacattgcaccatgcaatanatgaaatgttggaaaaattaatctaacctatatttcatcatatcaactcactgaacttcaatgcttctctcctccctgaaaggacgatgtcttatagtctccctagtttagcatctaagtttccacaaaggcttccaaaacctcttgtgggaatgtagttacactctcctcccttagcagcagtatttcaatgcctttgggacttttaacattctatccactctt

SEQ ID NO: 414409 - DNA, 504 bp, Homo Sapiens
  misc_feature (212)..(212): n is a, c, g, or t
aatcatctctttatattatgattcttttagtattataaaatcccccaggaagaaacataaatgctacaagtgcataacagaatgttttgtcatcacatccttgtccttgcctcctcttcatccatttggacatattatgtgttaggtatagggcaaggccttggaaacacagaggctttttatctgtgtctttgatgagagtatcctgcagntgcagaatcaaaaggcatttacatagatacattatcacctgtgtctatgtaaatatgtaccttttcactttaaatgcccactcaaaaatatattacatcctaactattctgattgtaagaagaaaccattccagaaataaacttgcctacattctcttcacagtgcaacactgcttaaaagtggcacggaaattgcccatggcaaccctaaaaacaaaataaacacaactgtgcttctatgcaactcaacaggcaccggaaaagagagatgtacagtggtagcttcatatat

SEQ ID NO: 414410 - DNA, 175 bp, Homo Sapiens
caaacccaacaaaagccgaagcccgctctaaataaccagcaaaaaagggggccatctggggggggccaggctggggcaacaccttcagcaaccccctgagggcaatccacccctgggagccaggcaccccatgcatttgggcaaacaggttggcagctgcccaaccccaaaggag

SEQ ID NO: 414411 - DNA, 401 bp, Homo Sapiens
gttgtttgttacagtattagtttttaactagaagttactaacttgcctctgttatatgaaacttttatgtatttgtaatactagaataagaggtaaacattttagattttacagtggattgtttcatagaataggtaatctaaaattctggagtagggaaatatcaagggaatcttgatctgactggttgtcagggggttttttctagatgattgtgaaatttttattctgttagctataatatagttgcatttagctttctattttaagagagaaaactcaagaattctgtggcatatatttagaaaagcagaacctagggataaattgaaaaggtcatcttttaaggtctgttcccataagaatctttgagtcttcaggggaaaaagaccattttttga

SEQ ID NO: 414412 - DNA, 128 bp, Homo Sapiens
taaggttttattccaaaaccaaaacccaaccccggcaaccccgctgggccggggggggacccaggaaaacatggaccccaaagggaaccgcggcgggggcccaaaaattctaggatcccgcgacccaa

SEQ ID NO: 414413 - DNA, 111 bp, Homo Sapiens
tccctacaaacaagtgttattatataaggaaccgctccagtcagcgaaaacccaaagaaaaccatcaactaagcctgccttactttccggaagagaactagaacataaacg

SEQ ID NO: 414414 - DNA, 126 bp, Homo Sapiens
agtagacacagggtcttgccacgttgccaaggctagtctcaaactcctggcctcaaaggaccctcccatctcaacctcccaagcaaccagcattacagagatgagcagctgtgcctggctgaattc

SEQ ID NO: 414415 - DNA, 286 bp, Homo Sapiens
  misc_feature (46)..(54): n is a, c, g, or t
ccaggccgctggtgggagcccccaccctgttgaagcccagaaggannnnnnnnnctgcactctaaaaccccgcctccagccgccggtggtggggtctaaggctccgcacctcctcctccagggccgcccgggccgccttctccttcggaaggccccccggaagcttccggagcagggaccccacgcgaaaacaccttttctagagagggcccaggcccggcccaagcaacaacattggcgagcccctcagggcccccactctcggggagagcgggccgccagagcg

SEQ ID NO: 414416 - DNA, 204 bp, Homo Sapiens
cctcactgcccttacccacacttacctaatccatcagcaactcctgcatccaaaataaagcttacatctaccctctctcttaatacctaatgctgctacctttctcctgaccacagtcatctcttgcctagattactacaagggtccaaattagctttctacttctattcttgctctgccaccagtccattctctttagcagac

SEQ ID NO: 414417 - DNA, 426 bp, Homo Sapiens
ttttaacattgctactgcttttatttcagattaagactctggggcaatcatagtctttgcgcctggatataacacaatcattagtctgttctttgtacaattatcgaaggcatttttaccttggcttcagttcatcgtgctaatggaagagaaccacagagaaaaccactaagtgaagttggagctaaaaccagacttcacaggaaccaatgttttctacccatattggaatttctttaccatctttaataagggccatttagataagccttagtctgatccctttctctaacaatgctggtgttaagcaatgggaaagagaaaaaagataaaacaactgtagtgttcagattgtgacattggcaagcaaatcagaatgcacactcttagtgaatgttgtccaaaaaggagtcagggctctacctt

SEQ ID NO: 414418 - DNA, 235 bp, Homo Sapiens
  misc_feature (99)..(154): n is a, c, g, or t
aaaaagggcggaatttaattaagggggggcccccaaaacccgggccccgggaaacccctcccaaaaagaaccggcaaaaaaggtggtacccgggggaannnnnnnnnnnnnnnnnnnnnnnnnnnnnnnnnnnnnnnnnnnnnnnnnnnnnnnnaaccagggaaaacaaagaaaaggcccaggcccccggccccccaaatttaaagaacccggttttttggcgcaatccaagaaa

SEQ ID NO: 414419 - DNA, 670 bp, Homo Sapiens
  misc_feature (561)..(561): n is a, c, g, or t
  misc_feature (610)..(610): n is a, c, g, or t
ttgctaagcaagtaattaagcagtaaaaatatgataacatgaaagctaaagattggaaaaaatagtagtgccaacttcagttgctctgtacattggaaaccctttaataattaccagaagctcaatatcacatagtccacaaaagatatgattgttacaaaagaactataacgcagtgtttccttctagtttttgagatggatcttagttaccaccgaatggtttgaataatggtgttggggcctgggtctgatagatgctgcaaaaggttatcaaaaggcccctttccagtcacattgtgttgcacaatgaatcctaagaatgccaacattgccaatctcccattagcaagctccttctccttggcctcagcagtaggtgcaaagttgagagggttaaaaatgccaccagggtaaccaacttcattaggaggcaagctatattgcttgaagatagggtcttggttaacacttcctgggttcttgatgtcctgccatctccttatctccacatagtggaataagatgaactcaatcacaaacaaggtcgatgatgaggcanagtacttctgtttccctgcatcataccattttccgaacgtgatgaattngatctgtgtgacacctctggaagcaacatccagccacccctagattgcccattcgccgtc

SEQ ID NO: 414420 - DNA, 224 bp, Homo Sapiens
  misc_feature (174)..(182): n is a, c, g, or t
gacagtgtctgagaagcaatctcaaactgccttttattactgcacacagttaacgtggaattgagaatcactttctttctaacataaaatgtgagccgtagagttactactgaaattcaccacagtgattcagccaacaactcaacttattcctttgcaaaaatttctgaaggnnnnnnnnnctcccttcaatctcagcattacaaaataatgagcaaacaggt

SEQ ID NO: 414421 - DNA, 189 bp, Homo Sapiens
ggcaatggagcagttaataaccataaaccggcccccagttttccagcaaaacagccagcccacactttaaacaccccttcactccagcccattcgggcaccaaccctaagttttaaccctcctccttcctcaaaacactctttccccaagccctccaaggcagcaccaggcctgggggcccccttaatt

SEQ ID NO: 414422 - DNA, 435 bp, Homo Sapiens
atacagttaatgaacaatgaatgtacgaatagcatctaaatcaatagataatagatacttgttaaataagttcctctgtttatcatgtcccttctttccaaaccaaatatacctttctatatttcaggcattctaggggccatcttaattttcaagatcaggatgacagcagatctaaaaaagttatataaccctctgctgaaaattactcttatttgtttcttacttatgtttatatgtgtggcaattcctaagttacatgaatctaaagaaaaattatctcataatgtaatttaaaatgctataacatgttgcctaggatattgacatcattgaaaagggaggagaatctcttattaattctaaaatctttaaaatgttcatctattaaggaacatgattaggaaaacagatactatatagttttttaacata

SEQ ID NO: 414423 - DNA, 185 bp, Homo Sapiens
ccacaaaaaaggtcacggcctgccccgggggcgcccaaaaaaaggagaggagggcgtcccaaccaccctgggatggggaccaaccccacacccgcccccggaggaaggcacaaggccaacccaagagggttctgaacattcacggcaccttggggaaaaaggccatgagccccagctgggtgcgc

SEQ ID NO: 414424 - DNA, 491 bp, Homo Sapiens
tcaatcttactgatttgtaaatataatataagtggattatacttagagaacgtccatgttcaccaatatagaagtcattaaatcatttcaagaagcaatatacacatttctagtcagtatcaagaattaaccagcaaaaaggctaataagcaaacacaaccatcaccattataaaagggaagtatttgtgttttacttcaaaccaagcaccaggttactctcagtgtttacccgccctcaggttttagagcaaaacaagggttttcctttaatgtttccctttcatactagatgtcatacaatgtaggcatgagtataaggaggcaggcattgttcatttcttactcctatatacttgcacttgaggtattaagacacagtcagcccaggtggccaaaggggtggggacagcacatgatggaatgggggaagagcagcctattccagccaattcttgtcttgaccagcctggctctgatcactcttcttta

SEQ ID NO: 414425 - DNA, 415 bp, Homo Sapiens
aattttaaaatttaaaaaacttttattttaggttcaggggtacatgtacgggtttgttatataggtaagttgcatgtcatgaagatttggtttacagattattttgtcacccaggtaataagcatagtactccataggtagttttttgacactcaccctcctcttatcctctaccctcaaacagtccccagtgtctattgttcctttcattgtggtcatgtgtacttaatggctaactccctcttataagtaagaatatatagtatttgggtttctgttcctgtgttagttcactcaggataatggcctccagctccaccttttgttgctgcaaaagacatgatctcattcatttttatggctgcatagtatttcatggtgtatatgtacaatatattctttatccagtctactg

SEQ ID NO: 414426 - DNA, 433 bp, Homo Sapiens
tttgtacgattttcatggcctggttcacctggacttggcctatcagtgcacatgcagagttgtatttcagctcatgtgtgccttattggaagaccaggttatctggaaccacttttttccaatagcttttagctcgagcgactgctgaaaggtttgttatcctctgctcatcataattatattgggcgtttgggacgatatctctatacactgctgggcattaaacataaagaggcctacggtttaacacttgcccgttccgcttcttcacaattgctgaatgatagcttggactatatattgtgtttaaagattctcaaatatgtcaaactgtctcgcaaatgcctttcaaaggagagagagtattgctaccctttgttgtggtaatgatacatcgcgctctcttgaacttcactctgggtaaggataccac

SEQ ID NO: 414427 - DNA, 160 bp, Homo Sapiens
cagcatcggttaatggacaatcccaggccattcctaaccccccgaaacagggctctgtacagcccggcccgggggggaggagggagggaaggcaggcccccaaaaacccaggtttgtcggaaagggcacacaaaccgtggtctttcctttttggttaaag

SEQ ID NO: 414428 - DNA, 154 bp, Homo Sapiens
cgggcgggcaccccgaccgcaccaaacgggccagcaccttagtcaaccagaccacaccctcacggcatggagaacactggccacagccgtcgggctcagacaactcaatgaggcgggcgacgcgccccacgatgaccgtcgagcggcccatgac

SEQ ID NO: 414429 - DNA, 196 bp, Homo Sapiens
cgtaggcagcaagcagaggcgggccaccagcagaccaggccagggaggagcacgggagcggcaccgcccggcagctgggacggagagcgcatggcgcaaggccagcgacgaggaacggaccctgaaaaacccagagcgagacggcggggccgggggcagcacacagccagcagcgggcagggcagacgcacagggc

SEQ ID NO: 414430 - DNA, 398 bp, Homo Sapiens
atcatgcgtatagaaaacaaaagtgtcacagatccccttgtgactggacaaagccacctcaggaatatttctctgcttaaaagaagcattgtcagttacagtgatgtcaattacaacctggcacaaaatcatcaagaccatcagggtcacagaattctttctggaggttatccttgcagaacacaggcacagcttccagtctgaagtccaacaaaaccagaactctgcttctaagtacaagattatggtaaaggccccaacaacctgataacaattgtgaatagtcacataagtttccaagtggcataaaaaatgtacactgacaatcttgcaaaagttctcaactaaaagcaacaagcaagcctttacagcataatgccccagtgggctgaaacaca

SEQ ID NO: 414431 - DNA, 505 bp, Homo Sapiens
atgttttttcttatgtttattaatatatttgacaacacattgcatgatgactgtagtctattactgtaacattaattcagaagataagcaaatataaaattgtatatctaacagagccataatctaactataaaataattgtgaatagtaagtgtagcttgacacatttattctactatttttatttaacgtgctacttgaagccagtcatttgagacaatattcaagaggtaatatgttgtataaatcacgtataaatggtaaatttgcttaaacttacaagaatattaaactgtaattaacatcttattttatacatagtgatggctttggactagagatattcggaaaacacaaaatcctatgttcatatagtttcttactacccttgatgaattcaattaatgttcttaaacctcagttttctatttggattatttgctttaacttaatagcttgtctttatttttccctctactattcaaaaattgtatacttctatcga

SEQ ID NO: 414432 - DNA, 398 bp, Homo Sapiens
  misc_feature (174)..(215): n is a, c, g, or t
  misc_feature (226)..(261): n is a, c, g, or t
tttttttaaaataggaacagtttagtattgcgagattgtcagcaacatttagccatatctatacaatgtgcatatacctacaaatattgagctttggtccagcgtagagaaacgagcaaaggcattttacgatttctttttggttatagcttgagttctttgatacacctctannnnnnnnnnnnnnnnnnnnnnnnnnnnnnnnnnnnnnnnnngttctctcttnnnnnnnnnnnnnnnnnnnnnnnnnnnnnnnnnnnnatgacaacataaagaagccaaaaccttgcaaatgcaattaaaagtttcaattgttcaaaatattttcttggttgaaaaagaaagaaaatctataaacaagtgtaaaatgtaatatccactgtcattttttcatgaag

SEQ ID NO: 414433 - DNA, 437 bp, Homo Sapiens
ttttttttgtgtgtcagaagggcctgtggtgttataaggggaagactgcttagcaaaatcagttggttccctagttacttatgaatcattatgtgattcaatacaattgcaatgctattaagagggtcatcagactatttacttattattcactttgggttgtaagttatctttgatgtctagaaatattttcaaggcaggctttttcctagcttgctgtttggatggggacctcagcatctacttcctagctctttcccaggatagtccatgttgatagtattcctctcctcagctgtgactccagcagcatcttctaagtaaggctctcagaagcatgaagcctgcaagatggctggtcacttgtaaagcaaatgaggtcaccaatgaagctttgatatgaagaaacttgatatcagtctaggctcccctaaaca

SEQ ID NO: 414434 - DNA, 247 bp, Homo Sapiens
cttgttgtttggttcgggaggccttttatttggcccggaacccaacccctggggatggataccgcccttgttgaaaaaggggcccaatttttgtggggtaaaccccaattttggcctaattccgttgggggaggcctgttaaccacctgccccggggggggtttagaataaaccaagggcccatgggggataacttttaatcctttgcggttacagccttcttggtttggagaagggaaccaacttc

SEQ ID NO: 414435 - DNA, 241 bp, Homo Sapiens
aaagcgtgacgggcaccacatcccaagcgtgatggcccctgctggggcaactgcaatccctggggggccgggcactacctttgggagccggcggcccccacccccgccatgggtggccccccatacccagaaattgagtggggtcccgaaggccaccccccccacatgtgggttgagacagggggcgggcatctggctcacctggtaccaagccccggtggtggctggcctccgcccactg

SEQ ID NO: 414436 - DNA, 292 bp, Homo Sapiens
cggccagggcaaagtttgtaaactggagccggtcagtctcctgggaaaagttgtgctccactggggcaaactcggctaggaaagccggaaccttttttaccaagcctttcctttgcaatctacgggctttgaaattgtcgggcgggagcagggggggaatctcctccaagaatttgataaacgggtggatggtgggtgtaactctcctatcaagtgtggagagaggttggagttgccaagcctgtggcgaagaaacccggtggattccaggaagctctttattcgactcttg

SEQ ID NO: 414437 - DNA, 179 bp, Homo Sapiens
  misc_feature (84)..(84): n is a, c, g, or t
  misc_feature (100)..(100): n is a, c, g, or t
atgagctgccgcactctgccaggttcttatttttaatagaaaagagaacagggaaggacacaggtccagtgtgaagaggggggngccatggtaacacaanagtgggactggttctctacctcttcacattgtgcgtacacggacacagacagatttcaaggccctggcgaaagagagcc

SEQ ID NO: 414438 - DNA, 287 bp, Homo Sapiens
aaaacttttaatgctttattgggaatgcaacccttacaagggtaaaaacaaaaccccaacctgggattttgcccgaaattttaaccttaaaagagccgaattgagtcaaaccccggccccaagggggacccaggcggcaggcccaagggacattcaatgtttggcgtggggggcttcaagggaaggcaaaagaagggacccaaaagggggccccccccttaaaacattggggaccccgggaggaaaccaaaagggaagcccccacttggccccggggtgaaacaggc

SEQ ID NO: 414439 - DNA, 325 bp, Homo Sapiens
  misc_feature (98)..(106): n is a, c, g, or t
  misc_feature (197)..(205): n is a, c, g, or t
aaaatcaaaattggggttggttttaaatgggggttcctcccccggcggggtccaaaaagggggggttggggttgcggtctgttaataatttaatgagnnnnnnnnntaggactgggaaaaatagaaaaattaggactgcttgaattaggacggttctaacaaaaaggggccttgggtattgtgttatggccgggggnnnnnnnnnaattattgagattataaatttggtgctccccaatattaagggaaccccctctctatgtgatgaaaaaaggggtatttctactaaatctccagggatggaatattttccttcctagggtgg

SEQ ID NO: 414440 - DNA, 485 bp, Homo Sapiens
atcatgagagagaacgcgttttattcaatatatttatagtatatttatagctcttctacagtatatatgtgaattactaggagaaatgagaaaaaaataggtgactatctagtcctcaaggattttaatgcctggaaagaaagattcaatgtataatattttcctgaaaatacacaaaaaagtcaaattatgaaagtttaaaaatagctttacgtatttcaatggaaatttctatcctatagagagttagaaaatattcaatccctaatgaaagctcactttaaatataatctttgacaatattttcataaacaaaggctctttagtttatcttccttcacaacagcatcaggcttagtgcccaattaaatgtctgcagcagtccaaagaaatatcattgccgagggtagtatctttacctccaagtgagcaagacaggtctcatcactgctatcagtgatgaacttgggaatcagtaatggctg

SEQ ID NO: 414441 - DNA, 265 bp, Homo Sapiens
  misc_feature (68)..(76): n is a, c, g, or t
aaaacccccatcaatagagggggacatacaaaaatagtcaaaccccatttacaaaaggcccatttcannnnnnnnnttcaaaaccaaagggatgttgggatgtaaagggaaatattattgggggggtaaaacaaattggggggaaagttgacccaataatgacgggaagtccggggaaacctgggggtacaaaaaatgttgacccctaaatccccccggaaatggggaagggaaaccccaaatcctctgggggttggaggagggg

SEQ ID NO: 414442 - DNA, 437 bp, Homo Sapiens
ggaagactaatcatggtgacacgtatttattagctattgccatactaacactatataacaaatagtccccacaatacaatacacaataaggattaatctcaaacacaataaggattgatttttgcttgtaagtcagctggaaggttctgctgattggagtctggctcagggagtaggagctgggcttgttcaagtgtctgtactcagggcctttctcggtgccagaaccttggtgagtgcaaaagttgcttgtccatgagtatggctctacccaccaaattggaagaacacgatctgccaatgaagagaatgaggctagcatataaagagggatgaagataattattaaggagtcttaactatacctttgagcttgaatccaaatatgcctgaagtcttccatcctgcgcttcccagtaacggaaactaaaaacctc

SEQ ID NO: 414443 - DNA, 229 bp, Homo Sapiens
taactgactgactgaatgctaagcaccacagaggaggagcagataaaaactcttgtagtagcaggaggcaccagaggaacagagaggccagcccattgttgggcctctgcctacatccctccagtacaccctgtacttctctatccctgttcattactttctagccacgcaggccttcttgattcttgctatggtgagactgtcccatcacaaggctttgctctagctg

SEQ ID NO: 414444 - DNA, 328 bp, Homo Sapiens
atcatctttgttgtaattgttgtcatctttatgattatcctttcattattattggagtgattatgaggagaaaagcaccaggctatctaatacaggttgaacatccttaatccaaaaatctgaaatccgatgctccaaaatccaaaactatttcaatgccaacatgatgcactccaggtaacaagtggaaaattccacacctgactttaggtaatgggttacagtcaaacagtcaaaactttgtttcatgcacaaaactattaaaaatattatattaaattaacttcaggctatgggtgtttaaagggcatataaaacataaatgaat

SEQ ID NO: 414445 - DNA, 137 bp, Homo Sapiens
gaggctgaccgtcttgctgtaattgggaaaaaaccacctgccccccatttggcaaattgagtccccaccacccaatttcaggggttgtgcaggcaactgaagggctcagggctcccttcctcacatggtgaaaaagg

SEQ ID NO: 414446 - DNA, 295 bp, Homo Sapiens
  misc_feature (205)..(245): n is a, c, g, or t
cttgttactagctttttattgaacatgaaagggaagggactttggatagtttcatctaaagtgctttgttaacatgacactgatgatccagcatcgattacaatattccttaggagcctaagtgttacgtaaaagggtcaaaaagtccattttaaattttatttcctatttcaaagtccaagaacccaatgactttcaattactnnnnnnnnnnnnnnnnnnnnnnnnnnnnnnnnnnnnnnnnnttaaatcaacatatagtttatcatttgcaaaaattgcaacctagttctac

SEQ ID NO: 414447 - DNA, 250 bp, Homo Sapiens
caaagagggaaatttattttttgggaattcaaaaatcccaggttgtttgacctcagttccccaataagggggaattccccaacttttcttttaatcccattttaaaatttaatatagaaatctttgatgggcaggacccctaaaaataaatgtcccatggccagtagggcaaaggggggattggagggttttgaaaaacccccctaacccatataggggggttgggaaaaaccatcgaaccctagggctt

SEQ ID NO: 414448 - DNA, 160 bp, Homo Sapiens
cgtgtccttggaagatgccctactgcctcctaaacgatttcctctggatccagatgggggccgaagagagctgctggggcccggccgacctgtgccaacatcgcagaggcgactggggtgcaacagatgaccagcccggctccttggccacttcatggca

SEQ ID NO: 414449 - DNA, 126 bp, Homo Sapiens
taggtctcataaattttattaatatgtaccacattaagaaaaacaagatccgctgtaccaatggtgaggatagggaatgggactgttcattgatatttcagttaaaatttccctattttaactgac

SEQ ID NO: 414450 - DNA, 188 bp, Homo Sapiens
  misc_feature (85)..(98): n is a, c, g, or t
ggcctgacaaatttcccaaaatttgccgatccccctaaaaccggatttttgtttaaaggagggggaatccctttaaagggtttgnnnnnnnnnnnnnnaaaaaaacccttttttcgggtaagttaattttccctttcaataaaataaagggtaaggggttagggggagttacctggggaatttttctt

SEQ ID NO: 414451 - DNA, 320 bp, Homo Sapiens
gcaagctcctccaagaaactgacattctagctccattctgaccacttccttgaagccatatgctatggaacacttatgcatcttatttgttcccaattactttcaccctaattagtaggtcagcactaatgaaggcaaagtcacaggctcaaccttgcctactgctcctgctcctaattagagtgagatgatctcagagacttactgaattaagttggtcccaaagggatagggcacaagaacttgagcagacagcatacacccttgatataaaacgatcatcttcacataaaaataaatgttaggatatgtgataatcc

SEQ ID NO: 414452 - DNA, 308 bp, Homo Sapiens
atgatgttgagcacatttttacatagctgtttaccatttgtatgtctttttagaaatgactattcaaatcttttgcccatttaaaaaatcagattattagattttattcccataaaattgtttgagctccctatacattctggttcttaatcctgtctgacaaatagtttgcaaatattttctaccattctgtgggttctctcttcactttgttgagtatttccattgttgtgcagcttttaaacttgatgtaatccatttgtctatttttgctttggttgcctgtgcttgtgaagtattactcaata

SEQ ID NO: 414453 - DNA, 224 bp, Homo Sapiens
ccaaaagctttgccccgcccatttcatttttttccctttcccggaaaaaatgtaaattcctggtttaaaaaatgccaaaaatgcctttttttgactcccgttccaaattttaaaacccttttcagtcttccctcctttggccccattaaaaataatcccggcccttttcctgtttgggaaaaaaaccgttttttttagtaattttaagtcccctaaatcccagg

SEQ ID NO: 414454 - DNA, 342 bp, Homo Sapiens
aaatcaaagacaaaatgtcaatcaaatttcatcagcaggaaacatctagaatgatcatactgagttgaaaaaaatgccaaccaagagaaaaagctgacattctaattaaaatgtgaaaacccgttgtgggataaacatgtgaccagtgataaactttctgaagaagacctcctgaagcgcacacacctacagctgcatcctgtgcctgtctgtattacagctctcagcataccgtattgaaattctgtttctatgactggagcccgtcccacactctgaatttcctatagatagggaccatgtctcactcatttttacatctctagcagtgtccctgtgata

SEQ ID NO: 414455 - DNA, 416 bp, Homo Sapiens
  misc_feature (272)..(272): n is a, c, g, or t
  misc_feature (293)..(293): n is a, c, g, or t
tgagacaaatctgcccttttaacagctggttctgattcaggtgatcccaggaacttactgtcgttgagtcactgtggtctcccaacttgttccttctttttgtatcaggaaggtgacttctcaataccaggatagggacaacaaatttcagaatgtagagagactccctctttcggggagtcacagaacagtatgtatgatgggtgtgaaaggaaaagttaaaacgcaagctaagccactaagtggagaggaggtatgtgtcattctatcancatttgaaaaatgggattcanggaggccttttgcaaaattgtgctttccaaggaaactaatacagggtggcatgttgcaagattcttgtcaaaggaaggggatcccagtacagattttgcaacactgtgctgcccaaggaagtg

SEQ ID NO: 414456 - DNA, 271 bp, Homo Sapiens
  misc_feature (111)..(121): n is a, c, g, or t
  misc_feature (179)..(206): n is a, c, g, or t
aaaaattattcttttttttgggtccccaggaaaaaaattcacttgggggtcaaggcaaatggtcaaaatcataacaggcccaaaagggttggtccccaccccaaccccccnnnnnnnnnnnccaaaacaaaccaaaatgggacaacccccccatttaaaaagaagaacgggggggtttnnnnnnnnnnnnnnnnnnnnnnnnnnnngggtgaaatggtgggacagaggcaaatttcacgggggcatttttgtttctttttaaatccagggt

SEQ ID NO: 414457 - DNA, 411 bp, Homo Sapiens
ttttgaaaagtccctcacagtgtttaatagaaacgtaagtggctgagtggccccaattaacaccttatgataaggcattcctaagatggagtgtcagacaccaaattgtgaagagatgtatctaattaatcctcctaggatgacaccgataaacaagcctctatttaaataaagatcaagggctcggcgcccggtttgtttacattctccgccagggtctcctagtatgcaccggtgcaggcggtgttccctgcccagggaggagatactggctcgggggtctgctggctcgtcctggttcacatctccgttcttgccccaaataaacaaaaaaccacaataaaatcaataaattgcaatgaaacaggaaaaagcagtgcaaagaggacctgactcggagttggaaatact

SEQ ID NO: 414458 - DNA, 445 bp, Homo Sapiens
caggtactatcgcatacccttccatgacaaatgaagataaaaccctgggaactgcccaaggggctggcggaatggcaaccagagcaaactgtgcgcggagatggtcggaatccaccatatcaattttgccctgaaacactaaaatgaacactcgcgttcgaccatccacgcctgtagaaaacacctccctctattaggtaggaagaccggcattgacatgaataaagaggagcaccacacctagcagaggatcaccactaatagaacaggtgaggacataaaagatcagctcatacgctagattgacagtcaacacacctaaccaaactggcaggacaatggtcacagaacatctcaagattgatcctcgacttagagctctgccaataagaggcactacagaatgcagaactgtgggcatgccaggcaagccgcccacaaaaag

SEQ ID NO: 414459 - DNA, 169 bp, Homo Sapiens
cctttcccaaaatggattttttttggggccaaacctggtttctcaaccccccaaaaaattgctttgtggggacaaaaaatttttgggtggctctgtaaaaaaacctggggggttttcaaaaaagaattggcccggaatggggttaataaaaacccaaaagggttaaggg

SEQ ID NO: 414460 - DNA, 478 bp, Homo Sapiens
aaaaaataaggtttattcaatcaaaatatgcctcaggagcctgaatagttttcttccaaccgaatattaaagggctaacttttataaaattcctcacttgttaggctgtataaattgttaacatcttccagatactttatctcgactggggaaagcagggttgtttctaaaaaaaccctccaaatgagagacggtggcccgtggaataaaggtccagtgactaaaatggacatgacaaaatttcatcgcccacgtctcttatctttgctttaaaaacttgtgacatgtgggggcgagtccttctctgtaaaagtgtaggttctggtgtgtaacccaaaggacattgtttttaaatcacattttcgtgcataatttaaatttctggataatatgctgctgccgtcattgtttcacttgggtgaaaataacggcaattatttatctctttcgcagatcaccacacaatcttcagaatttt

SEQ ID NO: 414461 - DNA, 184 bp, Homo Sapiens
  misc_feature (23)..(23): n is a, c, g, or t
  misc_feature (35)..(35): n is a, c, g, or t
ctgactttaaaaagaggattgcnacttgtcccaantaaaaataaatgaaaagctttttttcgtgttgaacatagctcccaaaatttcggcccacgattcaatgcccggtagggggtattttttgggcaaatcccctttttaaaaagggaaaattggcctcttttttattggacatctccaaggc

SEQ ID NO: 414462 - DNA, 423 bp, Homo Sapiens
cctaattgcatcaacagaatagaaatgggagttttcctgaattaatttttctatacactattggtacatagtcatactccatcctgcttcctaggaagctcacactccacctgcaccatcctcagatacttttcaccttgaaagggcttgaaaagaaaccagaatatttccatggaaaagtatgtaatctggaaatgaactgccacgcctcccgctaaccagatatagcgatcactgatgagacaagtggaacatgctacatgttttacagttccacagctctttcagcagagccagcaaatgagaggcttcacttcttaccacattagcagccatctaaacctatgtaacagtaagagatagtcgaagtacaatgctgttcagtaatgctgtaatgtcattggaaatcgcggttgctaaaat

SEQ ID NO: 414463 - DNA, 502 bp, Homo Sapiens
tttccaagtcttgatgatcatctacaagtttttctgcaaatgcagctcataacgatatctagttctctaaacatctaatagtttttctttatctcacaattttatcactggattctcagttctacattgaaaaccatgatgaggattaaatgaaaaagtgaatgaagaacccagaatattgccttgctataacagcacctcaataactttgctcttctcttgtcaactcatggattttaaagtggtctctctaactgaaacttccttgaagacagcctttgcctctgatttttccagctctcttttaataccatggcaatttacagaacataaggctgctgttaaataaacagttacaggagtaatgaagatacaacaagcctctttaaaatgaaggactgatttctctctacttattcagaaagaaaatatacttaaaaagaggcaataacctgtcatgaaagtgaattgctattgatataacttctagaaacttttatcc

SEQ ID NO: 414464 - DNA, 129 bp, Homo Sapiens
tttgttttttatgtttttcttccatcatcatagactttaaatatttaacataaaaaactgaatacccggctgataaaacctttatgaaaacatcataaccccacccttttggcgtttgacagtttattg

SEQ ID NO: 414465 - DNA, 283 bp, Homo Sapiens
  misc_feature (65)..(79): n is a, c, g, or t
  misc_feature (125)..(134): n is a, c, g, or t
  misc_feature (181)..(236): n is a, c, g, or t
atcttctttgtcttctctccgaagaaaaaacaaacaccttacccacgcccggcacccgacaaccnnnnnnnnnnnnnnnaaagcgggcccccgtcccatacccccccatgggaggccccaagccnnnnnnnnnntcccctgggagggcccggccagggacaaaaaaggcccccggtatttnnnnnnnnnnnnnnnnnnnnnnnnnnnnnnnnnnnnnnnnnnnnnnnnnnnnnnnnaaccaagccggaaaaaaacatgttggggcccccgaaaaaagggcccc

SEQ ID NO: 414466 - DNA, 449 bp, Homo Sapiens
ttattcagaccatatagaaacatgaacattcgtctctcatctacttgcaactatatctttacagatagatataaagacatatatacacccaagtaagacacaattatcacagaaagtattgtaaacattaatgttaatttgtggacatacattgatttgaaacaaatcctttactttaaatagctttgattttctgtctataagatgaaagagaacattaatagccatcactcatgaagtttacctagttggatgttagcgcttctaaaaatgaatcaatattcattacttttccacattgaaagattaaaggaataaataattttttgaaactgaaaatgaaattctcagaaatgtcaagaaaatctttagtgcagtctcattttaagaaaaattgaagacagatcataaaaaccatttgatattaaaaaggctattgttacataatg

SEQ ID NO: 414467 - DNA, 245 bp, Homo Sapiens
tttcatcataaaaacgttttattaatcaaatatatttacatttcttggtcaatgatctctaaatgtgtacctgttttttcatttaaatacaacttaatcctggtagattccatcacaagaatacagcagcatgcatgatctcattggtcctttgcagttattttttcattaaataatgtgagtttaataaagttagaaaactttattaacttttacccattcttactgtgggataatcattcttg

SEQ ID NO: 414468 - DNA, 283 bp, Homo Sapiens
caaggctcaaattcttgagataaaattctaaatataaaaaatttccttcatactaatctactttcttctacaaatttttttgatggacaattgtggcaattttaaagttaatgtttttcaaattaagtatgagtgtttttatttctctcataacttttaaaatgtaaacattatataggtcagccactgcctttacttccaagcaacttctccatggtgtcaattcccttttaaataaaatactatttttccagaaagcagttagcttttcatcattccttct

SEQ ID NO: 414469 - DNA, 341 bp, Homo Sapiens
agtggaaattcaaaacaaggaagagacctccatcccagcagctttatactatcttgtaagccttttggaatatgctgcatttcaaaagaaaactagaaaaaaatagaaagaatatatgttgatgcaaatcctctatagattttctcatagttttatattcactctagaaatgtgatcagcagtccatgaaatctctttagttagatgtttatagacagagatttgagaccaggttagtaccaaggttgtattagccccacttagttatcacaggtaagagagggaacaggaaagaagggtgggtaggaatttcacctccatggggctttggacaagaaagt

SEQ ID NO: 414470 - DNA, 501 bp, Homo Sapiens
tttttacaaaagaaaggagtttattggacttacagttcctcgtggctggggaggcctcacaatcatggaagaaggttaaaggcacatctcatatggtggcagacaagagaagagagcttgtgcaggaaaactcccccttacagtaaccatcagatctcatgagccttactcactatcacaagaatagcatgggaaagacctgcccccatgactcaattacctccaaccaggttcctttcacaacatatgggaattcaagatgagatttgggtggggacacagccaaaccctgtcatttacattgtcagtaaatgacagagttggattaagaatctaggcatctctgctctgctgcggatttgcagggggttcacgatatcaagttccctaattctgaagctacattcactttaaatagccagatgagtcaagtgtggaccagtctgaaattcagaagctctgaattcttctgagcactcccagcctgatttagtattctaa

SEQ ID NO: 414471 - DNA, 299 bp, Homo Sapiens
aaggatctgtgtgctcacctgaaggttaaaaacgatggaagacccaacagctggctgtcagacatagttacaggagtagtgagatttggggtgaattttacttttggagtgaattttactttctttttggcatttcagtattgcttaaattacgttttataatgaacgtgtataactaatgagaaatagatagtgtcttattctttgggaaagcaagacaacattgttctcgtcattgttcacacacagggaggctggtatagaatacaccagtctcacccttgaagacacagaaaacc

SEQ ID NO: 414472 - DNA, 460 bp, Homo Sapiens
ccacatataagtgagatcacgcaatatttttctttctgtgtctggcttatttcatttagcataatgtcttctaggtctatccatgttttggcaaatgacaggactgccttctttttaaaggctaaataatattctaattatctatctattgatctctctatatcacagtttctttatccatttgcccattgatgaacacctaggttgtgtctgtatcttgactattgtgaattgtgctgcaataaacttgggagtgcagagataatctcattccctttggggatatacccagaagagggattgctgggtcatatggtagttctatttttaatttacttaggaacctccatactgtcttccataatggctgcaccaatatataatacattcccactaacagcgtacaagtgctccctcttctccacaccctcaccaacacttgttagctcttgtctttttg

SEQ ID NO: 414473 - DNA, 354 bp, Homo Sapiens
  misc_feature (335)..(335): n is a, c, g, or t
agtggaatataataaaggtttatttcttcctcacatcacaatccaatgtggatcaaaggaaggctttttccaaacagtcattgtgattcacttcccttttacccaacagcttccatcatccccatgggccttggggtctctgcccagctatcaaggcaagaacaagagcatagaaggtcaagtagggcaacctagagtccatcacagccaacgccccagggctgggagatccacgccatgcccacccacctgcccagtgcaggggaaggagagatatgtacgccagccaagcaccacagggaaaggagacaggcctggtgtgcacgtgtgtgcancattctcactgccatacca

SEQ ID NO: 414474 - DNA, 413 bp, Homo Sapiens
ttaagcatgcgcagaggcatcttcgacatcaaaaagctcttacaacacacaaccttttgaagatttaagtgtaaatgaagcagaaacatatggattctattttccataaatcacatacggtcctaaaaaatcaaggagggtatgtgttttgcatgatgtattctgtttagttgaacccaaaacatctgaggcatacttggaggttgatgaatccaaaatatttacccatccctatttataacattgtgggggagcccttgatttatggtgacaactaaactgctcacatctgttgagtgggcaaccagcaaccagtgtgagcttcaaagataaccgtgttccttcttctgttctgactccaggcattcaagtcagccccagatcaaagacactgaagcctttacttgagctgg

SEQ ID NO: 414475 - DNA, 214 bp, Homo Sapiens
ggctgtaggactcctctgcgaaaaatctaacctcataagtgcctgcgtgggcgctcttgtggtacatgcttcaagacacctgataacagcccgcaatcctggcctcgagtgacagggaattgtatttaccgacgtctacataaaaagccatggtgtggaccctgaatttgcttgtcaaggagaactgcacaaggagaacgggtcttaacgaaat

SEQ ID NO: 414476 - DNA, 433 bp, Homo Sapiens
  misc_feature (378)..(378): n is a, c, g, or t
aatttttcacatcactatattttaaacatgattaggcaagtatatttttgttactaaaatagtaaatacattttactaagagtgaagtacattttgttactaaaaaggagaaaagttattcaaaatgataaatatggaattaataagctctcgcattagaagaaaataggaagaaagttagcaaagaaaggggtgaactgaaagcgtcaacatgcattcgtgaaagtctgggtgcagtttattctgatttactctgaggtgagctgaaatcaggaccgcaggctgggcgatgcatctgtgacaaggctggacagactcatgggtgcctgccccccctcctcctgcagcccctcccccagggcaggcctcctgtcctgngagccaggctgctggcatgtcacacaaaatcacgtgtgctgggttctgcacagag

SEQ ID NO: 414477 - DNA, 428 bp, Homo Sapiens
gcaaaaaaacaatgtccagtgagacactgttcttcttaggggattcttttcctcctttctccctatagcataatcaatgaaaacatagcagaaaccataacagagacaagtgagaggacagtggagaattttctctctacctctaatttcatcctcatttctgaaagggtatgctgacttgcaatcccgtggtgcctgcaggtgcagctgacaacgatgcttgcagtttccatgagccagggtgttttgtgctgaatgagatggaaatatgacagatgagggcctgatattctcttgcctagaaaatccgtgaggatagagggcccctttcttggcatgcagtgttcagaggaaaacatgaagattacatccatcagtgctaataacagtgaacatgtgagaatgatgtcaacgtttaattaaaaaca

SEQ ID NO: 414478 - DNA, 431 bp, Homo Sapiens
tacatgtgatacctttttttaatgtcttataattttagtttaaaaaaattttaatacacaataactgtacatatttatgggggtacatagtgatgttgcaatacatataacatatagtgattagggtaattagcatatctatcatctcaaaaacttatgtctttgttttgggaacatgcaatatccttcttctagctatttgaaactatacaatattgttaactatagtcatcctacagtgctacagaacactagaacttatacctcctatctagttgtaattgtgtattttacaactttgaagtaggtgtaattatccctatttagactatacctgtatgaaacagaaattattttcattttacagatgaggaaacagacgcagagaagtaatttgtccatagtccatagggttgtaagactcataacaa

SEQ ID NO: 414479 - DNA, 512 bp, Homo Sapiens
ttgggagaactttaacttatttaatttatagtgtttatagcccaagaagaaagaaccagaagatatatacatattttttctacaaataaagctgatcagtggcctcctttttcagggtagctgacacagttctcagcaccaccctacagctgcattttgggttcaacagacttttgtggctggcctgggaagcagatcaccatttataacattgtttctaagggagacacattccaagatccaaacaatgaatttagtaaagaatgcttggcttccaggctggatgagctggtctggctgtaccttgggggttggcctgaggctcccttcccctttggtccgcagacactgcagggttggggataggcacgtgagggggagaactctgagtagatagggaacctgcagccgggctgctcaagggcctctgtgtactgggggcgccaggaggtccagggatggaaaagggggaggtgagaaatggacaaagaaacttggccttcttggcattg

SEQ ID NO: 414480 - DNA, 430 bp, Homo Sapiens
tttcaagtggctaaatcagcgtttttttgcagaggtcagaagtgtgggagaaggtgggggctgtggggaaaaggggctggaataaggaggaatgtgcgatgcgactcaggattagaggccatgggaggggaagaggcagcgggccgggagtagcaggctggtccgtccacattccatcaggccctgggaaacttggatgccagcactccctcatggccctccacagaccccaccagggtctatgggaggatttgtgagcctggagtctccacccacccattagagaggagggggcttctggaagcttcatgagggctccaaatactggacactcagctatgttcacagaccaggaggaagtagactcgactcttgactagggacaccaggaggggagaggccaacgtctgtctcgttttcagttcctttc

SEQ ID NO: 414481 - DNA, 433 bp, Homo Sapiens
attttttgttagctgttgaagtgtttgagttctttgtatattcaggatattcaccccaaattggataagtagtttgcacagattttctctaatattgtaaattatcttttcactctattggttgtaccctttgctgcacagaaactttttagtttgctataatgccatttgtttatttttgtttctgttgcttgtgctttggatatcctattcataaaatcttttcccagactcatatcctgaagcatttcccccaaagaacttcttctagtaatttcatggtttcaggtcttaaatttaggtctttgatccactttaagttgacgtttgtattgggtgagagggtagggggtagtttcatccacttttcctagaactatttattgaagaaacggttctttctccaatgagtgttcttggtagttttgacaaa

SEQ ID NO: 414482 - DNA, 407 bp, Homo Sapiens
tttttttagcactagaaaatattttacttgtattgaatgtttgaaattaagtcatcaaggaggtggcaaatgctccaatttccattcaaaagttggtcagcaatacagtcaggacccatgatcacacgtcagcaatacagacaggcaggactcatgatcacacattagcaatacagacaggcaggactcatgatcacacgtcagcaatacagacaggaaggactcatgatcacatgttaacatgggcacttccaagagctgcttggcgtgccatggtttgtagggctacttgactgagaatgccctctggaaatgtttgtgaatccagttgaacaaagttgactaatgcagagatcctcaccaacctcgctactgttcctaagtaatccttgcaacaggatgatttt

SEQ ID NO: 414483 - DNA, 405 bp, Homo Sapiens
agctatttacaaaattttatttcagtatatttttcagaagcataattttacgtttcttcatattttactttgttaaagtccggaccagtcaaggtccttttcatgcaaagatgtacatttaatgaggacaaagaagccacccagtcacctggtgaagctctgctgctttgtgcccctttttgggtcaggtcgtccaggacatccaggtcttggtctttctcctcttttcttgattttcactgcctgggcccagcatcacttccaaagacctccgtttgtttgattttactgtatttaatctgcttcacagaatgttaccgacttggctgacctctgaagaatcccccggtactgccctatgtcaggcaccacagccagctgtgctaaattcgggcacctttagct

SEQ ID NO: 414484 - DNA, 332 bp, Homo Sapiens
agcccaaaaggtactttttgttgacagtagttatcacagaggagtgagactttatagttcttaaacacttttagtattatctgtgttatctgaccacccaacctattacttgtatttttagacagtaacttaaaaaacatcagttattcaaaagtaaactctatatatactgacataaacattttcccaaggtttattaagtatgaaaaaaagttatatagtgtgatgttatttataacagaataagatagcacgttcaatacacacacagatatgcacatataaagatttgtaaggaaaaccatcaaactggccacagtatatcactaata

SEQ ID NO: 414485 - DNA, 195 bp, Homo Sapiens
tccttgcctccttaaactccttcctcctttggtctctggaacaataagctttcctgggtcttactcctccctctctccactactttactcccttaccatcttcctcttttgattccccctcttcctctaaatctccaagcttctgtcaggagcccaacactcttctctttttactcaaatactgtgaagccattc

SEQ ID NO: 414486 - DNA, 208 bp, Homo Sapiens
  misc_feature (88)..(98): n is a, c, g, or t
accagaggagacgggtgccccccaagaacgcggcccccccgggaaaggcttccgccccgaaggccacccagaagagggggggaggcgnnnnnnnnnnnaagataacctgcttgccgcacgaggtgacaaacatggggcccaggatgtcttctgccaaccccgccccttcagggtctgatgccggggccacccacccatacactatgcc

SEQ ID NO: 414487 - DNA, 466 bp, Homo Sapiens
aataaaaatataattacacaacatttatataacattttcaaaaacgaaagttgaatgacaattttgaacgcaccaaaaatgacaaggagaattaatatcatttacaatcccatcgtgacctttcataaatgaaaatctcatctctgtgcagtgatcaatgactccccattccctcccagataaatggcaagtactttagcctgtagtgcttatatccctgtctccttcctagcttcatatcctattctccccaaacttgcaacctaacatctgaccaggacttgaaatatcctgaatacacgtgctatttcttctgcctgaaatacaatcttctacctttgtctggctagcatactcttgttcgccctttattcccctttctgtttcaacatgaaggtatttttgttaaggcttttctctcacactattaggttatctcctctgcaatgccatcaacagttgagag

SEQ ID NO: 414488 - DNA, 258 bp, Homo Sapiens
aagacttcagtgtacatttattgagtctgacatttttctctcacctgatagagacacctgcctgggctgagtgaggtgggcagtggcctgagagtgggaagggaagagacttgggagggaggtggtgctgttgctgttccttgcttccaattttcccctaggccacagggctctggccaagacagcagctttaaccctggttttaagggctggatggggagcttgggtgggagaggacagtgggagaagtgggaattg

SEQ ID NO: 414489 - DNA, 363 bp, Homo Sapiens
  misc_feature (308)..(322): n is a, c, g, or t
gattaagcacagagtttatttgaacacaaagcatgaggatagccacctggaaacatcaactccaaatgaatgggatcagcgttcccttaggtttcacacacacggaaagacagagaagctttagaagaatcaccacattttccattcaagaccagtacatagggtgcagcaaggtgattggttatggattgatatacttcaaggaaggttactttatcactcaatataaagggacaatgatcccaggaggtcttatctctggggctgcttagtctttttaattatttacaggaaaattctctctctcnnnnnnnnnnnnnnnggacgtagtcttgctctctcacccaggctggactccatctc

SEQ ID NO: 414490 - DNA, 395 bp, Homo Sapiens
agctcatttaattcccacaattcctccatgaaggaggcatggttattacctgtgattttattatacgatttagagatgttcagtagtttgcctaactcagcctgtaagtgttgaagcaggatctgaacccaggagtctgtccccagagtcagcactaaaacacctgccaagtagaggtaaagacacatcaggtgaggggaatatcacaagcgagtgaagagagtcaagtgtgtctaggaagcagcaggcaccaaacgtaaaggctcctgcagactggcacctgctgggcatccgaatttcctcttcagcatttttaatccttctgacacccaacatcaagaaactcctgcacatttcccagaggacacgactgaaggtcagctggtgggtggtac

SEQ ID NO: 414491 - DNA, 235 bp, Homo Sapiens
taaaatcaaatgatttattgttatttataaaatatttattatgctcaatatacatatttcctttcagatgttaacatattgtttgatagccatcattaacacagtacttagcactaaaattgtacataataggagccactgcctcacagccagcccacaaatttcctacagttttcctgtcgatcagttatttcctttgattcattctgtacattcctgaaaaacatctgtatgg

SEQ ID NO: 414492 - DNA, 128 bp, Homo Sapiens
  misc_feature (58)..(58): n is a, c, g, or t
tgaatcaccgcgcgcagcccagaagccagcctttctttggttctggaagcaacagcanaaccatgactttggtggtggagactggtctttgttcagatgaatgtcaccaccctggacactaggccggg

SEQ ID NO: 414493 - DNA, 235 bp, Homo Sapiens
  misc_feature (99)..(100): n is a, c, g, or t
  misc_feature (157)..(157): n is a, c, g, or t
  misc_feature (205)..(205): n is a, c, g, or t
  misc_feature (225)..(225): n is a, c, g, or t
aacaaattaaagtttccacggcaagtttgttttctaaatgccaaatttcaaaacaaatgctagcttctcgtgtttaaatgcctttactgatctctctgnnatgcagttcgtaagttttcttgtggtgacgcatgcgatttataagtaaacctaggcnatcaatgttgtcagtgctatctgccttaaccgtgcgctcgtgaatcanatatgactgtggcaaatagngtccagcgcg

SEQ ID NO: 414494 - DNA, 213 bp, Homo Sapiens
tttcctggccaaactcccaaaagccaaacatgtcacggaatgactgatattgcccttgactgaaaaaaacctttatctctcagcaagcagaaatcgggacatctggattctagacccaatttggccgtgacctaggctgggtgattttggggattcctctcatctctctgttgttggtctctgttctgaaaactggtggggtggggttgggcg

SEQ ID NO: 414495 - DNA, 136 bp, Homo Sapiens
acgcagcctcagaggcttgtgtcatcgcattggtccgcaccatatctggcttgcacacgaaagcttctaagttgtcttcaatgttctccttgtttatgtctacttcataccatgtatctcctgggtgtgttctagc

SEQ ID NO: 414496 - DNA, 448 bp, Homo Sapiens
ttatatatttaacactagaagacgtttacatcagactgcaaaatgaaagttaaaacacagaatgtacgatgagatccctttctgcccacacactcatacaaacgtctatacaggcttaaaaaaaggcctgaaaacactaaaacgtaacagtggttagattatggaaacgttttttctccttgtactttctgaattaaaaatattcagaatatgcatatattacttccataataaaggagaaaagttatattaaaaaccaaataatcatacaaaattaaaaagtatacaaatacttttaatgactcccaattatctagaatacatggctcagcatggatctctcagggtccccaatctttagattcaacaatcatgtcacggttctccagtcttttcctcttctacctttagctgccaaattaatcctcctaaaacaccgtgagtttct

SEQ ID NO: 414497 - DNA, 258 bp, Homo Sapiens
caaatacagatacagaagtctgcgtgttttgcaaatattgcttcaaagcaacatttctatatacagcgccttctgttctaatagcgcgtaaacatagatatgtatccacagtgcaatgttggctcatcaaggatccaccttgcatacacttaccacttaaagaaacaaaatgattagtcaaaccggaactatttttgtcaaggtaattttttataggtggatagtttttctaaagacaaaacttaggtagtgcacata

SEQ ID NO: 414498 - DNA, 286 bp, Homo Sapiens
gatacttaagatttcagcaaaacttaaacaaacatgtgcaaacaagcagtacatttagaatgatacttaagatttcagcaaaacttaaacaaacatgtgcaaacaagcagtacatttaaataaaaactttcagatgaaatagggataatcctaaatatatgctatagtaattcagaagaaaagcctataagaaccctagtaactttcatggcagatgtgggagaactagacaggagtttttcccacttatctctgagtatggctgacatgaaaaaagctatcatgt

SEQ ID NO: 414499 - DNA, 244 bp, Homo Sapiens
  misc_feature (77)..(77): n is a, c, g, or t
taatgacaattttctggcacaaggctttggccccaaaaccaaggaggggcttagaaagtggcgggcccgggcccagngctgaagcagggggcggcactccatgggcagtaatgtacttcttgtaacccttacgattgatctttgaggctctaccagtggcgtgaggtatgtctgtatcagggatcctgggtaaggctgaactatttgttacttgacagatcatgcctacatgtggttttggtgg

SEQ ID NO: 414500 - DNA, 301 bp, Homo Sapiens
  misc_feature (94)..(94): n is a, c, g, or t
ccgaattaccttcatccttatgtagataagagtactgcagagctcgaaaagcagagattcgcttatatgaattaaaactcatcatttccaacancaactatactcccaactcctccatctcatataccaccgactacactagacgagaccctctatagaaaaatgctccacatgacagggatacatctcaaagcccatcatcctctgaagacaggccaatgcagtcaaagattttgcccaactgatcgagctcagaatttccacagaagagaaactttggacgaaacatctgtgcagagat

SEQ ID NO: 414501 - DNA, 300 bp, Homo Sapiens
ctagtttcattatgtctcttgtactataacctgggtctgaaatgaagcacttctccagggacaactcataattttgcctgttggaaatgctgtcaaggtcagttagaaaacaaacctaaaagaaaagaaattgtactcagagaaagaaggacttataaccttctgcagggtagccccataaaggttcctacaaaatagatgacaaatacctacaaagacacttcctggactgacgactaagcaaaccttcttaaatgagaattctctcctttctgcaaaggttctggtggtggcttgggg

SEQ ID NO: 414502 - DNA, 507 bp, Homo Sapiens
  misc_feature (457)..(457): n is a, c, g, or t
aggaaaaattctggcatcagagctggcttgagccctaagatggccagttatttttatttttcaacagctttctgtgttgtaaattaaaagtaatgttcacttttagtcagtaggtttttctttagcctaaattacagtcttttaattaaaagtattagcatgccttccttaaaattattactagttagtgacttcagttataagaaattttatgtaattatttctatgacacactagtcttgtggatggcctcattttacaaaagaaatacaaaaggcaaaagcgggacctcagtggccaggatgtacagaaacagacatgcccagcctgtcgatgcaaattcttttctctaggtggcactggggtacgattgtattctaggagctatatcttatattattaataatcaggtacatgagcggcggggggtgggctgaacatggcgcttatttacaanttgaaaagaccaaaactgatatcaactgactagatattgcgcttgccctc

SEQ ID NO: 414503 - DNA, 369 bp, Homo Sapiens
aagttagagccaattgatttaatgtaatatgacacagtcattgaaatgctaataaaaacaatagcaacacagaaaccacttgtgatgtaacattaagtggagcagctggctaggccttcttggataatatcccgccctgaattctttaacactactggtaatttagggtcaaactgtgttctgttctgaccataaagttttctacattgtatgtaaaatgttgtctcagatccaaagtgaatttcttaatagcaaatctcatttattactaatcatttctttaatttagcatactcatttacagctcaaatttcacctaagctcctctcttaaacctccttccacaacttaattatctctaagccaaag

SEQ ID NO: 414504 - DNA, 354 bp, Homo Sapiens
gacttgtttggtggtgtattagggtcctctagagggacagaactaatagatgtatatatgaaggggagtttcttaggaaaattgactcacacaatcacaaggtgaagtcccacagtctgcaagctgagaagccaggaagccagtctgagtcccaaaacctcaaaagcagacaagcagatggtgcagcccttcagtctgtggctgaaggcctgatagtccctggcaaatcactggtggaagtccaagagtccaaaagctgaagaacttggagtctgatgttcaatggcagaagacatgcagcacaggagaaagacggaggccataagacttagccagtgtagtccctccaccttc

SEQ ID NO: 414505 - DNA, 274 bp, Homo Sapiens
aaagactcttgatcatcaactgtctcttcgcaaagcaagtccaccacttgctggggttatcattatgagggcccataactctctcacataggctcagtgcagtctcttgccttaactggagtgaataggctctcataacctcatcttcctgcttgtaagccggcttggcataaattgcgctaagtggaagaccatgctctgctagactgggaaatcagtgattaccagcgatacataaatttctcacatcggcttgagatagctgcctgttgca

SEQ ID NO: 414506 - DNA, 421 bp, Homo Sapiens
tggctttcaaatttttattgtgacccacaatatgaaatacattatggaacagacacatagaacacttagacacaaataaactaagtatgtttcacaaaaacattacgtactttactattatattgcactctgatatttttctacttgacattattatagcctcttctatgctattcaattttaaagaaatgctattagagagctgctaaatttgttttatgacctacagttttaaaaaaatctgactgtaaagaaactaaactaaggggaaaatcaataaaaagtgaggtaaggtctcaattaacagatggtttcattacaaagtatgcaacagatatgtttatatattgttattggtagacttgatgcaatgtaatgtcacaacatcccaaacatcttataccgttacacctccatgcct

SEQ ID NO: 414507 - DNA, 1363 bp, Homo Sapiens
tggtacggcccggaatttcgggatatcgtcgacccacgcgtctgctaggcggctggcggcggcggcggctcctcagatgtcctggctcagtgctccgtgctgctggctccagcccgctgatgccccaattcctgatgaccacttgcgctggtgccgttctgcgcctgtgtggctatcctgcaactgtgtgtgtgctgtgcctgtggacttcatgctgcagcccctcaccatcatcacgtggtccatgcttggcatgcaatggcatgcattggctgccactgtgcccaggagacctgatccaggccatcaattggtgatgatgcacatgatgctcatgacacacctgtgaggcacaagaacctgcatcaatggtgctgccacgatcacctcacactgtctgtgagcagtgcctgagtgtgcaggatgctggcccagttgccccatgatgacagcaatggctcaggcaacacagtgatccacatacgatcctgagatccaaggacggcatgcccaacaaccatgcatgtgcggccctcagtgcaccgggactggtgcccagaagatgcgcatgaccaaagcctgggatctccatatggacaaacccacatcgctttccagtacccctcacaatggcagcagcgaggccacccttgcagcccagattgagcaccctgcaatagatgacatccaaaccacacagacggctgaaccaagccagagggactccccgcgagacccgggactgcagaagtccgaacctggggcatccgaagggtgaacaggatgctgcgggacgccaagacaagaagaccgtggacagagagaagcacaaaagcaggatccaaggcatcactacccagatacatatgcaagggaacattgtaacaaaggccagagccaagcgacagcgagaatagcagcccggcagccatcagcagacacccagggacacctacaaagcccacgggcaaagccagtacaaggcagagcacacacgaacgagcaagacatgaacacgagcatagcccacaaaagacagccgcacgtagcaaccaacgtcgaattgatgatggaccccaattgctatcagtggccagagagacaacggtcataccaacatacccagacagaaatcactgagtcacaggtacatggtgccattaaaccactaacaatcttagaactcaactaactaacaaataggtaaatcttagtataagcaccgaacaagagctataacaacatcacttcaataacatttatcgctatactcatacaacaagacactatatagatatatcactctcaaatacatcaagcctaatatgaatctcacatgcccttcgtcacaacagcaaacgaa

SEQ ID NO: 414508 - DNA, 964 bp, Homo Sapiens
ctgtaccggcccggagttacgggatatcgtcgaccacgcgtccggggtagaaggaccactcgaaaaacgagagtgtgctgcaagcatgaggcttctccctctcccatctcagccttggctgccatagctaaggaggagggtgttattttgctttgtggacgttcaccctgggaaataaggtatccgcccccaaatcggtgaacggcgccctgaaccccgcctctgttgcgtttgttgcgaccgtcccagtcgacttgctacttgtcggcagatcgcccattctctgaagagaccttggcaactgtggactattctgtgaccgcgcagtacgacgcaggactactccacagagaacacgttctaacaccgaagccgtgcggcgccactgatgtaccgacaccatcatcccatcaccagggcaggcaccatggcagaaatcccacaggctccccagacgaagggactcgccgcagcgcgtagagcaagccgggccttattgacacatacgatgagaccaatccacaggccatgcccgcgacaaagcaacgatacacatgcccgctcttgcaaccactacccacgatcctgcaccacggacctcacacgcaacaccatgccaaccactcctaaaccacctctcgccaccgcaccctcaacaccgacaccgccctcaccccacgccgacccagcaccacccccgccgacatgccggggcaacagagacccgacgacacctcccgcaccgctggacagcagtacaccgccccacgtgtgcccccaaccgacaccgccccccccattcgctggcgacgacccactgagtgccatcactcggcactacgaccagacaccgtgtgcaccacggcttgccacgcctgaaccaacacagcattggcaactcatacatcacactggcagaccccattcacgccgccttgccgcaccacacgcccccgctctctct

SEQ ID NO: 414509 - DNA, 1111 bp, Homo Sapiens
ttgattgaacagtggtcaaaaaagcaggcggacggccggaatcccgggatatcgtcgacccaccgcgtcgccaaccctcctactcctcatgtacccatgctaatcgcgatggcattccgtaactgcttaccgaacgaagaaatatctaggctatatacaactacgcgaaaggccccagacggttgtgggcccctacgggctactacaacgccttcgcatgacgccataaaactcttcacgcaaagagccgccgtaaaacccgccactagtctaccatgctacgcctctacatcaccgccccgacctgtagctgcgttcaccatgcgctcttctactatggaaccccctcgtaccgcgaatacccaaagccacgtggtcaatcaatcaaattaggagctgccatgatatagtactaagaccagctgcagagcactaagggcgtcgtggcaagaagggctctgctgaatcgaggggtgagctctgaacactcgaaaggtagcacctgaatcgtgacggactgacgtacgcggcttggcacaccactaactactagcatatgcccagttcatgccctgattcgcaatgcatttactagcgtgaataccagaccatgttactgaaattacagggggttccacatatttgatcgtcgtccaacgctttaatggactaagagcaagagagcaccttctgaagtaagtgcctgcctttcagtgaaggccggcgtgccataatgatggatgaaatcttccagactgggcggaaaaaccgggcgcgaccacgcgtacgaaccatggccgaaaggggtaggtccggaacaaggtctcgggcacgggacatcggagtacgccaggagcgcaccctcgatgcagacactcgcgtagccgagaaccgggaagcacttatcatggtaagagaaccgcgccacgtaacagagcttctggggccaatgaggacgcaccgcccggaggcaaaggagcatgtggggtgccaagagcacaagacaagggggcgagcccaggaatcgggcaatgacccgctccggcggaaacacgaaaactccagaaaagcagcggcgccccagagtaaagtgcaacagagaacagaccaa

SEQ ID NO: 414510 - DNA, 979 bp, Homo Sapiens
  misc_feature (269)..(282): n is a, c, g, or t
tgattacaagttatttgtatattggatggtggcatatttgagtgatgccgtcgctctttgttgttatattagaggtggtgtgagtgagagagttgtaggaagagagtgtaaagatttttgtccttttgttggttcttctcttgtgaaggtgcgggcgccgtggtgcgtctctgttgcggcggatgctcgctgccctcctcgaggcttctctgctcctcttgtcctcttctccgtcgcctccgcctcgcgcccgccctcccgctgcgctnnnnnnnnnnnnnntctactctttcctctctcttggcctttcggtgcgtcgcgtctctcccttccctcacgcacctcgacgactctctgtggccgcagtgcggtgcccgctccgccccctctcctcttctcttctcggttctcagtcttatctgtcgcgtagtatcaaggagcgcggcgcgccgccccctcgcccctccctctctttatcgtgtacgtatacgcccctccgtctacttcgcgcccgtcgccgccggcccgcctttcgaagcactactcaccctccatccacctggcctccaccactcacaccccagcacactagcaccgcaggcgagaacgccgcaacgaaccactcatacaccccagcactcgactaaccacgcaaagtcgaactatgtcgctctacgcacagcactgcgagagcagggaatcagagactgccacactcactcgtaaacacctgctccgctcgagtccatgaccatcagctccttactcactgcgcgacgctaatactataaactatgatgtgacacattctggagatcgattgcttgtgctgatagtacgagcgaacggagaacatacacgacactacccaatacaaacgcatcacacccccacgaacaccagaagaatgactagacgagcacaagacgcacaacatgcagaagcagtaatgacgaccacgcaacacaatcctagacaa

SEQ ID NO: 414511 - DNA, 1098 bp, Homo Sapiens
  misc_feature (545)..(545): n is a, c, g, or t
accgggatatcgtcgaccacgcgtcgaataaataggatattaaattcaactggggtattagattataaattagttctgtaataggcgtcataatgttatttaggttttcagtttacacagaccttgtagcaactccccagagctatgctacagaattagaagtagatggaagttgatgtaagaaaattggtttttgtaatatgctgatgccagtagagttgtgctgtgtgtaaacgtatttaaatagcacgctcctacttacttgattgtacagacaaaagattgataataatttcaaatgattgatttgttggtgctgatattggccatatgtgaaactaaaatatttctttccaaaattgaagcagtacttcctgtgtgagggctaagaatccgggttgtagaaagcataagactatcctctgaatagatgtttctttttcatctgattggtgtaacagtggtatcacaaatatttcttagcggcaaagtttcttggtccttttagttatatttcacatggaggaagatactctaaccagaanacctgtgtggttattgaagtcattagcaaggaggggtataagcttagtggaatcattaaccatggggagccacaaatggggaaacatggcgcttttatttaaaaacattgggcatttggcaggtggaggggcacaaagacgcgttaacacggggccacgtggggtcacaagacgacatggcgcccacggggggggcccctctaaactctcctaagacacgggggtcgccacacacatctgcgcacaacaacaacactcacggcgcccacccgctgtaaacaccagcacacaacacacctcaccgctgcacaacaaggcggaggcacacaccaaacaggagaaatagcgtcacttcaactactcaaaccaaacatacatcaactactccgagcctaaagaatacaaacctgcacacgacccaccgccacttaccatacctccaacacgtactcctgccccactcaccaccaacctacgacacacatcccaaccccaacccatacctctaccatcaaagcgaccagatgcatcaccacatcatctctcaacacgt

SEQ ID NO: 414512 - DNA, 1354 bp, Homo Sapiens
  misc_feature (44)..(170): n is a, c, g, or t
  misc_feature (325)..(384): n is a, c, g, or t
  misc_feature (1128)..(1299): n is a, c, g, or t
gctggtccggtcggaattccgggatatgtcgacccacgcgtcgnnnnnnnnnnnnnnnnnnnnnnnnnnnnnnnnnnnnnnnnnnnnnnnnnnnnnnnnnnnnnnnnnnnnnnnnnnnnnnnnnnnnnnnnnnnnnnnnnnnnnnnnnnnnnnnnnnnnnnnnnnnnnnntagaaaagtatgtaataagaactacataaataataaatataatattatgtataaataagatatgatcatagaggaaagaagaattatgaatggagagtttagtgtattgtcgtgagtatctacctgttatatccttcgagtaccggcaggccgannnnnnnnnnnnnnnnnnnnnnnnnnnnnnnnnnnnnnnnnnnnnnnnnnnnnnnnnnnngtatcggcgtccttctccccggccacgaccagcccacaggggatagcgctcactcttcctatacccgagcagagaagagagacccacagcgggaggtcggcccacttacatgctcgcgaggagcgacctaataacctgtgacactacgccacccctacccccgctaatactgcgtctagtatttcgtctcctgctggttatgctatgtgtgtctgtgcgtttctttcttttttatgtttatcttctttctggtgctttgtgtgcatctggggttggggcccgtgtcggcgcacgtggagatggggcgcccgcagatgtgtgtgtgtctgtctggccgttcgtcgtccacggtgaccgcgtattagtacgggtagtgggtgacggtgccggctggggcgtgccccgggtggaagggggtgatattctactctctccccatcctcaccctacctattattctcatctccaattatcatcactatcacctctcgtaaatcaccaaaaacacaacctcattacctaaatatccatcctcacctccccttcccaatacacgactacttcctcttattcaaaacaaacactcacctcccactcccgacccctcctctctctttataaacaccacaaagaaatcaacatgagtcgggtcttgcgtattgaggggtgatcggagtttgtctctttgtaattgtctagctggtgtaagcggcgtttgtgatattgttaggtttggtgttctgnnnnnnnnnnnnnnnnnnnnnnnnnnnnnnnnnnnnnnnnnnnnnnnnnnnnnnnnnnnnnnnnnnnnnnnnnnnnnnnnnnnnnnnnnnnnnnnnnnnnnnnnnnnnnnnnnnnnnnnnnnnnnnnnnnnnnnnnnnnnnnnnnnnnnnnnnnnnnnnnnnnnnnnnnnnngatgtgggtagggtgtggcggatggggaggtgatgcgggtgtgtgttggcggatg

SEQ ID NO: 414513 - DNA, 312 bp, Homo Sapiens
ggaccaccccccaaaaccggggcccgttcccggatggaaaaggtttagctacctaatttttgccgacagacatggatggtgttccttcctctctatttgaattacttggcctcacagtacttgagaacttccatttcagtaaaaagttatgcatacctaaataatccaggcaacatgctaggtcaatgtgacttactaagtttgacctttgtatattttcttcctatttctgtatgtacatttctgcatgaaattcccacttgttttctttaatatattattcattggatgaataaaagttcccaccaagat

SEQ ID NO: 414514 - DNA, 117 bp, Homo Sapiens
taactcttgggtgcagagatcgttatttctgcactatcaaatcttaaagatgtgaaatagctttcatcacagctccaaaaatagagcaccaaaaatggaactaatgagaccgtaggc

SEQ ID NO: 414515 - DNA, 845 bp, Homo Sapiens
  misc_feature (97)..(179): n is a, c, g, or t
  misc_feature (697)..(697): n is a, c, g, or t
tcaactgggtaagcggcttgtcggtcggaatcccgggatatcgtcgaccacgcgtcggtccgcggaaattcggttctgagcgtcgccggactccgcnnnnnnnnnnnnnnnnnnnnnnnnnnnnnnnnnnnnnnnnnnnnnnnnnnnnnnnnnnnnnnnnnnnnnnnnnnnnnnnnnnnacgttcgtggcgggggaggctgttggggacgttcgtggcgggggaggctgttgggtcccctccccgccccaccgcgtccaggaaccccggcaggcacccagtgaggggggcccgggcgtacgccattcctcactgctgtccccgctgtgcccgaaaccccgttcacgttcaccgagaaaacagacataaacacagcaggcacatccactagaatggctgtgatttcagaaaagcggacgtaagtgctgccgaggagatggaggcgttggaccccctcgcgcattgtcggggcgggtgcagtcgcggtgcaaaaggaccttcctcagaaagttgagcacgaagttcccacaggcccggaagttcccctcccgggcgctccccagagagctgaagactgggcgcgtgccggggcaaatgttcacagcaaagggcggcccagtgcgcagctggaacatcagccccaggcgggtcgctgcgacagggacgagcctgggaaacgtgaaaaatgccagaacagnggaatccacagatacagaaaagactcgtggttgccaaagctcggggagggggccaacacggaccgacggttaacggtatgttcccttcaggggaggacgtgttctggacaaggggagtccaggtgcggacagatgaaggcaagcccgg

SEQ ID NO: 414516 - DNA, 974 bp, Homo Sapiens
  misc_feature (402)..(713): n is a, c, g, or t
cccaggttgtcaaaagcaggtggtacggccggaatcccgggatatcgtcgacccacgcgtccgtaaagacatacctgagactgagaaatttaccaaataaagaggtgtactggacttacagttccacatggctggggaggcctcacaatcatggtggaaggcaagaaggagcaagtcatgtcttacatggatggcagctggcaaagagaaagcttgtacagggagactcccgttttgaaaaccatcagatcttgtgagactcattcactattacaagaacagtgcaggaaagatgcacccctgtacttcaatcacctcccagcaggttcctcccacgacatgtgggaatgtgggagttacaattcaagatgagattggttggggacacagccaaaccatatnnnnnnnnnnnnnnnnnnnnnnnnnnnnnnnnnnnnnnnnnnnnnnnnnnnnnnnnnnnnnnnnnnnnnnnnnnnnnnnnnnnnnnnnnnnnnnnnnnnnnnnnnnnnnnnnnnnnnnnnnnnnnnnnnnnnnnnnnnnnnnnnnnnnnnnnnnnnnnnnnnnnnnnnnnnnnnnnnnnnnnnnnnnnnnnnnnnnnnnnnnnnnnnnnnnnnnnnnnnnnnnnnnnnnnnnnnnnnnnnnnnnnnnnnnnnnnnnnnnnnnnnnnnnnnnnnnnnnnnnnnnnnnnnnnnnnnnnnnnnnnnnnnnnnnnnctggagaacagtggatgggagacgggtgaattactgtatactcatgagggatattagtccatagttcttttttcctttaacaattttgggttggtatagttgactgattggaatcgggaatatagtcataaatgatgggagcgttctctgttctaaagatatggatggcttttttaatggtgaaatttataaacctttgtggaaaaaagaaaaggggggaaaatcagggaaagacatttgaagggtagggaaagggggaaa

SEQ ID NO: 414517 - DNA, 1027 bp, Homo Sapiens
acaacgaaaaaacaagaaccaaatgagtaacccttgttaaaagcaggctgtaccggtctggcattccgggatatcgtcgaccacgcgtacgcccacgcgtcgggctgggaggctgccccagcgctgctacccacgcagagccagggctggcttcgctgggggctggtgtggctgtgccgagccccgtggctgcagctcgtaaggggagccctgtggctgctgggagctgctgggctgcgtgtgccctgtgtgtgtggtgatgcccatgtggggcttgtaccacaactggactgctggtggcaaccgttgctggcgcccagtgacctcccacgcatgagctgctcagcctgatccaagagtctcccatgatccatgacctggcctgcagctgaccccctgttacccacgtaaacaatgacggttgtcccctatccttgcacgcaaggggtcctgacggcgcgtttcccttcggacggttcaccacattggccaccgttggccccccatcacgcagggtggtgggattgggaggtgttgaaagccccttgttagtcagggccatgcggggacttggaggaattccacacgattatccttaccccttcacgttaccgcatcgaacgacagtggggttggccccccattcccattgggcttgggagcccccacagggacgactggtgaccgcacacgccggcgtccggagcgagaagaaagagcgataaacagagttgacgcgtccccttccttcgttcgtattacaacattccgacgagccgacacgccattcacgagggaagggccgtgaacacaatgtggcttgttaccggagagggaccaagagcgacccccatggtgccacacggccaggtactcccgatacacggcacgttaacgttacacaccccgagccccaattgtgacaggtggctggtgcaaaccggcaagaccagtgtgggccaaccgcgcagcggctgaccccgcgcgagtatcacgcgccaccatacagcttcctgtggcatcaacg

SEQ ID NO: 414518 - DNA, 962 bp, Homo Sapiens
  misc_feature (43)..(43): n is a, c, g, or t
ttaaaaaggacaatttgactaagagacgtgttgaaaaagcagngcggtacggtccggaattcccgggatatcgtcgacccacgcgtccgccaatataacagatatgaggtgatatatctcattgtgttttaatttgcatttatttgatgatttgaaataataaggtttttttcatatatctgttggtcatttgtgtgtcttcttttaagaaatctctattcaagtcttttgcccattatttaatagggttatttgttttcttgttattgagaagttagagtcccttgaatattttggatattcaccctttatctaatataacatttccaaatatttttctcttcattcttagattgtctcttcattctactaattgttctctttgctgtatagaagctttttttagtttgatgcaaccctatttgtctgttttttctttctttgccaatgcttttgaaaacatattcacaaaatccctgaccagaccagtgtcatggtgtttttcccctagatttttcttctagtagttttatagtttcaagtcttaaatttaggtctttaatacattgtgggttgattcttacataacaaggggagattttcattcttctctatgtgaatattagttttcccaacatcattctattaccagtaatgtccttttcagaacaaaacaaacaaagaggggggcggctaaaaatatccctcgagggccaagttacggcgtcccggtttcttggcaaggggcccatagggaggcgattaaaaggcaggacggggccgcgttaacaagtcgcggggcgacaggcgctggcgactggggaagaccaactcgggtggcgcatggcacacccacgaattaggtacggatcacccagtcagggacacgtcgcgcgatgtcgttatactcactgacggcataatagtagataatagaatcgcattaacaaaaaggaaaagaa

SEQ ID NO: 414519 - DNA, 919 bp, Homo Sapiens
  misc_feature (319)..(439): n is a, c, g, or t
gtatgaacgtcgtcaaaagcggcggtacggtccggaagttccgggatatcgtcgacccacgcgtcgcaaaaaagtccaaagtttttaaaaactgaaacatttataaagtaaaaacttaacagtaagctaagtttaatatattattaaagaaaaaaaattgtttttgagatgggatctcgcttgtgcccagatgggagtgcaaggcactaccatggctcactgcaccttcaacctcctggctcaaatgatcctctcacctcagcctcccagtcctcagctgggactgcaggtgtgcgccaccatgcctggctaattttgnnnnnnnnnnnnnnnnnnnnnnnnnnnnnnnnnnnnnnnnnnnnnnnnnnnnnnnnnnnnnnnnnnnnnnnnnnnnnnnnnnnnnnnnnnnnnnnnnnnnnnnnnnnnnnnnnnnnnnnnncagccaagaaaaattgttttaaatttagtgtagcctaagtgttcagtgtttataaagtttataaagtctccagtagtgtacaataatgtcctaggccctcacattcactcatcattcacctccgactcacccagagcaacttccagtcctgtaagccccattcatggttaagtgccctatacaggtgtaccagttttggccttttatacgtgtgttttttattgtaccttctctatgtttagatatagtttcagatactcaaaatacttagcactgtgttataaactggcctacagtattccagtacagtaaacctgcttgtacaggtttgtgggcttaaaaagtaatagggtatatcatatagactatgcttagttagtatgttacaccatctaggtgtttagcgttacaccattcccggttctggagtacattccgggggtccccacggcaggtttctctgaacttttcgggctggga

SEQ ID NO: 414520 - DNA, 924 bp, Homo Sapiens
ttaccggggtaaaagcaggcggtacggccggaattccgggatatcgtcgacagaccgttcatcccttcatcgacgaccggcgtagtcacgaatattcctgataggactggctatgggatcgggtctttcagactgttcgccatcataaacccgcgatcttgaataaatgcgtggagttgactggctctttcaggcgcgaaagaatggaaaaacgtgacaggtttcgagcgtgccaggggcgcatggggcgtgagtctaattcacgtgtgattaagcaatttctcgtagatttgatctcttcggaaatgcgcaagcaatacggcaccttcacgatgtaaacacgatcgaggaaggcttcgtggtgttggttgattacggaaagtgacccattcggactcgttcgagtgtgcgagaataatcccgttgaacggcagggcggagataccttccgtcccgtggtagttaccttcctgagtggcggttaacaagggatgcagcactttaactcggtgctttaaacatctcaacgaattccatgatcccctgattggcgcggcacagcgcaccggaatagccgtaggcgtcgggtcattctgcgcgtagtgtcgagttacgaatatcgatttcacaaacagcgcggagatgtcctggtgtgttctcatcgccgggttcccgtttgtggcgatagcaattgtggcagaatgacggcagaccttgcagtacccggaaactaagtgatatcggcagcaaatcatgcagggtaagccgcccaggagacatgaggtgcgagaaaacgggaggatggcctagtccttcagaacctggcattacctgggatggaaggagacggataacgggaaggaaagcacgacggcaaaataacggcagcgaaagaagaggccaaggaagtcacacaagcaatag

SEQ ID NO: 414521 - DNA, 791 bp, Homo Sapiens
ccctcagttgccatgaagtgagtggtgacgtgtggtgtgaagcaggtgtctgctgtcttgagaaactccccttgagatgcatagtgacctccgaggagacagtcatgtcacagcatgaacgtgcatgatgccccccattaacccagcagccacctgcggtaagcgagccgcaaaggcactgcaactgaccctgaggtgggcagtcacatgagtggcacggtatcacctctggttctcttgcccaaacttgcatggcctgaatgtaatcccaaaggcagaccagacaagacaacgagaaccccaaaaccgtaggaagcccatccgtgcgaaagagtggactcattggccagacgacaggggccacaaggagtaccatggtaagcatgtgtcaattgagggagaaactggagatactaaccaacaaactgtccctaatgaacagtgaagcactcttgatgaagatctagaacatttaattttgacaagctgcgagaaaaacaacacataatgcgctgctaatgaacacatactagatcggaaatggaattgagaaccgacattctccgttgtccaaaggatactactctcaaaagaaagagtgaccaaaaaagggcagtgaatgtcctggcacatgaacagggcttacagcaggtcacaacgggacagagaaagacggaatacacatcatagaagccatggtgatgacaacacgacgtcctgaacacgatacgtgtatatcacagatggccttagagaaatctggacagagcatgaagggtggccacaaacca

SEQ ID NO: 414522 - DNA, 994 bp, Homo Sapiens
tacccggtccggaatctcgggatatcgtcgacccacgcgtccgatgtttgcaccttttagctgtttataaacattcattacaagttttgtatgtatatatgttttcatttctcttgggtatatacctagacagatttcctgggtcatgtggtaactctatatttaaccttttaaggaactgccagactgttttccaaagtaactggactattttacatgtcagcagcagtgtatgtaggttccagtttctgcaaatccttgccaacacttggtattatctgtcttttttattatagccgtcatagtgatgtgaagtggtatctcatggttttgatttgcatttctctgatgactgacaatgttgagcatcttttcatctgctaattgctaagctccttaaatggaaaattataggaagcataaagcatgtttgcaaagaagtgattatattcgctaggattaagattttaagtgaatatttaagatgcccatgactagtgtccactctctcgaatcaagttttatttaaaccattgacttttcctcataactggaaatggtcccagtgaaagtctccctcacttgctggaatgtggggccatctctgctgtctgtcaagccttgatgcccaagtggccattttctcctggagtctgcatcagatggtagagtgtgtgttttcctgagttgtgagactggttctgctccacaatgctttgctgggttaactccctcccagagtgcataccaggttactcctaaacttaaggccggggccggcctaaaacatctagttttgcccctttttccatatatgatctcgcgattttcctggacgcccggcctggattctcgtaccggattaatggcatcggaggctctccctaaaaaaggaaaccggcgaccgcccgtctcattataaatcgaacagccagggggccacccacagaaggaggaaccacgctcataatttcgctttcgtaccgatgtacgg

SEQ ID NO: 414523 - DNA, 157 bp, Homo Sapiens
tacgcttggatggtgcacatctgtggtcccaggctacgtcaggaggtagaggtgggaggactgcttgatcctgggaggtcgagggctgcagatgagtcgatgagtggtaccactgcactccagcgcctgggcaaaaagaatgagaccgtgtgtcttc

SEQ ID NO: 414524 - DNA, 319 bp, Homo Sapiens
gtacagagtggtgcggacccttatccgctgcctgctgccggcctaggccggcggggcccgcaagcgcaaggcgggcatagacacgcgctacgctgagcacgacgtcctgaggtgtatccacgacatcaacgctctgctggtcctcgagccgcgcgcgggccggcacctgttgaaaattctgctgatggacgcgggcgacagcggaaagtacacgttcctcaagcagatgcgcatcattcactgacgaaagttcgaccaaaacgcgatcctggagttccgcgacaccatattatacaacatactacacggggagtgggtg

SEQ ID NO: 414525 - DNA, 272 bp, Homo Sapiens
gcaattatgaaggtagggtagcatattaatcttcttgaactgccataacaaaatatcataaaccgagtggcttaaacaacagaaatttatttatccccattctgcaggctaagaattccaagatcaaggtgctggcaaggtgggtttcattctaaggtttcttcttttggcttgtagttggctgccttttctctgcattttctgagaaaccgttttttgtgtgcttccagagagacagagaaagagggagagagctctctagtgtctctgct

SEQ ID NO: 414526 - DNA, 147 bp, Homo Sapiens
tgtcagagaatttctgaatttgaggttagggtaactatggggactttttcatcacacatttttttcaaccatcatttcctacccacaagccaactgtgcttatgtgatatatttacttttcaaagagagctgctattttaaaggggc

SEQ ID NO: 414527 - DNA, 348 bp, Homo Sapiens
ctattatgtaataagtgctatctgtggtttaagaagaggaatttttaaagaaaagtataaagcaagattttcgaggttagaaagtttttatcaggttattctttggagaagagaaagcagcatttctgttttataaggtacataggaagcaattggctttaatagtgcaagctgcacattaagaggcagaagacaattaagtgttcggtgttatatttatgcaaagcaatttctaaggctcctcttaaactattttgtgtgagctattgcatatttcaaatttgcctttattcaatttctttcacctttagtggctgaatataacattaatgaaaaagagagaaaatg

SEQ ID NO: 414528 - DNA, 140 bp, Homo Sapiens
  misc_feature (60)..(69): n is a, c, g, or t
ggcaactcaatctttattgatggtttcatttttggggtcaccaatgctaaaaaggggaannnnnnnnnncacctttatgtgtgtcaaggaccccaaaacacccccctcaccaaaaaataaatccaatttaaaacttacaa

SEQ ID NO: 414529 - DNA, 217 bp, Homo Sapiens
tctggggaagcccacgggaaagggaaggcaccacaccaacaaaggcgcgcccatgttagggacccaggtcaggataaagcacctggcccagcccgcgaagggagcgaagtggcccaaagcaagccaccatctgcttgacaaactgccgcgactcctgctcagatgcaaacaaggcacaggggtccaggctgccctgcaacgcctccgtggtccccac

SEQ ID NO: 414530 - DNA, 336 bp, Homo Sapiens
tggttttgttgcctgtgcttttcaggagttagtcataaattctttgcctagaccgatatccagaagagttttccctaggtattcttctagcatttttatagtttcaggtcttatgtttacgtctttaatccatcttgagttgattttggtatacggccagagatatggatccaatttcattcatctgcatatggtaatccgattttcccagtaccatttattgaaaagagtatccttttcccaatgtatgttcttgtcaggtctatcaaagatcagttggttgtagttatgtggcttcatttctggattctctattctgttctattgatccatgtg

SEQ ID NO: 414531 - DNA, 465 bp, Homo Sapiens
ggaggaacatccatactgttttccataatggctgaactaatttacatacacattaacagtttataaaagttcctttttttctacatcttcaccagcatttgttaatttttgtttttctgataatagttattctaactgcaatgaggtgatttctcattgtggctttgatttacaattccctgataattagttatgttgaggatttttcatatatctattggttatttgtatgtcttttaaaaaatgtcaaatcagatcttttgcccatttttaattggattagttaattttggctattgaattgtttgagttccttatatattctggatatgaaactctggtcagatgtgtagtgtagtttgcaaatactttctcccattctgtaggttgtctcttctcttcaatgattgtttcctttgctgtgcagaagtttttcaggttgatgcaatctcatcaacctaaaaa

SEQ ID NO: 414532 - DNA, 253 bp, Homo Sapiens
aacgtatgctacgcattaacgcgacagctatttctaggatattcattttaattataattgtcaacatgataagtgtaaaaggaaggttaatggttaatattgctaggaaggcgctttcaattatcttcatgagtaaacggcctgcagaaactttagcgcttacccgtacagccacaactattggttgtatgagttacctcatggataagataaaaactattatcgggatataaggtgtacttgtccctaagaa

SEQ ID NO: 414533 - DNA, 397 bp, Homo Sapiens
gtattagttataaatttgttcatagagtttgactaattttttcgattagatttgtatttgttaaactctgaagccagagtttaaacacactgcatacgtttgtatgattagttagaaggcatgaagacttttttccctgcttggagactgtctaaaataacagctattgttttgcatatccactgcaggccaagcactttcagcatcatctaattcagccctcacagcaactgggtcaatctgtccaatttcccagggcaaggatagaggagtcagattcaaatacaggttttctgacgttaacttatgtgatgatttgatcaaagcaggattttccagcatcactatccttgttccatctctgctatatgggaatgaaaataaagaaatgtatttc

SEQ ID NO: 414534 - DNA, 496 bp, Homo Sapiens
  misc_feature (68)..(152): n is a, c, g, or t
atagcacttatctcaatatttaattatcttagtttatttattatgtctccctcatagatgtaatctcnnnnnnnnnnnnnnnnnnnnnnnnnnnnnnnnnnnnnnnnnnnnnnnnnnnnnnnnnnnnnnnnnnnnnnnnnnnnnnnnnnnnngtattaaatgactattaaggcagtaagaatgggctgggttctgctgcatgaacaactaacccccaaaatttcagtggcttaacctcacaaaagctcatttattttttatgctgtgtgtccaacaagggtcagggaggggcaatctttccatcattgtagttcaagagctcagattgacagaggttccacctgctcacaaactttcaccatcaccaaggcaagaaaagagagcactgaactgtcccatactggcaactgcttctgcccagaattgccatgtatggccacattttgctggccaatgcaagtcaaatggtacccctaacttgaaagggaaggaagga

SEQ ID NO: 414535 - DNA, 409 bp, Homo Sapiens
gcagtttagttttatttatttattttcaatagtgggaagacacaggcagacacaaagggcaggaggtcatagagtaattacccaattattaggcagaggactgaggtcatatgggtaaacatgactagcccattgattaggtcctctggtattacgcttgggggtcacacctgcaaccatggggctgcaactatggtgctgggacccggggaccaaggagggagaacagccaggaggactctcctactgtgtcccctcctccctgagtcacattgaaaagaaccaggagaccgaggaaacctctattcttgtctcttttgcagatgggtaacaagccatcttcagccggcactcctttggagtgcattctgaagcactgggagtcctttgaccctaaaactttgaagaa

SEQ ID NO: 414536 - DNA, 122 bp, Homo Sapiens
cagccataaagcaatcatctttaatacatgctgttcttcatgtgaaatgtctgttacaagagcaaattcaggagctgtacaacatactggcattacgttaaccatctgtatccttacctcag

SEQ ID NO: 414537 - DNA, 432 bp, Homo Sapiens
gtttgtttgtttcctctgacagtatattttcaaatacactggttcagaattgctgcttcattctttttaattatttcaatatcttcgtttaatttatcggatagaattctgaatttcttctctgtgttgtcttgaatgtcttcaactttcctcaacacaactattttgaattctctgtctgaaaggtcacatatctctgtttctccaggattggtccttggtgccttatttagtagatttggtgaggtcatgtttcatggatgatgttaattctagtagatgttcttcagtgtctggatattgaagagttaggtatttatcgtagtctttaccgcctcatattatttgtagctgttcttcttgggaaaactttctagatatttgaaagaacttgggtgttgtgaactaagcagtttctgctttagggggcac

SEQ ID NO: 414538 - DNA, 218 bp, Homo Sapiens
atagcagtggtggcccatctggaggagccactgtgaagatgccggctgcaacagggaggcagggtctgggttgcgtgctttgcgaggctggtgggagccccaccccctaccaagttggcagggtgggagccccatgctcccaggcacagctgcagctgctctggacccgggcatccctgcactctcaggagcccaggaagcccttgcccctacaggct

SEQ ID NO: 414539 - DNA, 136 bp, Homo Sapiens
accaaacccagcccagttctctattactttaataaagataatatcatagagccaaataaaactgtattgcaagtactgaattgagtaattgttctaaattgggggagcaagctgctaagagaaaatacacaaatta

SEQ ID NO: 414540 - DNA, 197 bp, Homo Sapiens
tgagcggtagcaagctttattgtgaagagcaaaatgacaaagctcccacagcgtagaaggggacccgagcgggttgcccatcactggtcctttctgggggttccttccccaagtttcatagggatttacaggctagagcttttgtccgctattcagtagcaggtcacaataccttcaatcctgctctaatcagaggc

SEQ ID NO: 414541 - DNA, 125 bp, Homo Sapiens
agatgagattgtatttgtaaaacaggttttatatatgtcaaactaggataaattacattttcctgcaagcactcggtaacaataacactcaatatcaacctaatcatattttagcaactggaata

SEQ ID NO: 414542 - DNA, 242 bp, Homo Sapiens
gaagatctgaactacctcggaatctctttattcaggtgttccttaactctaggatgcaggttccgtagtgggcggaccttccagcaaccagagtttggagaagcgaaggggacactggtggatctccaccatgaaaattggcgctttgggaatgtccaaaatttccagggcaaccgtccgtcgcccctccccgaccccgcctccttttaaaggagaaacggagtcccaaagaggcatgcagc

SEQ ID NO: 414543 - DNA, 150 bp, Homo Sapiens
gataaggaatctatacaaaactgtgtcaggacagtaaacatcaaacagtgtttggaggaggagcccctggggataagaccagtatctgctcatggggacatcagctgttggtgcttggagaatgtgagccactagggagagggagaaggc

SEQ ID NO: 414544 - DNA, 351 bp, Homo Sapiens
acattcttttgagcatttactatgtaccaggtactatgctaaacacttttacttcatgattttcagaacaacccaatgaaggtacttcccctttataaatgagaaaattgaggctgcgaggttaggctcttagtgatataattgctctatttttttataagcaaaaaataccacagaaattaatttttagctcaagtgcagcagcttatcatggcccattgcagctttgacctcccagggttcaagcagtcctcccagctcagcctcctgagtagttggaactacatgcctgtgccactatcccgggctcatttgtttttgtagagttaggggtgtcactttattgccagg

SEQ ID NO: 414545 - DNA, 488 bp, Homo Sapiens
aagggtctctgggtgctttaaaaaagctgtttaagagaaaaagcagaaagactgtagtgattgtcaagtgcaaggagttctgcattccagacaaacaaatgcagtgtgcagacaacagacagagcggcaagggaaccccctcagcacaaggggacggcggcagataggcaaaaaggtaattactacatgtctgcctttcatgaaaggcagccaccctccttggtgtggcttggaacttcaattctggctaccaggatacagaggtggaggaagagaaggctgaacaccacccccgtctcccaacacacaccctcgaggcaagaaagatatcaagttctcattttgttgcaagaaaactacattctccttttgataataagcaaaaaaatacttctacatttttcaaatagtagctggtcggaactgttccaaacccagagaaaaaagcaataaacactgaaatcccctggcggtctctgagttgaaga

SEQ ID NO: 414546 - DNA, 135 bp, Homo Sapiens
ccagtaacaatctttatacacatctctggttgcactcatgtgtcacacacaacctttaccacaatcacatgctggaacttgtgtatccctacatgaccttggaaaatcgcttgaagtctcagaagcttagtttcc

SEQ ID NO: 414547 - DNA, 271 bp, Homo Sapiens
caaggggggaggcccatcccccggctgaagggaaaaattcatcgagggggggcatcatgaacagctggggaggcacaggtgcagagaccacgccagggcccaagggagcaaggaagaggcgcaccaccgcggagccgtaggggactgtcaccttgcaagggacagcgcggggctcgcaaaacttgaggccccaccagccaatgcccacggggaccatggagagcttgggcaggatgatggacccactgacggcccccgccaacccctcgga

SEQ ID NO: 414548 - DNA, 418 bp, Homo Sapiens
accctgaagaatagatggagacaaaccgaatgaggcagcccacattggcgccaggcgcccatcggggggcagtttggaaggcgaagtgacgagtggagtgaaagggaaccattaaggggcggatgaagcacacagtgaggaaagtagagccaatggtgacgtgaaggccggggaagcctgtggctacaaaagaggccgagccgaagatgcccgcggagatggtgaaaggagactccaagtgctctgaggcttgtaggagggccaaattgagacccagtcaaagtgaataaccggagctagaattattcggatcgggcgctaatgaggcactatggcgagctcacgtgatagaaactgccgatgcgacgaatactgttgtgcctgtgaacgcgacctccacgcgaattatcggcgcgac

SEQ ID NO: 414549 - DNA, 490 bp, Homo Sapiens
tcagaccccttaaccgcaccaggcgccaggaaaagtccgggggaaccttggacccaccggccaccaacccgcccagcctctgtctgggagtggtggtgaccacgaaattgcccgggaaggggccctccacaaaggggaccccacaaatgcgacgaaccgaatggtacccctaggcacgggccagaaccaggaagccccctggggtgagcagacaccaataatccccaccccacgccgtgggcacgatatgaggaatcccacccaccggggagacagtgggagcaataacaagctccgggtcccagggcctgaacactcctggaatgcccaagcgcacctgactcaagtaggggaggaaggacggtttggtggtactcccacctcaggggcaaaacaagtcccgagaaggaactttgcaccaggaatcctccacaaggacctcaaaagaggtgggggggagggaactggaagacatacatgcccccaggga

SEQ ID NO: 414550 - DNA, 437 bp, Homo Sapiens
  misc_feature (144)..(264): n is a, c, g, or t
gaggcaacagggcctggctctgacacccatagttggactgcacgggtgcaagtctcggctcactgcaacctcggctttccaggctcaagtgaaccttccacctcagccttatgagtagctggaactataagcacatgccaccannnnnnnnnnnnnnnnnnnnnnnnnnnnnnnnnnnnnnnnnnnnnnnnnnnnnnnnnnnnnnnnnnnnnnnnnnnnnnnnnnnnnnnnnnnnnnnnnnnnnnnnnnnnnnnnnnnnnnnnngtatgagccaccatgtgtggccgagggccctactcttttattcgggagccatagaagccagaactgcaataaattctagttctggacttagagctaggttccaagctgaactgaaattaggaggagccagtagtataatgcctggatgaaaatgagtaactggggcagcttag

SEQ ID NO: 414551 - DNA, 196 bp, Homo Sapiens
  misc_feature (76)..(136): n is a, c, g, or t
gcgtgcaccaccacgcacagccaattttttgcatcttcagtagagatgaggtttcatcatgctggccaggatggtnnnnnnnnnnnnnnnnnnnnnnnnnnnnnnnnnnnnnnnnnnnnnnnnnnnnnnnnnnnnnatgagccaccgcgcccggctcatttgatttgtttaagtcatgtacatgtattacttagat

SEQ ID NO: 414552 - DNA, 436 bp, Homo Sapiens
  misc_feature (43)..(43): n is a, c, g, or t
  misc_feature (121)..(121): n is a, c, g, or t
ccggattaactactctaagagctgcaactcttaatgtacctantaccaccctggggatgaagattgaattagtctcttacaacctggcaagggagttcactttgctaaatcaccagcagtnctcggggcacgttgagtggacagaagttggggtcaatgagtcggccttgcctgcgatggagcttcagtgctggcacatctggatttcagttgagtgcaacttatttagcagagaaatcttcaaaagaatctactctccaaatttccctcactttgcatagcacttgaagtggtcttcatgtttcaaggcgattctgaatactttagggaaggatcctcttgaaatagctaaacaaggtcattaggaagctgtcattaaggattaatacctaattgtagttcacctgatagttgaatgggaggaaggaaactccag

SEQ ID NO: 414553 - DNA, 223 bp, Homo Sapiens
caatgaaaagaacaatctctgcatcatacttcaccaaagatgcgtcacgctatagagacagatcatccaatgatgccttctttggcagcaaatgttcatactatgcgttagcagatgtgacatctgtcttctgaacataacttttcatgaaggaatagtacgcttcgtgctttttatttaattcaggaattaatgctaacccacatgtacaagaagatgcctt

SEQ ID NO: 414554 - DNA, 443 bp, Homo Sapiens
tcaacatgtctttatttgcttaaattaacaaaatataggttacatgcctcttttcaggtaaacctgctttttcagtgaagcagaaagcaatattcacaacttgggctgctatatacttagagttttagtttttaaatagcaagccagagttctgtacaaaatcaacatttggtgtaatgttgtccaaatatgcgaaggatttcaaacgttagctctgttatattttgttccagcaaagcagacaaagatcataattcaaaacaccatgttaatattttattaaatgcgttcagggcttaataaatacagtatgcacattgagctttctcatgcaactactcatatacaaatataccagttactcttgtgggtttatgaaaggtcagccttagtctcatggccggtggggagtcaaatttttaaaaagagagacagaaagagga

SEQ ID NO: 414555 - DNA, 334 bp, Homo Sapiens
caaagccccgggccccttggagcaaaaccagggttccctacacccccaccaacagggttaaacgtgcacaggttgggaccactccggaggttattgagccctcgtgggggagggcaattccaaggaccataaatggattcccgcccattgttaggttatccacctggtgcagaattttaggctagaggcccgtgttaagtatgttgctcttgaaatcaactactttaagcttggatggcaggcctttaggcatctgttcctacccagcgaacaacagattaaggggagtcatgggcctgaacatcatgcatttaggaatcctagggtctacagc

SEQ ID NO: 414556 - DNA, 477 bp, Homo Sapiens
tttttttcctctaggttctctctacctttatagcctacactcttttgcttgttagactaactcttttccatgagtctgaatattcctccaaagaacactgtgagcattccttcctccctcctattgactttctctcttttaaatgtcctgtggtcagtccccatgtggtctttcctggtctcaagaagctcccacacaggtacaactgagagtatttcttgaatctgcaccttccttttagcttttgctatttttatttctaacttttctactctttttagaggctctgaattaaggaattcagtgatataagtatttaatgatgaaccactatgttcctagcattgtgacacacctgtgggttttcagagaatcaaaagatatgaattttcccttcaaattgatgatctactcaggaagacaagatatatgcacacaaaatagacttcaacattagacagcatgtgtccaaaggta

SEQ ID NO: 414557 - DNA, 157 bp, Homo Sapiens
actgcacctgacccagaccattcttttcccttctgcacaaacaccagcaatgttgggtagcctctttgtcagtctgaatgacagtgatgagcacagtccatctccctaccattgacctatttgctgcacaagtatcctaagctaaaagtaaactttc

SEQ ID NO: 414558 - DNA, 232 bp, Homo Sapiens
actgtgcctagaagcatatgccaatttctaaaagcaggactgagaggccaagtggctgagcgggaaggtggttaaaaagtgtctcacagagctaaggccaattttggggcccagcatcaccaagcctggatagctctggtgaatctctttgcatttggatgggccactgaaggacagtaccctaaaaacaatgataaaccaaaagaaggttctagaaactcagtttcacagt

SEQ ID NO: 414559 - DNA, 536 bp, Homo Sapiens
gaggatgcattgatgtattgatttgcctgggaacaatggcctatagttcagcctgagaattctcataaagttaagaaggcataaaaatgccccccccgagactcgtcaggagtattgactctcctacagtttaatttgctgcttttgtggtttctgtgatgtcatcccacatgtgtaagctggaaaaatccacgctgtgaagtgtaacctcctggtgtgtattcccacaatggagaatgttaggcttcgtttccctcggttgctacacatctgattacatgtgtcaggaaaacaaacttaaaaaatttcaggagacaaacctttcagcggaattgcctggaacccatgaagtgaggtcatagaacctacaactataataagctgtaggaagaaaagtagcctctgggctactttgtgtctagtcacattgactttccaggtgatggccctacaaaactcaaaccacctctattattcatgcctatacagtcttttaaaaaaatactagattgccattgaaatataagtattgattt

SEQ ID NO: 414560 - DNA, 423 bp, Homo Sapiens
  misc_feature (155)..(180): n is a, c, g, or t
  misc_feature (241)..(296): n is a, c, g, or t
tgttttgctttgagacagggactcactctgttgcccaggccagagtgcagtagtgcaatcagctcaccgcagccttgaattcctgggctcaagtgatcctcccaccttagcctcctgagtattcagaacaacaggcatgtgccaccatgcccagnnnnnnnnnnnnnnnnnnnnnnnnnnggtaaagatggggtctcactatatttcccaggctggtttcaaactcctgggccttaaatcnnnnnnnnnnnnnnnnnnnnnnnnnnnnnnnnnnnnnnnnnnnnnnnnnnnnnnnncagccattcagtgacttttctaggtgttgctaaaggaagcctggagattggcaatatcctaacatgcctgggaagggggtgcagggcaggtagtgtctacttctcggggtttgagcaatcccacctt

SEQ ID NO: 414561 - DNA, 244 bp, Homo Sapiens
gacagccaccgttctctagccaagggccatttaagaagatgtggattctgcacttcagtgagccaaattccctatatttctccatatatccaggaagatataaattctctatatattcctgttagattgcaggacccttagacagggacgtctcccgcagaagttacacatgcacagggctgagtatgtggccagaatagccatgttagtcttcaaatctttgtgacccttggccaagagaatt

SEQ ID NO: 414562 - DNA, 975 bp, Homo Sapiens
  misc_feature (82)..(384): n is a, c, g, or t
tgtacggcccggaatcccgggatatcgtcgaccacgcgtccgatctgaaaagaggaggcccactgtttaaagccctctctgnnnnnnnnnnnnnnnnnnnnnnnnnnnnnnnnnnnnnnnnnnnnnnnnnnnnnnnnnnnnnnnnnnnnnnnnnnnnnnnnnnnnnnnnnnnnnnnnnnnnnnnnnnnnnnnnnnnnnnnnnnnnnnnnnnnnnnnnnnnnnnnnnnnnnnnnnnnnnnnnnnnnnnnnnnnnnnnnnnnnnnnnnnnnnnnnnnnnnnnnnnnnnnnnnnnnnnnnnnnnnnnnnnnnnnnnnnnnnnnnnnnnnnnnnnnnnnnnnnnnnnnnnnnnnnnnnnnnnnnnnnnnnnnnnnnnnnnnnnnnnnntaaagccctctctgtagaggatgcggattgcaggcaggcccttcagtccttttgcccaagcttgctttttggtggctttgggtgccaaccttcttgtgctccagagcaagggtctgggctttctgggtagtggagaggccaggaggtgatcttttgggccctgctgtcctggtccgactgcattcttcctttgttgggcccctggcattgggctacagggtctcttgtagatgagggtgaagggagctcctagaaagctgggcatggctgagactggggagatggaagcaacagagggacagttattactcagagaccagccccaacatcaggccggaaagaggcaacgggaaaccgaacagggtatgtccagatgaaccagggagaaacacgacggcagcggggccctctgggccgagccggcaagcagggatggccaatggaactcaccacagagtggcatgggtatcaaggaacgacaaacgaccctagctgtgaaaaacgtacaacggcaatgcaaacgacggcgtacaaaagacacacaaacacaaagaacgaaaaggaagagagaacacacacgggcatcacact

SEQ ID NO: 414563 - DNA, 513 bp, Homo Sapiens
ggaggctggattacctgttacagcggctgtacggtccgaatcccgggatatcgtcgacccacgcgtgcggtgaggccgcacccggggtcgcgactcgcctcgccggagtcggggcagcgctcgcccctctttaccatgtatcccgtccagggatcccatgacagattctgtgtcacgtctccttacagagttgagcggtgctgaactgtcaagcaccgatcatggtccccggggtcccacaaggcatgcctgctgagaccccccagggagaggggggccacaggctgccccacgctcaggcacactcggcgaaggggagctggagaaggggtcccagaggataggaagccaagagccctgtggatccggcccgatgctccgagcaggtggactggcagctgggcggctgctccgagtcccaatcacacacgcccggaaaactccaaaaatctgccagatatctgaagaaacgggacaccctatggtcagaatcaaagatgcacgagtcggcga

SEQ ID NO: 414564 - DNA, 1000 bp, Homo Sapiens
tgtaccggcccggaattccgggatatcgtcgacccacgcgtcgcccacgcgtcggtggcagatagaacagtgagatgtgcttggtttagagaatgtatatccataatgggaaagaaatgaggggttctaaaagacaggtgagaggttgtgtcctacatggaagtggtcatgaaaggaagaaaggatagagtgggcttgtgaggcagggagaaggaattttccatggtctaagaaccacttgccttgagttggacaggactggtagaacaggttttcagaagaagaataggtgggagtgatagatgagaaagacaagtattggctgtctggagcggagactggaacgtgtgcaggcgctgaggctgcctcttttgctgttttgtgggcgcagacgtttccttgggcaatggggtcagatgtttttggtgccctttgcagtggattactctggctttggctgtaaggagggcagttttaaggagagcctttattagacccagctggtgcctgctgcttgttggtgggagaaacccccacgcctttggtcacaggagccttctgctttgatgtcgtggtatgaagagcagaggaaaaacacagcttgagagctttccccaaaacaaatatacttctagtgttttttccagtagaaattttatagaaattagggtgcatagagaatttaagaaccatgagtagtccccaatgcatctactagctttggagaaaacttctattttgccccttggaagacacacggtttggataaccaggtgttaattaggcttagtataaattagtccaaatgctacacttcaatgacaggtccactcttctaaaaggctcttttcgaagcacaggggcgattgtgtacactgggcagccacgcacatcgtgtcagagtagaaagcagagtgtcaggagcgcgatctgaacacataacgaacggagatcacaggattgaacagaaacaacaaacaaccacatattatactaatgg

SEQ ID NO: 414565 - DNA, 890 bp, Homo Sapiens
  misc_feature (727)..(727): n is a, c, g, or t
tggactataacacgtgttaaaaagcagcggtacggccggaatcccgggatatcgtcgacccacgcgtccgctctctcaggcgcctaaaccacattgaggtgctccttcctctgtgtgtgtttgtacctcatgtacacttcgggtctagctcatttcactcttactgtaattctttgaaaatctctctaaattataagctgtttgactcaatgattgtagcgacacatatttgtaacaccattgtctgaggtaattcctggcatgtgtaggtggtcacccctccataaacactgaataaatttttaaacgtatttctctatgcttttcaaggagtttcctctatactttctcactgtacctcatcactaagaaggaaataggaccagtgttattggccttcttttacagagaaagaaactaatgcttaggaaacttgagtggtttaaaggcacggcgctcagttttggaagggccaaactttcagatcttctgactgaagtgtcttaatgtgtggggaagctctttgtcttataaactgtaaaataccgtaataattgaggtctgcgcaggccccaacctatccatggtttggggctgctatctgcctcataaagcaaagtggagggtttgtcttttggaaaaacaaagtcgttttctcctctggaaaaagcctcctacataagttggttttgccatttgccaagaataagagggcacagattgaggnctcttgagtaatgggttttcagttgagttgaagaacgaagacggcattggaccagaaaattccgaatggaatgcagttccctccgaaatccggggtcatgacagcctaaagggttcccttatttcctctcccgaagtcgcaaatgggaaaggttaacccatca

SEQ ID NO: 414566 - DNA, 1157 bp, Homo Sapiens
  misc_feature (929)..(987): n is a, c, g, or t
  misc_feature (1035)..(1083): n is a, c, g, or t
atacataggtgcataatgacccgcggttaaaaaagcaggctggtacgcaccggatttccgggatatcgtcgaccacgcgtccgtttttttaaaccagcaattggcaaataaggggaatattcttttagatatgtgccaataaataaacagaaggggtaattattccccctagaggacttagattcaaatgatactgtttttagtctagttagttattgaatccttggataaaacagtatgattacctctagaatttaaagtcttcatttaatgaataggctagtatcaggtcttcgacaagtatcgtctatttttataattcaaagtgcattttactacagaaacagtttaaaagtagctggccaaaacctagcttatatacagcttccacatatattgtccatatattcatcttacttaagacatgctatagctgcagataaatagtcaataacagcagctcaggtgctgtgttcttagcagcactacctgagcagcttaagacctggtggtagagtgatagcaactggcagctgactggtcccattgtgcctctagagatggctcctctggcagcagagagttccagttagcaagacaggatgccagccagaggcgcatacagctgggtaggccggaagcctgaggggcaagagaactgagcagcatccacagagggtatggacgagatggtagcacgtgatacaaaaactcagggataaccacagcaacagacaccaacgaagggaaaggggtcacacaacaacatagccgacacgacactcaacatgcgccagagcataaatagcctgccatactacacagataacactaacgtacgtcacaaatctagacacacagaacacgatgcacgctacccatcatggccaacagacaacaaaccagaaacggacgaacacacatcgaannnnnnnnnnnnnnnnnnnnnnnnnnnnnnnnnnnnnnnnnnnnnnnnnnnnnnnnnnnttgacccgaaaagagaggcaacaacacggcaagcagataaacatgcgnnnnnnnnnnnnnnnnnnnnnnnnnnnnnnnnnnnnnnnnnnnnnnnnngaggtcacagaaacatcaaaaccaaaacagggagaacaataagagagagaaatgcatacatgacactaaaactc

SEQ ID NO: 414567 - DNA, 492 bp, Homo Sapiens
cctactagaaaacaacgcttggtttcaagtccaaggcagcgctaggatacctgagctccaggaatagttccgcgaaggcagtacttcgctcggtatcaccaagcgtccgttacgactagttctagcccacgcgtacgacacaaaagaactctgaggggcgtagcaaggagatcaaacacaggcacccaggcagagcgcctggcatagccacagggccattgagatctgccacagggggtgttgaccgctctcagtcgttcccgagctgcagagtccccagcctggaaacaaggtttcagcattcccttacatggtaactacgccaggcccctgctgggctgaacacctggctgtggcattctcctccctggaggcttccactggcaggtcaggctgcaaggagggagttcagaagagaggagagaacacctcagtgcagggaagcggcacttgttttccatctcttacccagggcatcttcttagtcacagg

SEQ ID NO: 414568 - DNA, 1030 bp, Homo Sapiens
  misc_feature (92)..(154): n is a, c, g, or t
  misc_feature (226)..(308): n is a, c, g, or t
gaatagataatatagacagtggttaacaagcaggctggtacggccggaattccgggatatcgtcgaccacgcgtcgccacgcgtcggctggnnnnnnnnnnnnnnnnnnnnnnnnnnnnnnnnnnnnnnnnnnnnnnnnnnnnnnnnnnnnnnnccgagccaccatgacccgccaagttgtgtttttagagaaaatatattctctttagaataaggattctaggannnnnnnnnnnnnnnnnnnnnnnnnnnnnnnnnnnnnnnnnnnnnnnnnnnnnnnnnnnnnnnnnnnnnnnnnnnnnnnnnnngagagcatacttgtgatcaaaatatttgactaaaaccctctctcttgataagaaacagcgaaagaaacatctacaacaggccgtacaaggggaacttcctggcaaagtagacacccctacttggcagacgagaacagaagaagaaggaggagtaggcccgacaggaaggcgccccccgacaacggagagaaacagcaggagagtacaaacaaaacgaacacaacaaacggcgggggaccatcagaaaacaaaacagccgaatgaatagccacccgtacgtggaaaacacatgagcagggagcacaaaagcgggcgaagcactaaacggaggtgaaagccgagacggtgcacggcaaatcggccaggaaagcatgaaggacggatccacacacagaagcacataacgaacaagcaccaaaccaacgccacgcaaggcaaaaacgcaaactagtaaacaaagaggaacggataacaacagaacgaagtaaacaacagcaccaaaagaagccccgcagaaccgagaagcgaggacaacacggcacgagagcaaccacacacagacgaaaacgcgcagcaacaaaccgcccaccgaaggagacgacaacaacaagaacacatagtaagccaagcgccacccaatccgacaggagaactaatagcaaaaagccgtcacagccaaccaacgcgcaatacaataacaaaccagagagaaagcgcacaac

SEQ ID NO: 414569 - DNA, 956 bp, Homo Sapiens
  misc_feature (64)..(79): n is a, c, g, or t
  misc_feature (117)..(146): n is a, c, g, or t
  misc_feature (825)..(825): n is a, c, g, or t
tggtaccggctccggaatttcccgggatatcgtcgacccacgcgtccgcgcgagctgccgcccnnnnnnnnnnnnnnnnaatatcccctttcttaaaagacaagctagtatactggnnnnnnnnnnnnnnnnnnnnnnnnnnnnnnccaagacaacttttagtaccctcatctttattggggaaggggagggggaactccgtgggtcgcccaccctcacccgtgctcttcccagctcagctaagctcgtccctcggtgccccccctttggggggcgatgggagaggaccagggtgggcgtgtggagggtttcgtggaactagcagagggtggtgagtggggcagggtggagggtgggagcataccgtgggaacccggggctcgggggaaacctcgggggtgcccaggacgggaaaggggcacgctagcattggcggtgcagtgccgtaccagggttgaaagggctgtggcccaggcagcacgtgtcggtatacaccattgtctcaaaacggggcgaagggccggggctgctgcgcttcgtagaggccttgctcccttgggacctgggtctcccatctggaccctccaaggccttagctggcctcacatgtcggggcaggtatccacctaaccagggctgcagggcaggatggatgggaagccggcgaatggggctaggaagaacgctacaggtggcttgcgaatgttgggctggggccccgaccggtgggcacctataaatactatggaagttatagccaattcacgagctccgactagtgtctgtgatggtaaacattcctatatactccggaccttggtatcnccctgtggtcccactaacaaacaacatgcaccggaacccagataaacagatatatccaatacaccacctggtggctgacaaataagcacaatactgattacctaaaaaatgacacgggacaacatacgaca

SEQ ID NO: 414570 - DNA, 1125 bp, Homo Sapiens
  misc_feature (86)..(218): n is a, c, g, or t
  misc_feature (220)..(232): n is a, c, g, or t
  misc_feature (244)..(485): n is a, c, g, or t
actagtatgtgaatatagaacagtcgttaaaaaagcaggctggtactggtccggaagttccgggatattgtcaaccacgcgtccgnnnnnnnnnnnnnnnnnnnnnnnnnnnnnnnnnnnnnnnnnnnnnnnnnnnnnnnnnnnnnnnnnnnnnnnnnnnnnnnnnnnnnnnnnnnnnnnnnnnnnnnnnnnnnnnnnnnnnnnnnnnnnnnnnnnnngnnnnnnnnnnnnngccacccagcannnnnnnnnnnnnnnnnnnnnnnnnnnnnnnnnnnnnnnnnnnnnnnnnnnnnnnnnnnnnnnnnnnnnnnnnnnnnnnnnnnnnnnnnnnnnnnnnnnnnnnnnnnnnnnnnnnnnnnnnnnnnnnnnnnnnnnnnnnnnnnnnnnnnnnnnnnnnnnnnnnnnnnnnnnnnnnnnnnnnnnnnnnnnnnnnnnnnnnnnnnnnnnnnnnnnnnnnnnnnnnnnnnnnnnnnnnnnnnnnnacacgatgtactcctacctgggtgacatgggtgagaccctaatctcacgaacaaacaaacgacaaacacccagcaagcaaacgattgcgtgacaaagtccacaggacccccaagtactgacaaaatgccagacagtgtatggaacgggcacctggaggagaggaatgacccacacaagggacacaggcagcgcacatacacagcaaaagggcacatgggaagaacaccaagcgaacaagggcacacagacagggtacatgaggccactgaaagagcacacaacaactaacaaggagcaaaacgaacgacaggggagactggaagaagccaccacggtgtagcgaggaccggaggcgcaccgaaggagaggagcggcgcgaggaggccgggaacaggacaggaaaagaggagagggacagacgaaagagacgaagaacaggagaaaagaagcaagaggacacaggaagcaaagacaggcagcgcacagcagccaggcgaagacagaagaagagcgaaaagaacgacgaagagacgagagaaaaagcacacgcggcaaacgcacagcgagcgacgcgccggagacctctcagagcgcgcaaaagagcaagagagaaagaagcaacaacaaggagaaaagaaa

SEQ ID NO: 414571 - DNA, 363 bp, Homo Sapiens
ccttagtcatagccatcaataggtgacagggaagatggagagaatggactggcctcagtaggacttagttggctgtgggtacaggggtagagtcagaggttaccctgaggtcacgggcccaagcagctggatggatatgaagctggaaagggtaggggataggagggaagtgttcactggcgtggcatcaaatccaggtccaagtcctagagagaggtcaggctggaacttcagttcctggggttgctgactcccacagagggtgtaatggaagccaggagggtctgatggattgtggaattcagaatagtcaagtggccttcagcccctcaagaaccaggtgacttggccagcatggtggca

SEQ ID NO: 414572 - DNA, 992 bp, Homo Sapiens
gtggtaccggccggaattacgggatatcgtcgaccacgcgtccgctcgatttccttgtcgaaattctctggaggaatacttgtgtgtactccgcccacgtaccaaggatgatgtggcttgctctgtgtgtgtcttccttcttccatgcgtaggaaaggagggcactgtttgcgattgaggggatgggggggagcccaggaagcaacgagggccaggatacctcttctgccaaaagaagggtctcctctcgcgctccttctccacccctctttctggtgagccgtgtctttcagaattccacctcgatttcgtttcgagtattctgggacatgttattaggtaggctgtgagctcccaacccaccaccacctcgctcggttgccttgggtggaagtccgctgcaggatgtgaaccgaagagagcaaacatgtgaattcatggaccacgcacaggagctccaaagccccttccttggaatccctcctccttttcctgtatatacatggtatagccgcagggtacaaattacgcacacgacatctacaaaaaggaggcccaagctcaccacaataatactgaattcaccagcaagaccgaagataaccataggcacacattgcaacattgcttggacttgcgaagtgcagctttacactgtccacacagatctcaagcaaaatttcacactggaggacctgacacgaaggctcagacaccaatcctaacgcgtaattctctacaatattattaaaagaattgcccattggctgttcatgctggtcccattaagacgaatttggcaccgtgttagtcagagacgttggaattcgagaatctttaacgagctggaggagagatgggcccagttattgacgcagatcccgtattttaccaggatgcatggccgcaggctaccccaatcactgaacatggtgatgtgatgaggaaccgaaataccagcagcaggatctcactcgtgccataggcatata

SEQ ID NO: 414573 - DNA, 1022 bp, Homo Sapiens
  misc_feature (173)..(211): n is a, c, g, or t
tggttttaaacaaggcagggcctggtaccggtccggtaatcgggatatcgtcgaccacgcgtcggagcagccagccccaacacagaggccaaagggttcgtcagagccacatggtggaaactctagcagagggttttgaaagcaggttgcacttcattcttactgagtgcacnnnnnnnnnnnnnnnnnnnnnnnnnnnnnnnnnnnnnnnatgcagcgcccctgggtctgtgtaatatggcacttcgtggtggcttccacgcgtgcacggcgcacatgcttcccgggggaggggcccggtgggacagcgggtgtcgcgcccccctcttcttttcataagagtccgtggcctcgggacagccgtgcacaggcgtgcctagctcgtgtggacgacggggacaggccctgtcccacatcacctctttccccctgcgcgctccgtgcccggcagcctccaacctgtgggaggggcgctgtctttctcgcattcgtgtgtgtgtcgtgactctggcgggagctgaaacccaggactccagggggtgtgcccggggggtgccctcagaactcctcgtgtgtcacgtgccagcgtgtgtcggtgcaatccaggttcagctctttctcgtgagatcatcaccaccccgagggagacgtgtgacgacatcaagcgagtgtgcaacagcggcgagagtgtcgtgcggaaaatcttcggagtgggggaacacagagggggagctacgagtgcgtgtgcagcccgggatttgagccagtgtctggcgcaaaacacattcaacactgagagcgagaaccctggtccagatgtggacgagtgcactccgggcagcaaccagtgtgacagctccgcgatatgctacaacacgggggtcaaacagacggcggtgcgccaggggggagccagaagggaaccccaaaaacaaaggacatgtgtggaaaaagaatccccaccgaccgcccggacaagacaacaaccattagaaagcggcgggaaccaaaaccgaggaaca

SEQ ID NO: 414574 - DNA, 1043 bp, Homo Sapiens
  misc_feature (46)..(215): n is a, c, g, or t
tacaagccaggctgtacggtccggaatttctcgggatatcgtcgannnnnnnnnnnnnnnnnnnnnnnnnnnnnnnnnnnnnnnnnnnnnnnnnnnnnnnnnnnnnnnnnnnnnnnnnnnnnnnnnnnnnnnnnnnnnnnnnnnnnnnnnnnnnnnnnnnnnnnnnnnnnnnnnnnnnnnnnnnnnnnnnnnnnnnnnnnnnnnnnnnnnnnnnncgcaccctgctgcgctggatgccgggtcttggaagaagtgatggaagcgttctcttggcgcagtcccagctcaatgggcatgctggtggagtagaagggaagtttggcctactattccacgagtgcgttcgtgtcgctcttcttgtggatagtagagagaagacgttctacttggcgcacgagtctactccattggttgtgctggtagctgagggaaacatctttcttgctagctcgttggtcctcgttagtgggactagtaagaagagaacgataggccactcatcgggaacgcgatggtggagacagcatgaagagatgagttgtattgatatggaggatcgctaaggtttctagtttgtgttctagaggggtaggagaattaagagatggctgtgattgcgagaatagagtttatagacattgtttggatttatgaaatatatagacttagagatattgaagatggtgcaagtggtttgaatctaattgaaaggacggttagaatagaaccaaaggggcgacgctaaagttgcttcgagagtggtaacgcgccagggggaaaccaacgcaagaccaacgaaggccgaacgagtcgcggcacagaaagagcggcaccaattcacggccacgtgaggggaaacaacaacccacgcacgaagccgctggctgggatgagccaaggattgggaaggccattcgtggacagcggagcccgagaaccacccggagcggagaagataagtcgggacgcagtaattgggaccggcatacgacgagagacccaacaccgcccacatgcactagcaagacggaacaacagaccgg

SEQ ID NO: 414575 - DNA, 992 bp, Homo Sapiens
gggtccggaatttcgggatatcgtcgacccacgcgttcggtggccacttcgcctttggctttgccatcctggccatgccccggcaggcccggagaactgtggccccagactgaaatgagaagaaggtggccccgccgagggttgtctcaactgttggagtgatcagacccaacaccaggccatgggggctactaagtctggcggagtcacaggaacgagaaaagacaagttaaaagagaaagtgggaccatgcagccaatgctagtgtggaggctgcaaaggccctgagctctgggatcccacactatttattgatgatcaaacaaagaaacaggcagtgaagatgtgggggttgacacaggaagcggtgtatcaagtgaatgagctacagctgtgacggtttagcattttctttgaaacatacggctacttgagataaagggagtgctagaagcaaggagccagcaagtctagacacattccaaagaccacgaggggttttaatcctagaccctggacgtgttccaaagccctgcctcagcttctctcccaacactcagcttttctcccaacactcaacattgggacattgagagccccttcagactggttgcagtgctagataagcaagatctacatcatggagggtgatgacatcagtgccaagctccatgcatacccagagcccggcacagatttactagtgctagtgaactttggaccacaatgtctcagcctttcagtctggatcacgcagcaagtgaaactggaggtcccatcttcagcacttcatgcaaatatactttgggagaccaacccttctgaccatcaaggcaagcccacatccctgacaaatctcacaagaggcatcacggggattcactacaaatacacacagtccgccaatattccgttagaaacaacaccacacaacccactaaagaccataaaaatctctaaacacatcactaccctcatcaactcacacccta

SEQ ID NO: 414576 - DNA, 617 bp, Homo Sapiens
tggtacggtccggaatttcgggatatgtcgacccacgcgtcggagctgggaagaagcagctacctcgtaggcaatgtggcgcgcaggcgggcggcgatgagagggggcgcatgccgcatgccccgcgctgtgtgagcccaccgctaaaccctgcagtccctatccacccctgcacaatgacgagcttgtctgggtagctggtcacgttagcctgggtgaccttcctcggatgtggaatccggccctgcgagcatcctcttcctcacttaggcttctgaagggcccgcggtgagctgtgagccgatgcccagcgtgcacgcctggtgctaggggctactccctcatgtttgcctagttataggatggatgagcgctgttctcaagtgctgcagcaggggtcatcccctgacctatccaggcgcagtgccctcttcccagcatcccatgggggaccaccgacagccacgctccgcgatggaacacacgatggatgctgaatgtagcgaaatggccggggacgacagatccttcccaggcccagttcccagtaaacagacgggcggtgccaactgcttggcagatccgtgatggaagacacactcctaatgatcccagaa

SEQ ID NO: 414577 - DNA, 1335 bp, Homo Sapiens
tggtccggaattctttagggatatcgtctgacccagtgctgtcagggcccctggatgcgtccccgatctctcttcgtgtggagaccgatggggcgggtgtcacggtcaggagggtgctcatgcgtggaagtgaatgctgcgcctgcgattctgctgactgtccgatgcgccagcccatgtgatgaaccctgcatatgccatgctgtgacgcctgtttctcgtgtgctgattcgtgtgatgtgaaacatcgcaatcttgttttcgcactgtggtttcctcatgtaggaatgacgagacgacagttgtgtgagcacaacttgaacttgatgtgacacgacacgcctacatcacattgacgtgtgtctctaactgtctccaacgtggtgcagcagtgcattcaacttgacctgtctatgcttacctcttgggaatatgacacagcatgtacgaaggcacgcgcactgacgacaacgcgcacaacgggcacccaaggccacctgcaccagggctccaatcgggtcatcacgacctaccacgcacggcaaggggaatgacaggcccaacctttgcctcgcgggcgacaccttaagcccgcgtgctcgccttgctgctccacacattgggcacgcaacggaccgtgggctaccactaccaggtgtgaagtatcgccttatacaccacggtgaatcgccccttaccagaaacaccacgacgataccgcctaacgttaactatccctcatcacgatacccattgcaactactataaccaaccgcacctcgcagcgcaaatgagaagagattggcacgaggccacaacgcggtacagaagcgccgattacccaatccatgatcggcactctgcgtcgctgcatgtgccatttggtcaagttcactctgcgccattaagtcccgctgttcctatgcgctcccattcgcaccacttggcgtccccgtagggctggagtatacatcgacgatgcgatagagttggtgactacgcgcaaaacagtcaatgcagatgggcactaacaacgcaacgcaacaagagagtgaacattggacagagacgcaacagacaacacaacagtcagcgcaacagaccacgcaatgagacacgaccacgatgggcatgagcgctcgacaaaggaatccttacctgccccaaagctacctgaggaacgcttgggcccccaggagcaagcgcaccaccagaacacaggcccaagggtacagcaccagcataaagcttacaaccactaggggactagatgtcgaccgccacgactacatctgagggcggcatcaccacagatcagatgggcataactacgcc

SEQ ID NO: 414578 - DNA, 1027 bp, Homo Sapiens
cggctttatgacttgaaccgtggttaaaaagcaggctggtacggtccggaattccgggattattcgtcgaccacgcgtcggtctgcgtgcccagcctctcctcacgctcgcgcaggctccgccgagtctcagctgcagctgcagggagtgagccgtgcacccggaggagatcccggtgatgatgcgaccaacttcggacagtgcctgacgacccaaacactcagccactgttggtagcctgcaagcatggcccagctgttcctgcccctgctgccagccctgtgtcctggcccaggctcctgctgctttcgggccgctgtcctggatggagacagctcagaggaccgcgcttttctgcgtgcgcatctgcgggcgacgcagcacactgcagggcgtgcttcgcgtggcgcccgtcaccgatcccttgctcaggtccactacctgtcggtcacccgccgagccgtcggggtgtgctgggctctccgacggtgctcatacgtggcacatttctcgtgtgccgcggaccgggacggagaggttgctgggtggctgcggggagtgggcgctccagtgtgaacagaggcctatcggttccgcgtggtactgacctgcgtacccagtgtcgtcaccgacgttctcgctggcgctgagcgagctgctcgccaaggattcaggtatctatcgctgtgagggtccacaacggatcgaatgacatgcaagctgacgctggtggagcgtcacaggtcatgaggcggtccgtcttactctagccgaaaaggggctctgcccgcagttgcattcataccttttactttgggaccagacggcctgtgcccgcagtaggaagccacattcagcacccccgtaaggagtctatccagcctaccttgaggctaaagacaaaaggtaatgtggtggatggccaaagaaccgtaaggatcccgtccaacccaaaaagcgcgtaagcagacgtgtggaacagagacgagaaagagtgtgcgcgtagacaagaggtagaactaacaaa

SEQ ID NO: 414579 - DNA, 747 bp, Homo Sapiens
ctggtacggtcccggaagttcgggattcgtcgaaccagcgtcgatgtgtcagagataacctatagagagagctctagaatactatgttgaactgctctgaagctatcatttaaactataaattactgtggtcaaaattttatataccctggtggcgaattagaatgttctaaaaatatctttaacacgtgaaaacaattggaacaaaatcttaccccatctaaaaatgatagtgtctagttgaatttaagttaagctctttagtatatgaccatatgaaggggtaaagtttaatctttgtgtatttacatgtgaaaatacagaaacgtaagtgattgaatcacatcctacacgaaagttgtggagtgctccaggcgaatatcatgtgaaatacagaggtatttatatcgttctttggcaccaatagttcttgcttcagtaattcaccagtaggttttcattcatcgataatatatcagtttaaggctaaaataaaacactacatttcttagggcttatcattctatatagaaagaggaaacatcctaatgagtattggcgtgcagtgtttgtccacagagattctgaagcaaaaaaatgtgaactaacatctatatttgttatggagctagttaccttgcttaccttagatgctttaaacgtttgagtagatcagccatgatgtgataagcaggttggatgcttactgtgcttaggaggtaggtgtattgtgtctcttgaagaaaga

SEQ ID NO: 414580 - DNA, 572 bp, Homo Sapiens
  misc_feature (207)..(222): n is a, c, g, or t
agctgtacgccccgggttagggatatcgtcgaaccacgcgtcgcggagcggtgggcgaaccagcgtcgcttaattgtaaaaaataagactatgcagattcatatattactgaatcataaacaccttgtcttcacagtatgagtgagaaatatatgaaatctgcatagtcttaattgtaaaacaataaagaacattccttaagctttnnnnnnnnnnnnnnnnggggggtttttaaaagtatccccaaggggccaaaggtgacgcttacccagtttttttgaaagggggtccctaagggggggataaaaagataggcactgggccgtgtataaaaacgtggtgaatggggaaaactgcttagttcggaaatcttggggacaggaccctaacttcgggggtgtgacattacgtgggaccaaattacttacggagattataacagctcttaaggtaattatcaagttttcaagggtatatgtggtcacactaggcgggcatatgatggggggctggaaaaagtagggtaacgggagtatgcattctatgaaacttttatccacgggagctaggtt

SEQ ID NO: 414581 - DNA, 753 bp, Homo Sapiens
ggcggtaccggtccggaattccgggatatcgtcgaccacgcgtccgagccccaaagccagctccagcttactaccagacaagccggttagccaagaccaatttacccgaagataaagtataggcagatagaaatggaaaccgggcgcaagtagatatagtaccggcgaaggggaaagatgaagaaattataaccaagcgataagtatagcaaggaactaacccctataccttctgcataatgaaggtataacctatgaaataacctatctgcaagggaggacgaccagacaggctaaggaccgcgccgaaagatcgcacggagcgatgcgtatcacttaaacgcaaaagcagcctaaagacaagcaggtccagcaagcacccgggtccctaatggaatacgggcacaaaaagtaacggtcggggaaaacggacgtgtctaatgcaaggggtacaggcaaagaggcggcagacaacatacactccgtaaacccaggcatgcgcgcttggaggtacgaaacttcaaggccctccagggcctatgaggttccgcgagaacaaaggacactcatacgggaacaattacctttggtttcaaggttttcgcgagaagaacgggttatagattcaacaaaagttcaaccatgaggcggccccacaaaaccaaatggggaaaagaaccgcaccggtttccattccaaaaagaaattcccactcccaccttttgttgggttccaacagagaagtgttctgga

SEQ ID NO: 414582 - DNA, 1009 bp, Homo Sapiens
gctggtacggtccggaatcctgggatatcgtcgaccacgcgtcgaaaatataaatgtcgtggacattcttaagtgccctcaaaactggccccattcttggaagattcagattattacatgatagagggattattattcaatcattatgggttgttttctttttgccatgaaaatagccataatcccctgcattagttaagttgaggaagaggctgaaagttacacagactcactctctgatgtccaagtcatgtccaagtaaccccatatctacagttcagaaactgtgacataaactgtgtcatagacttcacctgtgtaagcccattggaaattccagctttcactggacagtgatgactgcatactcattccttccaatcatgttccttggcttaaaatattagggatgacatgtgcattacaattaccagctttgtgaggcaaagatccaggtcaagatatattttcggcttgaattatccaggattattgcctcatgttattctacattgccaaatagaaacagcagattggttggtaattctgcacaactgaatgatatgtgttacatacatgccatctttattgtacattacaatcaacaaaggatcttgaaaatgcaaagagaaaaaaatgtggtgcagagaataaacttaggttaagggtccaaggataggcattccttaaaaagcattatgtacaaatacataaaaatgtgactaaaattccagtctttactaagaatcaatgactactttcataacataatgaccggaaacagcaactgcacagtcattcagctcagaccaaaaatcaaacacaagacaacaggcaaacacatgtacacaagacaccaccgacgaaaacgggcacaatacaatctctcacaaagaataacgtgacacaggggacgcacaagaggaagcaggacaacataaaccacaaagggggaaaaagagaacgcgcagaaagctagacttgagacgacaacgaacaagcaaccaca

SEQ ID NO: 414583 - DNA, 732 bp, Homo Sapiens
ctgtacggcccggagatctcgggatatagtgaccaacgcgtcgataattgccattaattccatacataaaaccatagatctgctgtatacatagaaaaggagaacagccactccctcaaccaaatatccctacattcagttaaaagctactctgtaccccaggacatgggagcatgctcctatacttcccaggtgacaaaagtgggcttttatttcccgccttaacggctcaataggatgtcttttctgttagactatgggtaggtgacttcttaatgatctttaacggaaagaagtcaatacaaggaaaatatcctttctaatcccatttaccttctcaccccactctgagcgttactatagcaacatctttcctgctactaggacagttaaagtccccactgtgaagttaaccgaaagctgctataatcactcagagaatgggctgctgtatcattgaccagctttccctgcacgtgtctaaattcttcggttctctctgacatgctcaatctagggtttcccgacggttaaacccctacaattcacttcgaaactcctaacagccagaataccccaaaacctttttcagcaactgcaactccattagacaatgacattcaccattttgattctagttatcacatacacttctccttcctgtgctatcggttcacgtctagaacaggcacactgttaaagcaccacaacttcgcgaataatctcccctca

SEQ ID NO: 414584 - DNA, 855 bp, Homo Sapiens
  misc_feature (48)..(48): n is a, c, g, or t
  misc_feature (53)..(161): n is a, c, g, or t
caggctggtacggtccggaacgtttccgggactatgtcgacccacgcngtcgnnnnnnnnnnnnnnnnnnnnnnnnnnnnnnnnnnnnnnnnnnnnnnnnnnnnnnnnnnnnnnnnnnnnnnnnnnnnnnnnnnnnnnnnnnnnnnnnnnnnnnnnnnnnncaagaagaacacacaacaaaaaaagaacatagaaaactaaagtaaactacctcaccgagtcggggacccatcttagcgaccgcacgagcagcatggcgtcacgcgactaacgcaatggtgtcttcatcggcagccgccactactcctatacagcgggcgtcccttatattgggtgtccacttctatccacctcggggcgtggtctaaccccctctctcgcccgcggccaccatctcatcttgtcacctcctccatataatactacaacacactcactctcctcgtctcccaccaccatcaacacccaccacacttctatctcttcaatccccacacctccatcattcacttcctactacatcatccgccctccacctcccataccctctcttcaccctatatcctaaccaaaatctccatctactcaccctcccccctacacccattcttgatcactcatcataatccccacactaactctacatttcatcatactccgtgacgctaaatcactacaccacccaaaacaatacctctactctcactcgcacatccgcacctctactacaatcgatcttctccaactatcacaacaactattcctccactactcaccaacgacactcaacatcacttcacaactataccacatctaaaccgcaaccaccaacctaccaaaaacaacagcgcgcga

SEQ ID NO: 414585 - DNA, 581 bp, Homo Sapiens
  misc_feature (54)..(323): n is a, c, g, or t
  misc_feature (347)..(360): n is a, c, g, or t
gctggtactggtccggaattttcgggatatgtcgaccacgcgtcgggagggccnnnnnnnnnnnnnnnnnnnnnnnnnnnnnnnnnnnnnnnnnnnnnnnnnnnnnnnnnnnnnnnnnnnnnnnnnnnnnnnnnnnnnnnnnnnnnnnnnnnnnnnnnnnnnnnnnnnnnnnnnnnnnnnnnnnnnnnnnnnnnnnnnnnnnnnnnnnnnnnnnnnnnnnnnnnnnnnnnnnnnnnnnnnnnnnnnnnnnnnnnnnnnnnnnnnnnnnnnnnnnnnnnnnnnnnnnnnnnnnnnnnnnnnnnnnnnnnnnnnnnnnnnnnnnnaagcagagcaagactctgatatcnnnnnnnnnnnnnngaagagacacgcacaacggaaacgacgcacaaggggtcacagccggctcagggccaagagatgacacacagggagagcaacacagtaagagaagacaaaacaacggggcgcccacaagacgttgagaaacccgatcacgagcagcggacagcgggagcacgcggcgagacacgcgccaggaagcccaacgggagacacgagagggacacacgataaagcgg

SEQ ID NO: 414586 - DNA, 694 bp, Homo Sapiens
cctgcagtgcctattcttgagcctcgtgtggcagggccgccggagtctgcctgtgtgcgtctctgtgtctccgtgttcggggctcctgcgggtgtggggctggccctgagtgcccgccggcttcgctgccggtgcgcgtccggggtcggcgcctcagtgctgctctgcctgtcctcacgccttgggtggcgctgggcaccggccttgtgcgccatggtgggcgctgaagttctgggggcacttatggcgcaggctcggggtgctgttctagcttcaataggagggagactgttgcagcctcagagcctccgcctgcatcccctgccctcgagggcactggcattctgtctttgggactgagggctgcaggtggactccggaggagggtgataagcccaggtcctgggacaccctctcacctgcacagatgggtcctgagggtccagagagcagagctcccttgcaggaacccaggatgcaaagctgacgtttttctggggggactgaactgggagactttgcgactgcattcgtacagtactcctgggcagccctgcagaagaggtgctgtgagcccgttttacaggcaaggaatccgaggcatggagacagttacgtggattgtggcacagctgaggcgctgtcctgggcagctggttctgtgtgtgtggctcaaggggccagagtgcaggcg

SEQ ID NO: 414587 - DNA, 736 bp, Homo Sapiens
ccgtggtccggtccggaagttttcgggatatgtcgacccacgcgtcgcggacgcgtgggtcgaccacgcgtcggaacatggtcctggtgttgtgcagcatctctgtgacggcgctggtggctgctggggtcccggggtcctcgcgctggggacgttgctgtctgcggcttgcggcgcgttttctattccaaggacaatgaaggcagctggttcctgctccctcttagtatcacaaatgtggatccccgtgacacggatgccgcagtcctatcctgctgtccacgaaggcaaaccatgcaagctcctataagatccaggtttcacaatgtaaagcctgaatacctggatgcctacaacagcctctacggcaggctgttgctgcccaagccttcacctggactgacgacatacccagtgctcactcgtgcggcaactgggaacaccgttcgcgtatggggagcatggaccaggcatgtgacaccttgtggccgattcttcaaggtggctaccccagtccctccatggatctgcacttgatcgaagccctccaactgaccacataaaggaagttaccatgcgcagttcccgaaagggagccggaagccaagcactgctgctggtaccagggagaaaacccagcctggccttcctttgaggtacagctttctgggaattgagccacagccccagaatgggttccccaacattctattgacgctgaggaccatccagccta

SEQ ID NO: 414588 - DNA, 954 bp, Homo Sapiens
  misc_feature (80)..(362): n is a, c, g, or t
  misc_feature (364)..(372): n is a, c, g, or t
taaggctggtactggtccggagtttccgggatatcgtcgaccacgcgtcgagaacatggtggtttagagcacaggacaannnnnnnnnnnnnnnnnnnnnnnnnnnnnnnnnnnnnnnnnnnnnnnnnnnnnnnnnnnnnnnnnnnnnnnnnnnnnnnnnnnnnnnnnnnnnnnnnnnnnnnnnnnnnnnnnnnnnnnnnnnnnnnnnnnnnnnnnnnnnnnnnnnnnnnnnnnnnnnnnnnnnnnnnnnnnnnnnnnnnnnnnnnnnnnnnnnnnnnnnnnnnnnnnnnnnnnnnnnnnnnnnnnnnnnnnnnnnnnnnnnnnnnnnnnnnnnnnnnnnnnnnnnnnnnnnnnnnnnnnnngnnnnnnnnncaaatgagaaataatagagcacgggacagatcttaaccaacccgggcctgttagctccttttcactgggatgatgtatgagggaatttaagcttggctggaggccttacttccccagtgagtaaatggagagaatatcacgggttaacttcatgggggcttggtcgagggttggaaaaagtgatgtatcaaaagctccgggacacggggctgggcgaggtgcaaatgtcgagcaaggtaaactggttaacactggcccaagggccgtcacaggaggaatatttggcaatctggtccggggctctgggctccaaaggcctcagggacgctcacgttttgctggacacacaacctctcactgaacactacagtgctcccttctcacggggcctctaccctggaaaccgctaccgggacccatagcgctcacgggggcaccagaaggggcctgagactagacagggacaggtaccggttgcacgggcctgggtgtgccacaacacggtcccaaggacgggcaaagagccgactgacggtgccggcccagagggtacaggaggccgaccagaacaaccctacaagg

SEQ ID NO: 414589 - DNA, 934 bp, Homo Sapiens
cctgttacaggtgcgcgacagtttcgcgatatcgtcgacccacgcgttcgaattaaaacaggcattttcatagtacattctctcaaaacagttggtttttcactaatctacaatggactggcttccagcaaaaatctctgtgctttgatctaatggtttgctttttagaataggtgaacacctaaactacttactttccttcgataaacacaaaacctaccatttgtttagccagcaccttcccctgcccccagtaagtaagtaaaaatgcataacattgccctttctggtgagactatcggaatttcctctatgctacggtccttacaatcctcgtgaaatttgtaagccacctgctacactcttcctgtgcttactgctgtactaccagcggctaacgaagcctcttactccctgactgaaagctctctacgaaacaatacaacacaacggaaaattcactacgcgactcacacacccctgactactcctcccacgatcgctatacgcgcaatggcaggtactccgatcaccctacgcactgctctcgctagctacactaagccatggtctgcttacttccccgtaaacacacccacagctagctgcactatcatttacaaccaacacacattacagcctgaggcacttcacttcacgaaactcttcgcggtccactaaacatctacagcgccccaaaaaggggtcttacaccttacccctaaggacacacgttcctcaaagccagaaaacgcaaaggccatatctcaggacataaacagcaaagaaccggcataaagggcattcaacacgcttatggaaacaggactttgggacgttaagtggctcttcgccaaagcaagacgtcccttctatacgtcactgttagacaacattagcgtggatggcactaccggtttgacttgctattctg

SEQ ID NO: 414590 - DNA, 716 bp, Homo Sapiens
  misc_feature (325)..(620): n is a, c, g, or t
cggtacggtccggagttctgggatatcgtcgaccacgcgtcgccacgcgtcgcggacgcgtggaaagagtctgctcttgtcatggtagcttttggagacctggaaggagatgtgtcacatggcctgtaaacaaaaccagtaattcactgggtgaagaccaaatgcctcatcaactgccaagcctctgtctgtctcccttagatcagtagcccatgatccctttacgaacctcagcctcggtctgctttatgtgtttcactgcatagcgctgctttgctatgtcctttagttcaccatctatgaattggcacgaaaaattttcctnnnnnnnnnnnnnnnnnnnnnnnnnnnnnnnnnnnnnnnnnnnnnnnnnnnnnnnnnnnnnnnnnnnnnnnnnnnnnnnnnnnnnnnnnnnnnnnnnnnnnnnnnnnnnnnnnnnnnnnnnnnnnnnnnnnnnnnnnnnnnnnnnnnnnnnnnnnnnnnnnnnnnnnnnnnnnnnnnnnnnnnnnnnnnnnnnnnnnnnnnnnnnnnnnnnnnnnnnnnnnnnnnnnnnnnnnnnnnnnnnnnnnnnnnnnnnnnnnnnnnnnnnnnnnnnnnnnnnnnnnnnnnnnnnnnnnnnncacaaaccacaagaggggggcccgcttcaggattcccctcgagggggcccacacttttaggggacccacgtttctttgtccacagggcggccccta

SEQ ID NO: 414591 - DNA, 876 bp, Homo Sapiens
  misc_feature (508)..(793): n is a, c, g, or t
gctgtacggccggaattacgggatatcgtcgacccacgcgtcgaacccctcaggtttgatcacttgtcagaatgattcacagaattcagggacatgctatgcttacaactacagttttattaattgatcaataaagcaaaaggatataaatgaaccagtcaaagggaaagacacatagatctgggaggacaccaaacgcaaagctttcattgttctctccccgtggagtcaggggctgttacctttccagcacatcgatgcgtgacaatgtatagagtattgccaaccagggacgtgctcctgagcttcagtatttgtcatttttattggggcttccttgcataggtacgattgattgaatcattggcatgtgactcaaactttagcaccctcatttccccagaggtgatcttgttagcatccactatctaggggcccactctgagtcaccttgttagcatcaacttagaggtgtgggcccgctatgataacaaagatactgctgatnnnnnnnnnnnnnnnnnnnnnnnnnnnnnnnnnnnnnnnnnnnnnnnnnnnnnnnnnnnnnnnnnnnnnnnnnnnnnnnnnnnnnnnnnnnnnnnnnnnnnnnnnnnnnnnnnnnnnnnnnnnnnnnnnnnnnnnnnnnnnnnnnnnnnnnnnnnnnnnnnnnnnnnnnnnnnnnnnnnnnnnnnnnnnnnnnnnnnnnnnnnnnnnnnnnnnnnnnnnnnnnnnnnnnnnnnnnnnnnnnnnnnnnnnnnnnnnnnnnnnnnnnnnnnnnnnnnnnnnnnnnnnncaaacaaacccacaaaacacaaggggggggccgcaaagaaaaccccgagaggggacacaattacgggcacccagtttctctga

SEQ ID NO: 414592 - DNA, 571 bp, Homo Sapiens
  misc_feature (431)..(510): n is a, c, g, or t
acaggctggtacggccggaattccgggatatcgtcgacccacgcgtccgggctggcaggaccaagggaaagcaaaaagagaaagcagataagctataagtctgcatttcttcatggtcccagacatgtagccctcctgtgcccaacttgtcaccagacacctgcaagttagctcactgcaaccttggtgttatcagtagtgcacaaagccctcttcagtacacagcacagtaccattctgtaaaatccccagcaagccttagtctctttgtagtcagctcctctcttgctgtcttcctgttgccaccttgcaacgtattttcctactttctttaacaaatctgcctttctttacgtacaactgtcttggtaaattcttcttaccccagcaccaccagctccaggtagttgctgctcacttgcaacagatannnnnnnnnnnnnnnnnnnnnnnnnnnnnnnnnnnnnnnnnnnnnnnnnnnnnnnnnnnnnnnnnnnnnnnnnnnnnnnncttttagcatgctaacgtattactattggcatacaatgaacagtgaggatgactagaggtc

SEQ ID NO: 414593 - DNA, 629 bp, Homo Sapiens
  misc_feature (15)..(15): n is a, c, g, or t
  misc_feature (25)..(25): n is a, c, g, or t
aggcaatatatgagntgacacctanatagaacaccgcctgtgctgttaaatataacgcaggtacggtcggattcgggatatgtcgacagcgtcggctacagcagagatgtgcatggaggaatgtgagagacttgaactgtcaggttattgtttgttaaaggcatgtgaagtagttctttaccttctcctaaaatctttttaatcagctcaaggttaaaataaggagtgactacagtatgtaaaataaggaaaggaagcattaatggtgtgatgtgacctgctgttttgtaaacaagagaataggaaatgttttcaaggtagtttcacatgtcttgcaccaagctcatgcctcttgcttttcctttttgactttatctccctcagtttttcttctgctgtggccagaaagacagtcactacagttgactattgatacaaaggtgcaacagaaatattatccctgcatttttaaatataagaagtagacattaattttaccatggtgcctccctaatgtaagtgatatttattggtggttttcaacaaaggttaactattaaagacagaaatatttgtctttatcttccttttccccttgcctcagtcgtgttattcacccctattcttgt

SEQ ID NO: 414594 - DNA, 713 bp, Homo Sapiens
  misc_feature (49)..(190): n is a, c, g, or t
gctggtacggtccggaattatgggatatcgtcgaccacgcgtcgggcannnnnnnnnnnnnnnnnnnnnnnnnnnnnnnnnnnnnnnnnnnnnnnnnnnnnnnnnnnnnnnnnnnnnnnnnnnnnnnnnnnnnnnnnnnnnnnnnnnnnnnnnnnnnnnnnnnnnnnnnnnnnnnnnnnnnnnnnnnnnncaaatcctggacaattcaaaaaattttccgggaaaatttggtccagggcccaccaattgaaacctttggtcggggtagatacacttttcattaattatacttactccatcacctcttctcatatattttcagaaagtactagtagcaaagtgtttgcaggagttcactgggagaaccttatttaaaatgcagcttctgatccaggtgcaccgtggggtggggcccgtgagaagtctgcatttctcccaggctccgtggttgctgccagtggtgctgcctctgagttaccaggggggtggggaatgatattggagccgctccataatttatcccatctgcacaaaatgagtcacagagccctttaggtaatggacggggggactcaggctgattctgtaagcgggtgttttcagaccacagacgtttgcctgccaaaccttggagtaggtaatcatgaagggtcccttaaacttgctgtgcaggttgaaatgacgctcaaaagtaaaaggggtccgcaaccccg

SEQ ID NO: 414595 - DNA, 105 bp, Homo Sapiens
gctggtaccggtccggaagtattgggatatcgtcgaaccacgcgtcgctcacctgatagtgtaaccatagttccatatcctcaaatgtgtgtgttctaaactaac

SEQ ID NO: 414596 - DNA, 755 bp, Homo Sapiens
ggctgtaccggccggaagtactgggatatcgtcgaccacgcgtcgcctgaagtacttagcccagtgagtactactcatagatggagctgcctatcaacctccaaggggaaatctttgtccacctacagaggttgcaaatggggaagaaggcctgtgagaggaggtgcccccttttctctgtctggttaggctctataataagacaagtttggtcatttctctgaagatgcaggaaaattcataggtgagtttgagaagttaactctgacctacagtttaacatggcaggatctgtacatttgttgtctctgtgttatacagtggaagaaaaacaatgcattttggggacagctaggactcatgcagatgaggtattggcttgcaacccgaaccataatatatatcagacaggaggtatagcagttccagatcaagatctagagtggaactatcaaagggggtgtgaggacttggaagaagagatcatatggtcacttgttttgttgaaagagatgaagaaatgtatgaaaaaacctgttaacaatgaaaaggttaagcaactttctcagggcaaagatgacaatccagcttgtataatagtgtttagttgaggcaatcagaaaatatactaacactgatcttgcctcaatgaaaagatagacccttctgggagtacattttataacccagtctgccctgatatccatagaaaactactaaaaagcagctatgggtcccaaacttctctggaaaat

SEQ ID NO: 414597 - DNA, 680 bp, Homo Sapiens
  misc_feature (179)..(383): n is a, c, g, or t
  misc_feature (388)..(475): n is a, c, g, or t
ggctggtacggtccgaagtttcgggatatgtcgaccacgcgtccgctttcatgtaccatcccttgtatacacttggctctgcgttatagatagcaggagcagattagatgaagagtactaaatgtctgatatgcagaaataatggtcttagctgtctccaatcttctctctctctctgnnnnnnnnnnnnnnnnnnnnnnnnnnnnnnnnnnnnnnnnnnnnnnnnnnnnnnnnnnnnnnnnnnnnnnnnnnnnnnnnnnnnnnnnnnnnnnnnnnnnnnnnnnnnnnnnnnnnnnnnnnnnnnnnnnnnnnnnnnnnnnnnnnnnnnnnnnnnnnnnnnnnnnnnnnnnnnnnnnnnnnnnnnnnnnnnnnnnnnnnnnnnnaacannnnnnnnnnnnnnnnnnnnnnnnnnnnnnnnnnnnnnnnnnnnnnnnnnnnnnnnnnnnnnnnnnnnnnnnnnnnnnnnnnnnnnnntaagagcagacgcggcgagaggaacacatcaaagaaacacacaaacaaagaaacacaccacgaaaccaaagagaggacaagccaagatctatgaagcaaaaaggcgggagccacgacaagaaagagagaaagagagatacgtacaaaggagaagaagcacgaggccaggacaaagacacagaacagaagaagagacgcgaggcag

SEQ ID NO: 414598 - DNA, 706 bp, Homo Sapiens
  misc_feature (45)..(45): n is a, c, g, or t
ggctggtacggtccggaattatcgggatatcgtcgacccacgcgntcgcctcaggcgtcggaggacgcgtgggttagcatttaatgtgatgatctaagaaattagaagtagaactgggtttaatggtatagacatctttgatattattatcaataatttgtccagagcacgaacaagcgaccacacgctcaataagactaaacaaaacaaaatataatatgtacatcattcaagtgtcccatgtggcttctattctacctgtacgaaaatgatacaaagagccaccctaagatatttgaagcctgacaaatcagcttcatggagagcaggtaccaaatgcatttggcaaccgaaagggcagatccaatagaagacccgctccttaaattaaacataacaatgtaagaatacgttgaacaacataacatacaatacaacggggagggccggctcttacaagatatatccctcaggggtgggccaaaaagatatagtgggctaagctccaagtcttcatcttgtcaccaagatgggtgatcccttaatataggtgaagtcggaaattaataagagactatggacatatggtcgagctcgatattagcaaacggattaggtgactggagtgaacatctggtaaggatggcggacttatggggacgggaaaccgtacttgtggagttgtgaaatagttgggacaattgcc

SEQ ID NO: 414599 - DNA, 828 bp, Homo Sapiens
tgctggtacccggtcccggacacggtttcgggctatcgtcgacccacgcgtcgcgtgaacagaaaatggagccattgcttacgcgaatcgtttgagggaaggggcgggagttggggaggtggagttccctgttaaaacgggccacttgattagcaaagtggtagctgtattggggggaactacccgtcttgattgcattaaggcgggtctccatcatttccaggccaggaggaatgtggtggtggaggtggaggattgtggtatgtggtcaggcagtgagaagaaatagtaaggccgtcccggtgagggagaaatgtaaactaaaacctgtcatctgactgtttgttggattgggatcaaccaccgtggtactatggacatgaaagtttaattgggaggagatctgctgcaagaagtctgattgacttgggatcagtgcaacaggacagaaatctagatacgctgcatacctccttacctgtcctacaatcaggatcacagtctatccatacacagggaccaggccaacaccagactgccaatgaccctacattgggacaccacagatcccccagacaagcagctgctgtgatcatgggcaatatctaaggcaaccttctacaagagcctgatcggcgcaaacaggagactgcgcatcctgactgggttgggacatgggatgccggaagggaaagaaccaaagatccttatacaatgctgaaactgggggaagaatcgtcaacacacaatgcattaccaattgggttcacatggtggatacaggtggagtataataaacattagattttaaaggtgtggggaatgtgg

SEQ ID NO: 414600 - DNA, 989 bp, Homo Sapiens
  misc_feature (61)..(97): n is a, c, g, or t
ccctagtgaataaccctggcgattccaggggaattatcgggatatcgtcgacccacgcgtnnnnnnnnnnnnnnnnnnnnnnnnnnnnnnnnnnnnnacatgagccaccgtgcccagcctgtagtatagtttgaaattgggtaatgtgatgcctctgactttgttctttttgcttagaattgctttggcacttcaggctcctttttggttccatgtgaattttagaatagttttttctgaatctgtgaagaatgatgttgggaatttgataggaatagcattgaatctgtagattgctttagacagtatggacgttttaacaatattgattattccatgagcatgggatgtttttccatttgtgtcatatatgatttctttcagcagtgttttttagttcttctagagatctttcacctctttacatatattcttaggtatttatttcactgtggctgttgtgactacgcgacttgcattcttgaattggtgctcagcttgaacacttattggtttactagaaatgctactgattcccgtaaattgactattgtatctttaccaaaaatacattttctttatatactatgtctatagaattgtccctcttatatctagtaatttctactaacatatcaactattttaactttagtaaccctaattcacagtgaaaaccctaagattccttaatataccatgacttcaccgatctcaccattacttgaagcgcaatctgtgacacttacctccccacaccgaggcatccctcaacttgtgtgccctacacggccttttgaatccgaacaatccatggtctcacctctagatatcaacttcccgtgaatatatccgacacatacactgatcatttgagcgcacttggatttctgcatacatcacccgtactcttccgggaacatgaatacaatcactctccgccttgaccaacttcttctccacttagtacctgttccctcatcccgcaat

SEQ ID NO: 414601 - DNA, 664 bp, Homo Sapiens
  misc_feature (197)..(197): n is a, c, g, or t
  misc_feature (205)..(205): n is a, c, g, or t
aaaattttccacccgcccccacccccagtttggtgcacgtgtggtagggtttatttaaggtttctaccagccatgaatttgctgggtcaaaggatactgcattgtaaactttgttaaataacttcaaattgttctccaaagtaggcaaatcagtgaacgctgtagttgcattactttattgtcttaaccccccttgntgtcagcncttctctaattgctagtgagcttttgcgtcttttcatacattgtctcttcaagtgtactcttccatgaattgctggttaatattctgtgcccatttttctaggtgccaaatgctaatcttgggatcaattgggatatacctatgagcaaaataaagagcactactcttagagtttaccttctagcaagaggaaatgtacttatgaagaataaacataataaacaagtgcattttatagcacaatagaaggtgataaatactaccggaaaaaagacaaagtaggacagggtaatgtgaaggggattggggccacagagtaggcaaaacattttattcgtactcaacatagggtggtcaaggtgggcctctttgagaaggcaggatttgagtcaacgatgaggaagtaaagaacagcaagaggtcagtgacgtcacgaagtggagacacagaagagacaga

SEQ ID NO: 414602 - DNA, 741 bp, Homo Sapiens
  misc_feature (289)..(337): n is a, c, g, or t
  misc_feature (417)..(480): n is a, c, g, or t
cggctgtacgcccgagtaggatatgtgaccggcgtcgtcatgtctagcattaaactcacacacattaatgtagtatttcaggctttctgcttactattctcttaaaaaatacatctacaaatatctaaaaatgtactcatctttgaagaaccagcctaatataaggcgatattctgtatgaattgtttcttgagatgtcttactttgaaagaggtgaaattctttcaaggtagagaaacactactgcagttagcaagccaccttagacatattctttgccacattcaannnnnnnnnnnnnnnnnnnnnnnnnnnnnnnnnnnnnnnnnnnnnnnnnctacaagttcattttatcctagatgggctagtttgcttatctattcatctttcatatatttaaacatatacacttctatnnnnnnnnnnnnnnnnnnnnnnnnnnnnnnnnnnnnnnnnnnnnnnnnnnnnnnnnnnnnnnnntcatatgttactccatttatttattaattaaattttagggttcttctgtttagtatgaaatacaagtgatttttaagcacagaatactctactaatcctttattgccttatagttttcatcaactctatgacagttctttccattacatggaatatgctatgtgtgcttaagtgtgtataatgtttacattgtctagtgtgaagtatgcttaagtgtatggggataaatggggtgagtgtgagtgagagtgtgtatgtaca

SEQ ID NO: 414603 - DNA, 709 bp, Homo Sapiens
tgtcgcacggagttgacatatagctgacaaggcctcgaggtagcgtgggtcggtgtagtgtcctgttatgcttcggggatatctactggactgtagattattacaaagaatttcctcctcttctgtttttgaaatagtttcagaagaattggtgttagtttttacttataagttaggtagaattcagcagtacagccatctctggtcctgggctttctttgttgtgagactttattactgattcaatctcattactcattataaatctgtcaggtgttattctttctggttcaatctgggtaatttgtacatgtccaagaatttatccattttctttaggtttttcacttctgttagcctatagttgttcataatagtctctaatgatcctttatgtccctgtacacatcagttgtaatgtctcttttctgtttctgattttatttccttagagtctttcctcttttttccttggttagttgtggctaatggttcattgattttatcttttcaaagaaaaacaccaaattttgtttccattgatccctattttttcagtctctattttattaagttctctgattttcatcaatttatctttgtcctacctaatctaggtgtcttactttgctctttatatttcccttgaggggtattactaggttgctcgattcgcaatcttcttgaattgtagatcattactcagata

SEQ ID NO: 414604 - DNA, 791 bp, Homo Sapiens
ccaaggctggtaccgcccccgaggtactggatatcgtcgaccacgcgctcgaaaaagacaagatggcctgaaaagcaccttcaccaaagacttatgtaaatgtaagccaatggtaagtttctagtgactcagcactccctctccaggtacagtgaggtaaagacccttacaaatgaagatttcttttgtagatgtaaatttcttttataaatagccaactaaatgacagaaagctgtattttggacactgattttgttgaatgggtggtctttttatgttcacttttgttagcttaaaaattactgagttcaactgggaaagcccattaagaaaaagggcaaaaaaagcataatatatgtgtggactcagcatggatagctctgataaagaagcaagcctgaagggttacccctaggttaaagacctcttctaaaaaagaagggtttgaaagaacagcccaaataaaatgtacaccttcaaccaaagagtggtataggtccagattattagtaggacttttgtccaataatttatcttggaattggaagaacatgagagtttcatagttggccaggtgccaagtccaggaatggctaagggtggcttactgtgaatcctgctcacagtgccagaaatgtcaactaaagggaagaaaatgaggcatagttaatacagataatgtatttgggccaaggttgaggactgcagcctaggacacacttccaagtggtcttggggagtgctccagagaacagaagagaggctcatatttttaggagaaacagatgaa

SEQ ID NO: 414605 - DNA, 791 bp, Homo Sapiens
  misc_feature (25)..(25): n is a, c, g, or t
tacggatatcgtcgaccacggcgtncgcaccagtttcatggccagtgacatggttagaccccccaggggaggtatacactaatgatagcttttggatacctggttctacagatgatagaggcccatctcacccccaaaaggagggaacaattatgaatatttcgttgggatttgagcatttaactacttgcttgggaaaagccaacaggtgcttacctcccagtcatcaatcttggctggcaatagtgcctgaaggtaacatctctgtggcacaattacatatgctttctgaccttagtatttattacaatgattatgcccctgtaaccaaagtttaccgccctcaaaaacctatctgtatagtggattggacatgttcagaaaaaaatgaagatatttacttgggaagattgtattgcagggcaagcaaaggtgttgtgtaatgattcatatggagtcactattgattggtcccctaaaggggcatttataaggctcacttctcaatctgtaggtaatggtcaccctgcatctaaagaaaatgatcagatggtagacactataaaaaatacaacaaaagttcctattatttggacatatggtgatatgggtggaacctcgaacccaaatgatacgacctgattgtaggagctaaacataaggaattgtggaaaaatattaatggcactgaaaaagatcaaagattgggaagggaaatatactaagccataccaatataatcctaattacatgttagaattggctcacaatggattcagtctggatacata

SEQ ID NO: 414606 - DNA, 666 bp, Homo Sapiens
  misc_feature (212)..(220): n is a, c, g, or t
ggcgtacggtccggaatggttgggatatcgtcgaccacgcgtcgcacacacggggtaagtttgtgccccaagtgtacaaacacacactctacactgtcctcccaggcctgctcctcggagcatctcgttgctatcttcagcccgtccatctgcccccaagactggagtcccagtccgggagccaggctggcatctctgaggggaccagattnnnnnnnnnaacagttgatcatttccgccgtgtcacccttgtgtcagttctccagctggtagcttgctataaccttgtttctcacagtccctgctgagcccccacagatacaaaccaccccttgggcacctcatagaggggcctctgctgagctcaggggggtctttgccccccgccggtgttcctactgcatttcagcacatggaagagagatccaggctggtgtcttcagcttcccgcggtggagcggcagtgccgcaccttccaccagtgctgtgatattgctgtgccctttctaatggaatcacaaagagaaaccacccaggcttggaaaccagggtgtggcaatgaggagtgcatctgtttcctcggctcggagtggtcttctctggtggagctattcgactagtactggatttcctattagggaaagaatctatgacctgctgatttcc

SEQ ID NO: 414607 - DNA, 741 bp, Homo Sapiens
  misc_feature (24)..(24): n is a, c, g, or t
  misc_feature (582)..(647): n is a, c, g, or t
ccaggctggtacgccccgaagtantgggatatcgtcgacccacgccgtcggtgaccattgagaagatcaccccaggtcagagacaggtgagcttacagagagatcagagctgccccagaaggccacgggggctcaggcgcagatttggatagaggaagctatgttagtagacactcacctttccagggtggctctgtgttttcttcactcatatccctgtctttatatcacaaccccatttctggagcggggaaactgagacaagttccaacttctgaacttgccatccaaacagcgactcctaactttgccctactcagctccctcggctgcagcctggactcctccacgcgcagctccacgtgtgcccagcaccactgcgcctgcccatccctcccgggcgctcttaaagggcccacaccccgtcccaaccccaacgttggccggagaaggtggagtccagccagcgcgataggtgagagcaaagggacgaaaggttttctgtttacattgccaccatcaccagctcgccagcgagtggcagggggaggggaggaggcaagaaaacggaacttagtatcnnnnnnnnnnnnnnnnnnnnnnnnnnnnnnnnnnnnnnnnnnnnnnnnnnnnnnnnnnnnnnnnnntgaaggaagtggtggcaactggaggagtgaggtggcaatcaggtgatgtgtggtcaggatgatagggcagattcgtcctgtaagaggacccctc

SEQ ID NO: 414608 - DNA, 595 bp, Homo Sapiens
caaagggcggccgcatcatagagtatattcccctcggaggggcccaagctttacgcgttacccagcttttcgtgtgttacaaatgtggttcccatattaggtgagttcgtatttattaaggctaggacattggccgcgtgacgttttatacaacgcgtctgcggtgaaacgtggggcaacacacgtggctagccctgtggggcactcctatggttcgaacaggagaactcctgtatactatcctgcgtgcgagtgtgtgaccattaactgttggggacccaaacagtctacccttaacccaggaagacatcttttaaaacgtccctccatacgcgggcctaaccttcattacacacattctctctagacacgtgtcgctacactaaaccgtgtcgtggcttcacaaacaccacatacgcgccgtagcaactttatgtgcccgttatggccctggcccttgcggcacgacaaaacaatttatatgcggcagtacaacaccagggacaggtgtaattggaaccttctcacatcggaaagagacaggtactctcaagtacccacccaaggcgcagcctaaaaatgggtgtcaagtacc

SEQ ID NO: 414609 - DNA, 678 bp, Homo Sapiens
gtactgggatatcgtcgaccacgcgtcgctcattttcctaaactgcttcaggattcaatcctgttattaccacattcagaaattaatcacagttctgttaaaacatctgttttaaataggaagttcaagaaacttcctctcttgatttggacttgtattcctctttggattcagcttagctaattaaaaatacttccgctaataggttctgtcatttgctctaggaaatttttgaaccagatgatacaaactctcttgggagttctcaaccacctaataatttatttgcttccttccagcagatttcccactctaccatcagcccaaattatctccttacctccccaggatgcagaagtcaccaataatcacagttataactgataaattcttttttggcaagctaattcttatctccagcatagattgctgttttacagatacaagcaacatttgaattagttcccatatataacattaactataaatcaaaattaagtaatggaaacaataggtacagtatttgagcaaagcatgctgaggttctactcttttaaacacagatggtaactacctaggttgtctaagtctatggctagtcacagaatagcatgcaaaaataacattatgtgtgacacactaaggtcactgcgctttcttaaatgaggacaaacaata

SEQ ID NO: 414610 - DNA, 541 bp, Homo Sapiens
  misc_feature (12)..(12): n is a, c, g, or t
  misc_feature (222)..(273): n is a, c, g, or t
caagcgctggtnacggtccggaagtttcgggatatcgtcgaccacgcgtcggcctcagtcccctccgggaggcaggtgtctccagcgtggagatggcctcttcacagacgcctgcaccctggcctggttggtcctggtcactggtcgtatcccttgctcctccacatatggtgttaacggtttatcctgatttttttattttaaggagtctcgctttgtctnnnnnnnnnnnnnnnnnnnnnnnnnnnnnnnnnnnnnnnnnnnnnnnnnnnntgggttcaagtgattctcctgcctcggacatgctgagtagctggcattacgggtgctcaccatcatgtctggctaattttctatgtattttcaaaagacgatgacgtttcaccatgttggccaggtatggactatgaaactccatgaactcaagcagatacacccgccttggactcccaaagatgtgggcatacacgcggtgccagccaccaccacctggcctatccgtaatcacctggatcgcttacaaggcagtcgaacaaacaag

SEQ ID NO: 414611 - DNA, 660 bp, Homo Sapiens
ggtgtacggtcgaattctcggatatcgtcgaccacgcgtcggatccagcctcgtggatgtgagaggctggctctgtctgtttgcatggagctgtggtgtacggcctttcccaggaatcctcccaaaggtggcttcccaagcattcagctgggatgggcctttcaggaatcaccccgagatggctcggggttttcccctgtgccctgaaagcgctcctggtatcagagctgtttcaagggcagacagcaggccgggtgtcttagggatcagtttttccaagactccagaagtgccaggttcttccccttgagctctgtccccatccccatcctccagactgggcaggagctgtgctgggagaaagggtgggcagcgggagcctcagagctgagcccggctggtgccctcccctccggcctctccactgctttcagacactaacaaggcttctcagggcagtgatttgtccaacactcctatggagacctcccagcagcccatggggtcgccatgggtagacacaggtttcttgtgaccctccctgggggcatgggagggtggagtgggactcggtgttcccctgaaactaccctgtataatctgtctaaataaacgggatttttcatgggcggccgcccacccgcattatcactgtgtgat

SEQ ID NO: 414612 - DNA, 830 bp, Homo Sapiens
  misc_feature (46)..(169): n is a, c, g, or t
  misc_feature (183)..(289): n is a, c, g, or t
  misc_feature (306)..(371): n is a, c, g, or t
gtggtacggtccggacgtttgggatatcgtcgacccacgtgtacgnnnnnnnnnnnnnnnnnnnnnnnnnnnnnnnnnnnnnnnnnnnnnnnnnnnnnnnnnnnnnnnnnnnnnnnnnnnnnnnnnnnnnnnnnnnnnnnnnnnnnnnnnnnnnnnnnnnnnnnnnnnncttgggctttggcnnnnnnnnnnnnnnnnnnnnnnnnnnnnnnnnnnnnnnnnnnnnnnnnnnnnnnnnnnnnnnnnnnnnnnnnnnnnnnnnnnnnnnnnnnnnnnnnnnnnnnnnnnngattgaaagtccaatgnnnnnnnnnnnnnnnnnnnnnnnnnnnnnnnnnnnnnnnnnnnnnnnnnnnnnnnnnnnnnnnnnngagcaaagccagaaagtcttagatggcatgaagcgtcagagagcgaaatgcctgttcagctggccagggctccagtcattatgcacaaagcgtgaagcctagcgacagatgtgcaacgtgttctagactacgcaagttactggcaggaccagcatcagggcacggcagccgctgacgcttggcttgttctggcaagtttaaagttagactggatcaggtaaaagtcgagtgtatatgcagtgcagttatacaatagttcgtatagatgggacttacagtgaccatgtggaaaggccaggatttggcaagtagcaagacagaagcagtttatgtacgtaggccctttacgtataagtttgggatgaaatgcattaagttaaacgttagaagaaaatggagaagagtggtggcctgagtatcagggaatggcaatggtgagaaagaaagcacagtgagagc

SEQ ID NO: 414613 - DNA, 989 bp, Homo Sapiens
  misc_feature (128)..(254): n is a, c, g, or t
ggcgtaacggtccggaattccgggatatcgtcgaccacgcgtcgctttatggtgtttgaaatacacaatacatgctgtgaacaatagttactctactctgctattaaacattataaattattccttcnnnnnnnnnnnnnnnnnnnnnnnnnnnnnnnnnnnnnnnnnnnnnnnnnnnnnnnnnnnnnnnnnnnnnnnnnnnnnnnnnnnnnnnnnnnnnnnnnnnnnnnnnnnnnnnnnnnnnnnnnnnnnnnattcctctcatgaactgtgtatttgtatacatcaatcaacctctctttatcccctcaccacctttacactgaagtatatcattctactctctacatccatgagaccaagtttttagcttccacatatgagtgagaacatgaggtattgtctgatggtgcctggtttatttcacttagcataatgacctccagttccatccatattgcagcaaatgacatgatttaattctttgttatgaccaaacagtattcaaataggtatatataccacattttttttatccattcatctattgatggacacttagcttaattccatatcttgaatattatgaatagtgctgcaataaaaatgggagtgtaggtatccctttgaatatactaatttatttgctttgaataaatacatagtagagggatgctggattatatggtagtttaattcgggttatgtaaatctccataactgttttactataggtgggctgtactaaatttacagtctcccgctgaccgggtactaaggaagttcccctttttctcccattatgggtccacccaacagctgtgtaattttctcttaataatctacagccatctgaggtaagcatgttacttcccggaattgcgagatccatttccgatgcacggacaccgcaagtccaccatctacaaacctatggcaacaggctcccctgggaacgggactccgcaacggcgcgtaaacaaaatggc

SEQ ID NO: 414614 - DNA, 1193 bp, Homo Sapiens
  misc_feature (63)..(88): n is a, c, g, or t
  misc_feature (108)..(118): n is a, c, g, or t
  misc_feature (213)..(221): n is a, c, g, or t
gggctggtaccggtccggaagtttaccgggatatcgtcgacccacgcgtcgcccacgcgtcgnnnnnnnnnnnnnnnnnnnnnnnnnngggggaaaaatacttttatnnnnnnnnnnnttaccaatcaaaatattgaacaacaaaatggggggtttaaaaacaatgggaaaataaaaattgaaacacgtggctgtgggggcagggagtgcccnnnnnnnnnaacctgtgaacaggggccacggatgacccgtccgcctcgatagataactggccaccgagtggaagtgcaggctcgtggtgcggcaaaagagctgggggagcgtaaaaaatcctccagggccgcaagtggaatcagcgccagtgaatgcccggggatcccacggcccctactatctataccaagagggggcatccgcgcccgggtgacggagccccccgtgaaaaccgcctgtcaggggaggccaacacccacgagataagccccccagaagatgtggccgagccagagcgaccgaggccgcgaaagagagaggaggacacaccccgccgatatgagagggcgtgacagggtgttggccccgcacagagggccaaccctgtgcccggaattcacacgacgagactacggagggaggcgaaacaccatgtggtgctccccccgccgtattaagcaccaccaaaggtggggggtgtacccacagccaggtgtggaaactgaagagcggcgcccccgcgacacgaccagagaggtgtgggacagcatcgcagagacagtaagacgggccgtggactacaccagacggaggggggcccgtatctacctccccccccacatattcaaccagagccgcacaagcaatataaccacaccgacggaggggacaaaagcagcgaaagccctcacacgagagaaggtgcaaccacaacacaccgcggcggagcacacgccccggcagagtagattcaaccccacgggagacaaggaaagcaaccccaaagccaccaccccatgctgaacagccgcaggaggcgcaccatataaatgacaaccaccacaaaagagaaagccaccaccagagacaaagcatctcaccacaagaggaggaggcctcaccacacgccgccgaccgccgtcgtcgtacacacaagtcggggaggaacatcactaaccgcgacggcagcaaaacagctt

SEQ ID NO: 414615 - DNA, 714 bp, Homo Sapiens
aagctggtacggtccggaattccgggatatcgtcgacccacgcgtcgatgcaggtccagagataagcaacatcacaatagccaccaagggtcccaagaaggggagaaaccaggtcatccattggttgacaatactccaaagtcctgtgtcttggagctcttgtgcctggcactgtatctggtctcgaagctccttaaccttttttggtgacaattctgtattgattaacaaaatagtaacactcttctcctagaaaaagacaggttccacttctttcagctgttaataaatttaaggctttccaattctggagggctactgctgctaaagagttaagctagctttgtaaggtgaccagtgaatctgcaactcgttccatgtcatcatttaactcttgtgataatttgtaatatgctggggtgatcagacccaacaccaggctgtggcggctacgaagtccggcggagtcacaggaatgagataagttacgagtgcaagaagtgggaccagggggtcaatgctagtatggcacggctgtgaacgccctgagctcttgaagcccgcactatttactcggtgatcaaacaacagaagcaggtggtgaggatgtgcagggttcaaacgaacagcagtgtatcaagtgtgtgatctacagctgtgacagtttagcatatactttgaaagcatatggaacatgttctgctacttgaaata

SEQ ID NO: 414616 - DNA, 602 bp, Homo Sapiens
  misc_feature (45)..(261): n is a, c, g, or t
ggctgtacggccggagttccgggatatcgtcgaaccacgcgtcgnnnnnnnnnnnnnnnnnnnnnnnnnnnnnnnnnnnnnnnnnnnnnnnnnnnnnnnnnnnnnnnnnnnnnnnnnnnnnnnnnnnnnnnnnnnnnnnnnnnnnnnnnnnnnnnnnnnnnnnnnnnnnnnnnnnnnnnnnnnnnnnnnnnnnnnnnnnnnnnnnnnnnnnnnnnnnnnnnnnnnnnnnnnnnnnnnnnnnnnnnnnnnnnnnnnnnnnnnctgctgataaagacatacccgagactgggtaacttataaggaagaggaggtttaatggactcacggttctacctggttggggaggcctcacaaacatggtggaaggcgaaaggcacgtcttacatggcatcaggcaagagagagaatgagaaccaagcaaaaggggtttccccttataaaatcatcagatctcatgagacttactcattaccataagaacagtagggggaactgccaccatgattcatttatctcccactggcccttcccacaacatgtgggacttgtgggagctacaattcaagatgagattgggtggggtcacagccaagccatatcaa

SEQ ID NO: 414617 - DNA, 869 bp, Homo Sapiens
  misc_feature (50)..(368): n is a, c, g, or t
gagcgctgatacggtccggggttctgggagtatgtcgacccagcgcgtcnnnnnnnnnnnnnnnnnnnnnnnnnnnnnnnnnnnnnnnnnnnnnnnnnnnnnnnnnnnnnnnnnnnnnnnnnnnnnnnnnnnnnnnnnnnnnnnnnnnnnnnnnnnnnnnnnnnnnnnnnnnnnnnnnnnnnnnnnnnnnnnnnnnnnnnnnnnnnnnnnnnnnnnnnnnnnnnnnnnnnnnnnnnnnnnnnnnnnnnnnnnnnnnnnnnnnnnnnnnnnnnnnnnnnnnnnnnnnnnnnnnnnnnnnnnnnnnnnnnnnnnnnnnnnnnnnnnnnnnnnnnnnnnnnnnnnnnnnnnnnnnnnnnnnnnnnnnnnnncatgacctttttaacctaacacctacactgacacacttacaggcacgacaaaccaacgacagtatcttgtgacaaactacacctgacgaaccacaagtttgcaatcaatacctacgaaggcctcgtgtgccactacggctaaagagcaacagtctagagacgggcaaagttaagtaagcacatacaactcaccaggagtcaacaaaaggtgtcagcgaaacgacacactcaacacttaaataacccgtaaaccatcgagcacacgggacacaagcacacgtccagcagaacaggcaaagcacgaacagaggccacaagacgctacgagagaacgacacagaacaatacacactgtcaaaacatccagaagcgtgaagtgtccagaaggaaaaagcgtaagcacgattgacagacaaacagagaaacatgtccagaacagattctacgcacattgcagggataaggatatacattgaacagatatagtaatcaaagtaaaag

SEQ ID NO: 414618 - DNA, 1053 bp, Homo Sapiens
  misc_feature (617)..(617): n is a, c, g, or t
tggtaccggtccggaatcgcttgggatatcgtcgaccacgcgtcggcaggatggaatagagctaaatatgtcttcaatcccatcttgaaacatatacttcttaaatacatatttatggtcaaacaggcctgctgtgcccactggcctcccctgccttctgtaaatttgcaacagtcaggtcacagtcagcctgggggacgtcccatgctaaggtcttaggtcggagtcaggcactggcttttagtgagaaaggcagcctgtagctggtgaagcctggatggtgcctgaaggaggagctggagggtgaggtctgactggccactatgtttgctcctctgagcctgaaaggtcccaatgcccaatgctgtttcaacttgaacattgagcccagaagtggttgtgagtaggaccaggtgtgcaaacttcacagtggtctctgtccccagacacccaagtgctagagaaaagagttcagtaattgggatggctcccatgtagcagctggtcctgaatgggtggctcagtacatctgccctctgccctgatcctggatcctcaagggtccaatcctttgagaaaaggaaccaggagagcgatgggtctgaagcgctggtgtngtagaaatcctcatcacaaagaggtgactgcgttccagttgctgccaggcctggcatattcccacaaagtgcccatgtctacaggatgctcagccctttgcttcctctgttcccgcacaacctgcttcagctagaaggtgctggctatatttgaaagttcaagggtctctggtgcgaaggacggaaaggccaaccaagggcacacaagtgctgcgatcaacccgaggctctgggaagtcgggtcctaagaagcgcaggaaagaaggtccttggaccccattgtaggaagatctacggtacataacacgcaaaaacaggtcacacgacaacaccaccggcggaccacggggccgaaggcactctacgaaaagggaaacttgcacgagacccaccacggggtgcgggcaccccccacaaattaccagttggaataacc

SEQ ID NO: 414619 - DNA, 787 bp, Homo Sapiens
  misc_feature (299)..(485): n is a, c, g, or t
tagtacggtccggacgttatcgggatatcgtcgaccacgcgtcgagaccacatatgcactaaatggcacttctgtgtagtgcttcccacatttacacatcaggacgcaaatagaaaatgataataattgtcaacacactaagaaaaacagataagttgcttgcagccagaacaattttccagggctctggccactgccagactctgccccacctgaggatacgaagactagtatttctgcacatcagatggcaatctctgtatctattggcctaacacttccctttacaccccaacatnnnnnnnnnnnnnnnnnnnnnnnnnnnnnnnnnnnnnnnnnnnnnnnnnnnnnnnnnnnnnnnnnnnnnnnnnnnnnnnnnnnnnnnnnnnnnnnnnnnnnnnnnnnnnnnnnnnnnnnnnnnnnnnnnnnnnnnnnnnnnnnnnnnnnnnnnnnnnnnnnnnnnnnnnnnnnnnnnnnnnnnnnnnaataactcatcataataatactacatactagacgcccagaaatgtagagtcccacgatccaacactgtgtgactctagatatattacttccacctctactttaccaactcgacatattggtaaatatttctagtaccttcctggcacttagagacgtaccagtacaggactcagtgcatccggccacgaactcacacccagataaggacaccgggcaccatgcaacacatccccccagaaaccacccaaagaagaagccatagaaccacgcaccctcaacggcaaaacgacaacacgaaaca

SEQ ID NO: 414620 - DNA, 1132 bp, Homo Sapiens
  misc_feature (55)..(122): n is a, c, g, or t
  misc_feature (124)..(140): n is a, c, g, or t
  misc_feature (392)..(392): n is a, c, g, or t
  misc_feature (643)..(702): n is a, c, g, or t
tgacatgtgattaacccatgtgatccggaacttatcgggatatcgtcgacccacnnnnnnnnnnnnnnnnnnnnnnnnnnnnnnnnnnnnnnnnnnnnnnnnnnnnnnnnnnnnnnnnnnnncnnnnnnnnnnnnnnnnntgggctggccgttctaaattttccctcgaaggggcccaagtttacgcgtacccaagttttcttttgtccaacaggtgggctcccgtaatacgtagagtcggtatttataacggctagggcactgggccgagcgtttaacaaccgtcgtagattgggagaaacctgcatacgctgggagatcttggtagaaggaccctatactctctgtggtggtgaccatctacattgggccacaacactataccctaccangaacgattttacaagcctctataagcgataacattattaacaaccttctcaaacggtgttatctaccgcgttgttaacacacttaccgtgccacttattgcccattggcgtgccttggaagccagccattgagggcgcatctcaccgtgggagctctcagtgaaactattaactgacacacaactgttcctttcatctcaccccaagagcgacacaccctatagcgggcaaaaaaacaggcaccaagccannnnnnnnnnnnnnnnnnnnnnnnnnnnnnnnnnnnnnnnnnnnnnnnnnnnnnnnnnnnagcgggagcgcgagacagaacgaggcaccatacagataaagggcagaacgcgcacaaaacacagacgtagaacaaaaacgacgagaaagacgggaacatcataacaaaaacaaaacaacgagaagacgacaaacaagcaagcaaacggaagcaacacaagaatgaaccaccacacaacccaagcgatacaagagaaaagctaagaaaaaaacagcagcaagtaggtagaagaataaaagccacacagagacctcacaaccgacgaacagacaagaaagaagacgaagaacacatagagccgcacgcgcacaaagctgtaattagaaacaagacaacaacagagaaaactcgaccaatacgagcgaacgcacaccgccaacgcagccgcacataaaagcaaacgcaacggacgataagagtgagaagaaaa

SEQ ID NO: 414621 - DNA, 626 bp, Homo Sapiens
  misc_feature (45)..(137): n is a, c, g, or t
  misc_feature (139)..(149): n is a, c, g, or t
  misc_feature (353)..(409): n is a, c, g, or t
ccggtacggtccggaacgtttgggatatcgtcgaccacgcgtcgnnnnnnnnnnnnnnnnnnnnnnnnnnnnnnnnnnnnnnnnnnnnnnnnnnnnnnnnnnnnnnnnnnnnnnnnnnnnnnnnnnnnnnnnnnnnntnnnnnnnnnnncaaggcaagatcaaagcatgactacagctagcatctctgctcactgagtccaatgttttcagggtgtgcctatttggggttttcagtttattggcatggcttatccgataatagatacgagtacttcatgtagtgtttagttaaattttgcaaaactgcattctgaggaagtcctgttctttcatttttaaagctacaggaagnnnnnnnnnnnnnnnnnnnnnnnnnnnnnnnnnnnnnnnnnnnnnnnnnnnnnnnnntcaaatgccacagtcccatatttaacatttgcccttacaggaatagcaaatgtgcggcacgttgatttctcactatcagcaccaaagtttgtactctagatactgcaaataaggaatgtcagttaatcggagttaagcaacacaggaacagagggttatatcttacttctctctgtgatcaaccctctttcccttttttgccccttctcacatagac

SEQ ID NO: 414622 - DNA, 1016 bp, Homo Sapiens
  misc_feature (288)..(590): n is a, c, g, or t
tgctattggtgacatatagaaagtcgtatataaagcaggctggtacggtcggaattcccgggatatgtcgaccacgcgtcggaaatattgtcaagctaacaaggttaggaaaacaaggtgtgagatatgtcaaattcaggtgtacggcgtttgttgtattgaccatgatgaggagaagcagtcgaaatgttcgcaacagtaacggacgcggactgcacctccattggaggtagagtgggactgaacgcccgaaccggagcctggactccgcttttcgactcctcccgnnnnnnnnnnnnnnnnnnnnnnnnnnnnnnnnnnnnnnnnnnnnnnnnnnnnnnnnnnnnnnnnnnnnnnnnnnnnnnnnnnnnnnnnnnnnnnnnnnnnnnnnnnnnnnnnnnnnnnnnnnnnnnnnnnnnnnnnnnnnnnnnnnnnnnnnnnnnnnnnnnnnnnnnnnnnnnnnnnnnnnnnnnnnnnnnnnnnnnnnnnnnnnnnnnnnnnnnnnnnnnnnnnnnnnnnnnnnnnnnnnnnnnnnnnnnnnnnnnnnnnnnnnnnnnnnnnnnnnnnnnnnnnnnnnnnnnnnnnnnnnnaaaagaatctacacaagagtgaaaatttcccgggggcgtatggaagatttatttttgagtggtgttcttagatttggacttcatttggaagcacgggggtcatcggctgtggtccacccaaatagtggaatcccgccaagggtggatattggactccgtcagggtctccaccgtggcagcccctcagacccctcacgggcgcatcaaggtgtgactccctcacacaagccctgtccaagcgccctcccccatgcagcgggggtctggacacaccccacgccggcagcactccggccaccacaccccagggccccagtcgggcctaaaacttatgggggtaaccctcttccttggctagaacaaacgcgcggcccctccacgctcatcttgtggcccacgggcttgcgcatcctcaaaacgtcctgg

SEQ ID NO: 414623 - DNA, 860 bp, Homo Sapiens
ggaagttccggggatatcgtcgaccccacgcgtccggggacactggtaatatcaagaaatggtccaatggccaggtcactttcttgttaaacaaaagtcttttttcttgtacaagttgagccacatgacttcatattagatgtggacttatttgaggtagggagaatatatattgtctttttctaaaggctgagaagtaatgtttaaccagatgctaaaagtcctctgaaaagatgacattttccaagtgcttgatgatttatttgctataaatgaataatttatctgtttaataaaatcttttcatttgacacaatgactataataaaagtgacaataaatatatgcctgcccctcccacattaacaatgcctttgtgtactaatatttagaataactaatataggtagaggaaaacaagtatggtccttgaaggaatcaataataattcgattgagaagaaacgaagtgaaatgaagttttaataatttgtatgttgtgtggtaatttgggcagtataaaggagacatatgcagatattgaaacttctatttttatgcctattgaacaggagtcgtagaaccaggtctaagagatagtggagatatgcccagtatgactaggtctgattttccatacattgttagaagaaaagtcctgtacgactccctcctaagagggactttcgtattccaggtgacgcatcatgttttccaatgtgtgctgagccctactgtgtacccagccaggtttacagttctggaattctaggagtggcacacatctgctgaatctgattatctccggattgaccgagaacaacccttcaacaacttctaccaataccactaccgggatac

SEQ ID NO: 414624 - DNA, 910 bp, Homo Sapiens
ggctggtacggtccggaatcacgggatatcgtcgaccacgcgtcggaactagaaaaggttgtgttgggtaacccagcccaagattcaatcttaatcggtctaagccagtggtggcattcctagcctccctcccactgattggccgggaagggcatatgacctaggtgctgacccatgagaggtaaggagagttgccggaagccttcttggatgacctgtgggcacaggaacctctcttttctgtaagtgcaatatcccttagggtagtcactgaaaatcttcatgtttgaccatcctctgcctttcccaagttgaattgtgctcagtttcatccaaacaacgactataactcagggttgcattcaacatatttaacaaccgagataacatggaccctgactaactaatagccactggccacagactgcaggccatatggtaattaccagctggatgtcaacccaagtctgctccctattatgggctgcatgtagttggctcctgggggatacagagatacacacttatgtgcatattactgttctcaaggtgggcagtctggtagcttctgtaagacaacagtaggtaaggtctagaatgccaatgttcgcaattttccctgtaaatctcaggttctgaccgttggctgacattagggtcaggggggagcttggcccaggctgattcagcagatctggaggggcatgggcatgtatgtacaaagaaagtcccaagtggggaaaactctgcatatcagctgatccattccagcaggacgacgttcaagcggccagaacgtaatacctgagacctcctggcgaggtacagacagagaaaggactgaagtcagctgcaaggggcgagactagaccaatcagaaggtgggtcatagcatttctctaaacaagga

SEQ ID NO: 414625 - DNA, 919 bp, Homo Sapiens
agtgccctgtacggcccggaattacgggatatcgtcgacccacgcgtcgcggacgcgttgggcggactgcgtgggcggacgcgtgtgcggacggcgtctcccatcaactccccatgccatgaggtactccatctcccaccgagtggatgccctcaggtctgtggtgggacgggaccgcttcaccgctgcatatccttacacagttctgggggacacgctgatcagacggtcggggtagtcataactgggaaggtgcgtctacgaagccggaacagcaaggcgttcggcgtgggcgtgacctaccgcagcctgcggccgcattcagagcaacttgggcaagatcgagcgcgcatcctggtagccgtgcacagtaataacaatttgagttagcatgagtacatgacttcagacaggccaatgcaacgccaacagaggtcaaaggatgctagagactgcccaccgatgctcctgacttagccgtgtgattgtcgcgacatgatagagctttcacaacgcgaaatggtctcatcgcatgttcacattcttactagaattgacccggaaacccaaaatcgaagtgctagggactacatcttcgaagatcagtgttccacgacaagtccgcatgcatgcacattgcgtttcacgggttattggttggttgagacgaaggtgtagcgcaatggggattgaatcaggcatcaagaggcacataggcaatgtgattcgccctcaatggattgccattgattgcaggcctatgtcaccgttgcacaaacaacaagcacggacgtggcaagatgtttgcttacaccctcaagacaatgaccttcccaagaacaccaacaccgacaggaccctttgcaaactccgtaaagcggacgcgccctccaagggacaaaaccgacgaaaccctcaa

SEQ ID NO: 414626 - DNA, 885 bp, Homo Sapiens
ggatatcgtcgacccacgcgtcgcccatcgtctctctgtcctctgccctctctggcagagccgagggcttttctggacctcagaggggaggaagtacctgccaattggtccatgagcaaccattggcggcccagaggaggtacggatccccagtcctgtccacaggattggcagcctggctcccagccttcaggcactccctggcttgaaggtgggtctttactggggacccatccgcttctgcccaggactctccatccccctgccattcaaggccccagggctcgaccaaccctgatgggagattaaagtgggtgacagaagaggagagaggccaggcagtgagagcagacatcccagagccagcggggggtggtgggtgcaggctgcaagatgccaggtcctgtgcctgggacggtggcctcagttgcacccagggagctcccacccagcaaactcagaaggggcggggcttctgcttgtcccatgtctcctgcctgctccatggatccagaagcccaggtctgcagcagtagggttagggtgcctgcagctgcatccagagacgggccagatactgacggtatcccggaccccctccaagcagccacagggacacgcttcggatcccacacgactgcagaaccagggccatggcctacaagccatgctcacgtacgagcaccgacggaccacgggatactggaagcacgcaccaagggcaaactcaataccccccaactcacgcaagcgcgtgggagcaccccaccaagcaccaccacgggacgtacgcgaacgcccaagcccaagacgacaccacctgcagacagcccagacatgaactgagcacgcacgcatgcaacgccaagccaacacgacatcaca

SEQ ID NO: 414627 - DNA, 200 bp, Homo Sapiens
gctggtacggtccggaagtatgggatatcgtcgaccacgcgtcgccacgcgtcggtgaagcttgaggtaggatgtgggaatgggcttggagtcataggcgatgagagggacattaggatattatgaagcccgtgaactcaacttctgagaaggacacagcagagcgagagaaaaggtatcttcaaaagaggctgatgttc

SEQ ID NO: 414628 - DNA, 698 bp, Homo Sapiens
gctgtacggtcggaagttacgggatatcgtcgaccacgcgtcgggcagttcaacagcagcacatattgtctctgtcctggaggccaagaagtctacaatccaggtgtcaggttcagttcctgcttgggctgggagggaggatcggtcccggacctctccccttgacctgtagatggctgtcttcctgttcagatggtgttttctacacagctgtctccagatttccccttcatatcagggcagcagttgtatggggttatgacccaccctaatgacttcattttaacctgattacctctctaaacaccccctctccaagtgaggtcacatttggaggtactggaggttaggccttcaccatacacatttggggaggggcacagttcagcctgtaacacaccaaacgggctgggccagtcttcctggttttgtcttgggaaaagacatgaccaggtatcactagcccacttctgtcctggttaccggaatgtgcctgctcccagcccgctcagctggcgcttggcaatgcgttggaaccagcctgctgtcattcccttgcatcatcttcccaagaggcagaatgcaacctgtgtgcccccaaatcccttatttgacctgaggtggtttcaggacctgtatgtgcacctgttgactggcagggccagctggtgtggactggcagggccagcctggtgtgg

SEQ ID NO: 414629 - DNA, 864 bp, Homo Sapiens
  misc_feature (324)..(623): n is a, c, g, or t
ggctgtacggtcggaattctgggatatcgtcgaccacgcgtccggcaggccccaggtacattcccagacagctgcccatcctgtcagggcgctgctggggcagaagtgacatggaatgcagaggtgcttccacggccagaggtgtgggtggttctgtccgtggttttggatgtgattattgtccagccaggtaatcgggagcttgtgaagcttcttgagcgaggcagtaatgtctgactatgaatacctgcagcttcagatttggaaaggacctttggaatagcagcagaagtcaagccctccaggaaataatgaagatgggannnnnnnnnnnnnnnnnnnnnnnnnnnnnnnnnnnnnnnnnnnnnnnnnnnnnnnnnnnnnnnnnnnnnnnnnnnnnnnnnnnnnnnnnnnnnnnnnnnnnnnnnnnnnnnnnnnnnnnnnnnnnnnnnnnnnnnnnnnnnnnnnnnnnnnnnnnnnnnnnnnnnnnnnnnnnnnnnnnnnnnnnnnnnnnnnnnnnnnnnnnnnnnnnnnnnnnnnnnnnnnnnnnnnnnnnnnnnnnnnnnnnnnnnnnnnnnnnnnnnnnnnnnnnnnnnnnnnnnnnnnnnnnnnnnnnnnnnnnncaaacggatacctatctgaccgcatggcggtcatccccacgagccaccgatacactcacccgctgtgggaaccagacaccagcacgacgcctggtggcgccggacgaagagctcccaggcgaacgccccctgctcctcttgccacgtgcctgacgcggaacctggggcgcctgggagcgcatccccgggcggtgcaccctgacgggctagggtgtgtgctctgacctcgggtgtgtctccg

SEQ ID NO: 414630 - DNA, 805 bp, Homo Sapiens
ctgtacggccggaagtttcgggatatcgtcgaccacgcgtcggccagttgattaagggctaccagaaatatgaggaaacccgtgtgattttgctcctcaaaattcacgtttgggggactatacgtgatgatttcagcctgggggctgagcaacctctctgcaaaatcatcatctttcatcctattggaggcctggcaattttcaccttcaaagtgaactccccataatagtatgaaattcggagcccttgctgcctctagagagctgtaaaagtccccagaatctcctggaactctcagaaaattcccaagtggaagaataagattgtcttcctcagtaagctacatggctctgccagcatgggtctaccagcctctcactgcctcacaagggcttctccacgtgtccactccagttccccttgcttagcttccatcccaggatcacattcgggcctccctaccagattcctcccctggctgtgtacacccaggcctggccacggcttgaaaactatcctcttgcattccactcacaggagactgctgagccgatggttgcacgactgcagtgtgccttcgtctctgtcaccctgacccactgcacgcaaatgagcagagctgtgccggaacttctctagaccaccggggtaccaggcccaacttacagggagtctgcaattccctggcaaactcaaacagatagcctcgccatgacggcagcaggctcagctggcaactgacgaatgccttgcctagccatgtttccccacctatcctagatgtcgagtacgcagttctgcagc

SEQ ID NO: 414631 - DNA, 452 bp, Homo Sapiens
  misc_feature (213)..(222): n is a, c, g, or t
  misc_feature (225)..(330): n is a, c, g, or t
gctggtacggtccggaagtttcgggatatcgtcgaccacgcgtcgtgcgaaccgcccttggcctccttctgataggtgccttgaaacttcaatgttgagatgaatgtgattaactacttggtcctattttctgtttgtctattttcatagaaaatgtccaagtccacttgccttgttctttcttgaaataaatagaaagatttcactttcacnnnnnnnnnncannnnnnnnnnnnnnnnnnnnnnnnnnnnnnnnnnnnnnnnnnnnnnnnnnnnnnnnnnnnnnnnnnnnnnnnnnnnnnnnnnnnnnnnnnnnnnnnnnnnnnnnnngaggggggcggccggaaagaacaagaaaggagggaagcggcgagagaacaggaaataagaagaacaaaagagcacaaggaggagagaaaagagggaaagcgccacaaggaacggcgcaggac

SEQ ID NO: 414632 - DNA, 326 bp, Homo Sapiens
  misc_feature (215)..(215): n is a, c, g, or t
atccgggtcgcgcccgcgtcggagcacacagggccttgtgtccctctggcttcgggggacttggtcgactccatctctggatctcattccacttctggacccgagagctaggcacagatctatactacaggctgtcctgcctgtctcggggcacgatgtcctacgtacaaagtcacggggtgtccaccccgtcatttcacaccatgacagccgtngaggctaatttgcagggtgactctatgaacactgtgtagtcctttcgggttgttcatatggcccactcccataggacacatatttaattcatcagaacatgaaacacttgg

SEQ ID NO: 414633 - DNA, 1052 bp, Homo Sapiens
  misc_feature (86)..(170): n is a, c, g, or t
  misc_feature (315)..(610): n is a, c, g, or t
cggctggtacgcccggaggtatcgggatatcgtcgaccacgcgtccgctcatgtggaaaccacaagcaacatgagaccagaagtcnnnnnnnnnnnnnnnnnnnnnnnnnnnnnnnnnnnnnnnnnnnnnnnnnnnnnnnnnnnnnnnnnnnnnnnnnnnnnnnnnnnnnagaacgctggaaggaaggacccatgcaccagaggtggtccctgctccagtgggcgaacgatcagagatgcactaaaaaatataataccacacatttttattgacaggtttactgactgtatactggatgttcaaagatgggagannnnnnnnnnnnnnnnnnnnnnnnnnnnnnnnnnnnnnnnnnnnnnnnnnnnnnnnnnnnnnnnnnnnnnnnnnnnnnnnnnnnnnnnnnnnnnnnnnnnnnnnnnnnnnnnnnnnnnnnnnnnnnnnnnnnnnnnnnnnnnnnnnnnnnnnnnnnnnnnnnnnnnnnnnnnnnnnnnnnnnnnnnnnnnnnnnnnnnnnnnnnnnnnnnnnnnnnnnnnnnnnnnnnnnnnnnnnnnnnnnnnnnnnnnnnnnnnnnnnnnnnnnnnnnnnnnnnnnnnnnnnnnnnnnnnnnnncccacacacgacacacgggcgaccacgtccacagagcaagacccacacaagagggccacaagctaaccgccatacccaacaatacccatggcaacacacggggcccccaactgctgacgtccgcattcacacccacacggccactgccccgcccatatctacccccgcctcctccaatggggcaacccactcgctcactcatcggacacccttctgacgacaggacccctcacccttccgctcgccagtcaccaccattcgcgaccgcacagtacccctaacccaaccaatgtcacaaacgcctcacagcgcaacactccccgccactgcacccgcgtcgttccaccggcgtcacaccctccgcccgcatcaatcgctctggcccgctcagcacacctcccctcgcccccccgactcctgcctcccctccacctctatcccc

SEQ ID NO: 414634 - DNA, 761 bp, Homo Sapiens
agtactgggatatcgtcgaccagcgcgtcggcaggatacagaagaattacatagaaaagcaacatttgagaagagagacaaaaggggtctcccacgttctttctgtgccctcaccccagtctcatttcaagagagtagtcgctattacccacaatgtcatgccttttcaaatgccagtaattatatgcttaagaagattaaagctttatttgctcagatcttaagtccatgggacttctattagtaactaatcaaaatgatcattactgttagaaggtgggaaatggtagaacattgcttttgaaaactatatttggcaccattaatacaaaggctgggatcgttgtgatgagtgctggtcatgctaaccatgttcccgcatggctggtgattatgtcctgggttgggttctgcacggtagcctgctttgggttagggacagtcacacctggtctgtcctgacttctttctgggccctcctaaccaaaccaggggaggggagaaggacccaattcttttcctttggtgcacgtagcctggacccgttatggacagaggccaaaggaagataacagtgtggtgtccagagatgaaaccaagtggttgatgggcagttctttgagcaaccttgtttatgagcctattgatattgcagatatagaggcatccaatactattgacctaatttaaaatcttattcagtgagtcaacactctaaataagcaatggagcatggttccattcatctcctgccagtatca

SEQ ID NO: 414635 - DNA, 478 bp, Homo Sapiens
  misc_feature (394)..(394): n is a, c, g, or t
gtcgggctatgtcgaccgcgcgtccgggaatgagatggtgtctgtccagcccaggaagcggtgcccaggcccctgccttccagcgagctctttgcagcaccagctccagcgccatcgcctcggttctggcctgtgtgccccgtggcttacgccacttccagctgtaggcgaacagtggtcgaactttgggattggaaatttccagatggaaggagcagtccacgccttcattccctgcttcagtcccctctctggctgtccaccttggctttagctccttcctgaattgggacctctggaggtggcctgttcttccagagagccatttaaagctgcactgcctggttgagtagcccctggctacaggcaacacataaaacaagaattgcccaanaccacgagagcataggcgcaataatgccattgtagatttcaaaggcttaagacggaaacagtgtgaaacattcattcatttttc

SEQ ID NO: 414636 - DNA, 299 bp, Homo Sapiens
  misc_feature (18)..(18): n is a, c, g, or t
atatcgtcgacccagcgncgtccgcaagtatttggtgctctagtattacagctcacaatctagtagtccaaataagactacagatcattacaagtagcttgataagtatctgtagtcttatttggactactagattgtgagctgtaatacaagtattttgtctctagtattaagccagtttatttggttctatcattaaatacaagtgttgaaaaaattctcagggtcccaaggggagatgcttgggttgagtcagagataaagtaggaatatgcagattgaggaaggtaaggaagata

SEQ ID NO: 414637 - DNA, 851 bp, Homo Sapiens
  misc_feature (87)..(393): n is a, c, g, or t
ttcgtcgacccacgcgttcgggctgaggtgcctaaggaagtttagaagcagcacatctttgcattctcttagaaatcctgggtcacnnnnnnnnnnnnnnnnnnnnnnnnnnnnnnnnnnnnnnnnnnnnnnnnnnnnnnnnnnnnnnnnnnnnnnnnnnnnnnnnnnnnnnnnnnnnnnnnnnnnnnnnnnnnnnnnnnnnnnnnnnnnnnnnnnnnnnnnnnnnnnnnnnnnnnnnnnnnnnnnnnnnnnnnnnnnnnnnnnnnnnnnnnnnnnnnnnnnnnnnnnnnnnnnnnnnnnnnnnnnnnnnnnnnnnnnnnnnnnnnnnnnnnnnnnnnnnnnnnnnnnnnnnnnnnnnnnnnnnnnnnnnnnnnnnnnnnnnnnnnnnnnnnngggggggcccccaaaaatttcccctggggggcccaagtttcacgctgtaccccagtcttttcttgtgtcacacaaggtgggtccccctaataagtggagtccgtattatataaaagctcaaggacaactgaggacccgttcgtttcaaacaaacgtcccgtgaatcgggggaaaacactggctagcctcgggcgatccttcggcgaaacgaggaacccccttcatcctctcgcggggggccggtgagacccaatacatttggggacacaaacgtacccctaccggaagattcttaaaagcggctccctagaggcggaccatcttaaaacttctgaacgtcgtatcatatccgggtagacacctacgcgggcaaaatgccttgccgctttggacaagtttcggatccaccgagcgttatgacttgctgaacaacttttatacccagagcctagagtcac

SEQ ID NO: 414638 - DNA, 656 bp, Homo Sapiens
tacgggggtcgatgaatccggcccctcgagtctcttcgtagtgagcacctgtacacaatatctaatgacgaagggtttcaccaatatactgtatagacgatgtactattgatgacacactgcaagaagcagctggagaaggacttcaagagcatggaagaagtactgccagtcatccgcatcattgcccacactcagatgcgtctgcgttccatctacagccagaagaaggcacacttgatggagatccatggtgaatggaggcactgtgtgctgagaagctcgactgggcccgagagcggctggagcagcaggttcctgtgaaccaggtgtatgggcaggatgagcatgattgatgtcattggcgtgacaaaatggcaaagggtacaaaggggtaaccagatcgttggcatacaaagaaactgccccgaaagacccatcgaggtttgcgcaaagttgcctgtatatggagcctggcaccctgcccgtgtcgctttctctgtggcctcgagctgggaccgacaggctaccatcaccgaacagagattaacaacgcaagatttacaagattggtcaaggctacctcatcaaggatggcaaactgatcaagaacaatgcatctactgactatgacttgtctgacaagagcatcaagca

SEQ ID NO: 414639 - DNA, 958 bp, Homo Sapiens
  misc_feature (419)..(573): n is a, c, g, or t
gggatatcgtcgaacccacgccggtcccgccccttaaactgctccccagtgttaaatttcaggcatcattctcctcttctgaccacagtctccaatgctcccgattcctccatgccctctccaccgtgacacccattcttcaacctcatcaagcctccaggtcttgactcctccattttctcccaatctatcaatgcttcctggtttcagggccatcctaaccagtccagaccatggtgaggcatcatttaacctcgcctttgccaacacctcagttcccttgggctctcttctagtatttgtctcctagaagatccccaaccctcttccaatctcacctctcaaattttctccatctctgcacctgagcctcagggtaacactagagaaaatcaagtgatttgtcaattggtgcctgnnnnnnnnnnnnnnnnnnnnnnnnnnnnnnnnnnnnnnnnnnnnnnnnnnnnnnnnnnnnnnnnnnnnnnnnnnnnnnnnnnnnnnnnnnnnnnnnnnnnnnnnnnnnnnnnnnnnnnnnnnnnnnnnnnnnnnnnnnnnnnnnnnnnnnnnnnngaccgaaggaccacggtccctctcaagggaacacagggaggccacgcgtgttggaggagggctcttgacaggagcacgccgaggtcagagttctgggactgctggctacaaccgaaggaagggtcccaagctgaggaccactggagcctcctagagggtgcggacctctgaggcgtctcccctgcaagctttccagcaagaaaacacgccctggcccccctctgcttttcacgtccacgtacgacttacacgctcccgagctgcttgatactcacgtcgcttgccacgcacctactctcccgtactcgtccacccgagaagcactgaagcccactccctgttttgccgcggctgtactattgcgacccatgtttatctaagggct

SEQ ID NO: 414640 - DNA, 710 bp, Homo Sapiens
aggctaacgtcgaggtgggccaacggaacgccccttcaacgcaacgagtttaaacagtaactttttagaaatgaccgtctaatctaggaaggctccataagagaaattaaacattactattgcctgcagaaatagaataggcctcttgtcgaaggcatactttccagccctcaggatggctacagtcagaggatagcaaactccatttgccagcccccagccaatggaaagtccttaaaatccttcaccaagcttttcacttaggaaaggataagacctatcaatgtgctcagaattgttttcaggcaggaaagttctaaatggctagacatataacctctctagctcacttccaacaagaattaacacaactatcagaagcccaacccaggaaatagaaccacgtttatttaacccagaaaatgggtgttagtgaaaaatctcatctctccttccctaagacaagctgggaaggggcctacactgttcttctttcaaccccctttgcaataaaagttacaggaatcgaacttctgaatacatcacactcaagtcaaagcctgaagcgctgagggagcaacactaccagcccagaggaacgtcctgaatatcaatgtgaagaaataggagatcttaagctgcaaatcataaccaatacataatgagtgagggatactcattttactcagtcccattctacctcaccagat

SEQ ID NO: 414641 - DNA, 837 bp, Homo Sapiens
ggcgtaagtaattcagatcgacccacgcgatcggagaatcacaaaggggagtaggggtcattttttcacccatctcggatcacaggaagaagcaagttgtggcaaatgactggagaaaaaacaaaggcaagccgagtgctggggagagatgttcccctgaagtgagacggggctggaccgtaggagaaaggggagagggagggctggcgggggcaactgacagctgacagcagaggcgccgaggcggaggctggaggaaccagagtgcgaatctcgtgcttctcaggggggaaaagaccaggcggggggacacctgctcacaatggatttactcatctgctctgaggtattggcatcccccaggctggtattctcagtatggtatggtccacataattagcagcaccgccagatcccagggcaggcttatgaagggtctgaaccagcagcacaaacaactaaacagtgatgcctgatgctgcagccaaagttgccgggaaataagtgcgggaatcgtcagagacttggacgagggatgcaggaaccgagagagaggagcggaggcagcggggaggggggaagggaggacaaagggtggatgaataatgcttaaggcaaggggagaacgcaagaggcagaaagaggaggaaatttgcaaagagaaaaaacattcaatttgggagaaacgggttgcgccacgttaaagcttggaaggtcgtgatccagaggatcgtacgtagtatctcgtgttgtcctagtctcttaagtgtactcaaatctagtcatggtcacgtcttcatatcatcgatattacgcgagtccttccattgggaacgg

SEQ ID NO: 414642 - DNA, 698 bp, Homo Sapiens
tgagccaccgtgcccagcctaattcttcaattcttaataaacaatttatactgaagagaaaccctacaaacgtgaagaatgttgcaaagcttttaacgtcctcaaaccttactgaacataagataattcatcatggaaactagccctacaaatatgaagaatgtggcaaacactgtaaccatttctcacatcttaccacacattaagataattcatactgaagagaaacccgacaaatgtgaagaatgtaacaaagtctttaactggtcttcaactcatactaaatataagagaattcatacagaagataaattttataaatatgaagaatgtgacaaaagctttaaaaacatttcaacccttattacacataagataatttatgttgtagagaaattctacaaatgtgaagaatgtggcaaagttttttttcttcttttggaaagtggagtctcactctgtcgcccaaatgggcagtgcaatggtgcaatctcagttcattgcaacctcagacatcctgggttcaagcgatccctggcctcaaactcccaagcagctgggattgcaggacgcctgccaccaagcccagctaaatcggtatctacacgtaagaaacgcggcttcacccattttgaccaggctggcttagaacttcttgcacttaagtgctccacccgcctgggctcccaagtggccga

SEQ ID NO: 414643 - DNA, 751 bp, Homo Sapiens
  misc_feature (293)..(328): n is a, c, g, or t
ctatatcgtcgaccaggccgtcgaaggtaagtgcctccctcatcggccacaggagccggagatgtgatgtcctaatagccacaagcaggactgcattgctcacagatgcacggaagtgttcttcagacccagagcttgcgcctgtcctgacaaggctggttactaaccagtaactcagttacttaaattgtccctcttggttcccaggaaactgagaattgaaatcaaagctcatgtgcagtagtttatcctgagggcctggtaacatctacttctctgtcccctttaactgnnnnnnnnnnnnnnnnnnnnnnnnnnnnnnnnnnnnatattgggcttcattgtataaggtacctcaggttgtttttgaaaataaaagacatataaaccctaagtaaaagaaataaaataagcaactgaaaacaccatacaatgactgccaagagtcagttttatatcattcagagaagaacaatcgatttttccttaatagcatggattaggggcttttggtttgtgctatgcaaataatttgtacttctctcagtctgtttaaactatggtgttagaattcaaattaacactaatatcttcagattatacactatcatcattattaactttattatgttcagaacggtggtacttctagatctctgtcatttcccctgggacatttacatctcattaataggtaattatgccactcttggctacgacctgcactgtcatccgtgtaagatcattaata

SEQ ID NO: 414644 - DNA, 641 bp, Homo Sapiens
agtatggggacaggccctcagtcaaacgagggccgctgatatctaggatacttgagggcactctacgatgaataaagcaggatgatgtatgcgattcagaaaccaggcctgacaggcgtttacatagcatcaacacaatcttttgtctgtagggaattagtttcttgccactcttcctttttaggcttagcccatgacacagacaaattagaaaacccctatttaaccagatggtgctaaaaagatttcatcgtaatgtgctttctaatttcaattggattgaaggcggacacatgaaggtcattgttaatatttccccaagactagaccttgaatgaagtgtcttaggcaagtttgttcctgcctgaatgtttcattacccttgcaacacttctgtcaaagcaaagctgttggacaggttcatgtttaagagccttaggaagctccatcttagcagcaattacagcacctactaaaaactaatttacagagacacaccagaaagtgtgcatgaaggtgaacagtttgaatgtttctgcctcctataggcaagataacacagcttatccttgtggttgattaattcacacacaacgactgaacccttgattaactctgaagcggtttggatatgaacatcg

SEQ ID NO: 414645 - DNA, 644 bp, Homo Sapiens
acataggaccgcgccccagtcaatggaagggtgcaaattacctaacgtcctatgatgtgctctaataatacagacacagagcacattgtctcctctagccacacagacacttgcccaggtgatcatattactcggcacagattcttatcacttataaagaacctacatttaaagactacaaaactctaaaaccatgacacttctctatttcacaaaagaaatttctgtcttaatatctactggtttagccaataaagtagactaatgaaaaatttaaaaatacttatgtatccttaacgatgatgaagtcctttggggcttcagaatattcatctttacaggttatccctgctgtacaatttcccatgataacttgcgtgactagctgtcatcttttatacactagtgtttttttagtgtttgaatttttactatcatacagtaagaaactctgctgtttcctgtcacaaacctttcatcagactatgaacatgacagtttcctgttttcttattacctatactgcattttccatgctttattctttgctaacttgtatacctaccttatcgctttccttttctcacttcactaaactcttatgcgggacccacattgtttaatacacaccagaaaattctaac

SEQ ID NO: 414646 - DNA, 1070 bp, Homo Sapiens
gacggacgtgagcgcccccgcccccgtagcaggtgccgtccagcaccggtcagcacgtcattgcccattctcgaacatgtgcatcgaaacgcacctgaagcatggggtcgttctcctggccgtaggcgagagtaaggttccaccgacacatgaggcgctttacaaaaactcaaccaatagcacaagggctgctgatgatcccgcacggaagctaggtagcggcagagagcctcgtgtctgctcgaggtgagtcaccgcgcgggaagcgggcattctacggctggtgcctgatcaggcatctctcgatgatcgatgtgccggtggatcgagagcccgcaggagctcgatcctcggttatcaattcgaatttgatgctgctaggggcagtgcggttgtggccgtgcgctgaaacggagggaagctctccaatcgagggtttgatctcaaaaggacctccatctttgctaaaccactcatttccaattcctgagtgacccgggctaagcgggcctggtcttatcccatggaccccaggacagcatgggaacgacgactaaaagaagcactaaataccatcgaattccccgtgatctaaccacttgggccggggaccggttctacaacggaaccccttgagaagccagctcgagtgtttacacgttggcgttgaagctccatccggcagaacgatttgccggcaaccggccgctcgcggcacttccacttcccggattgggcgcatttcttggcaccgtccttcgcccctggcaaccatggcaggttcccgccgtgcgggtaaacgtccctgaggacctactctgcaaaaagagggctatcgtcgtgaatggtgcacagagccctcgtggtacaccaggtgccatggaactgtgtcggcaacccatgggaacgcgtgtcacgcaaatatgctttgccgacgacttgcctaggtgaaccatgtttgccgcgaagagggctggacgttcaggccgttcaggccctctatttccgaatggcgagacaacttttcgccatccttctcgcacgcccatcgccggtgcctgccacgcact

SEQ ID NO: 414647 - DNA, 1061 bp, Homo Sapiens
  misc_feature (758)..(758): n is a, c, g, or t
ccgcttatgtcctggtcttgtaataataagcggtagagaggagagctccccctaatactgttcttccatgtgcagtgcccagttgttcatgtactagctataagatcacacggtccatttgagttcacatctcgtaaaggggtgtacaccgcagtgtgagtataagcttgacccttagagctgggcatgaccgagatgagttgcatgatgcagacttgggagtagggtaacccctgggatcccctctgctcggtaggagcgagctatattagattagatagaggcgaagaggactacagtcatcccagtttactaaatgatgcgagagccctctaattcatggcaaatctattacaatgaaacgtggagtatcctatacccttggataatatatatgcaaccactatgtgttatggaagcatcctgggtctatatatcacacccagtatgcttagacttgtaccagaccgtgtgtaggctctgtggcaaaccaagcccggcaaggtgtgagactcttttggttgtgggccccctactaagacgggcattgcgtaaggaatacgcactccgcgcgtagataatacacccattatgatgtggtaaaagcgacatgatccaccatggccgaaaccgagcgaacagcaccataccatgatgcgcattcggtatacaagatttacgtggccatggctgttcttgcgacaaccaagtgtgctctagaggcggcgttccccacaaaaagacgatgggggggctgngaggctggctacaacacgcacataacgacaatttccgtaggcagggcaccgcccaatataggcccgtgcggggtttgaaaatcgcccgtataaaaaataccgcgacagtgggggacccacagcaacgataaaatcttgctcggagcaatgacaaaacgcaaccgccggataaacaggcccatctggtatttggaggagacacacaaggggtcgacattgtgtcccacttggagacgctcggagagcatatccccctggaaggcctcttcctccgtagtgagctgttgcgccctcttttcgccg

SEQ ID NO: 414648 - DNA, 934 bp, Homo Sapiens
atttcctgattggttcccagcgcatgtcccccagaggggagatgtttgaaggtcataacggctgttgggaaatgctcttcctaccccgggaactagttctgattcattgtctacatagcacgagttcgaggaattgcctcttgttagaccgtagcggactctcagacacaacttcttattcgatacgtccaggatagaacccacagacagtgggtgcgtgtcatgtggacaagctctcgtgacctctaatctcgtgggtgcgtgcgtgagaagacatggcgcccatgcgtgcaaacatatttgcgtcactagaattgtagagacactctccttcccacgtgcgatatactgattctcccgaaacaaacagtggatattaacagagaagacactataaaaaatatgttgtaactgtctcccgaaatgaagggccgatactcaaccgaaatacacaaatatcctcttataggagaaaaccgcgtgatacccgtgtgtttcttttggcaaccccccaagatggtgggacaaacactcttctagtaaaaacgctgtcgtggcgacaccatagatgatgcagtgtttcttataccaagacgacgttgtgctctcatgacgacacgatgtgttgccccaccgttggagaactgaccgggggccatattatcctctgttggtgacaaagatctgtcgtgttcataagggatatttcatctgctgtacggaagagagaactataggtctcacctagtatgcagccgatgtcgtagttaacaacaactcgtaggtgcataatcttgctcgtggctaacaacacacaacgaataccacgaaaaaagaggccgcgccgacaacagtaagaccgacatgttttccgcgcacaggaagaaaaccccccgccgacaatatgataaacacgaggacgaccccgcaagag

SEQ ID NO: 414649 - DNA, 1416 bp, Homo Sapiens
  misc_feature (935)..(943): n is a, c, g, or t
tgagagtagctttgaggagcctcatgggggagctggggggtgcaagggacctgagctgagaggtactcatcgcttcaatgccccctcccttgctgaaggcaggacggagtgggcgcagaagtcgcctgataccgatctctgtgtcaataaccgcgattcttagtctgatgacaactagtcccggcagatcactcctcccaatacatacctcccattgaccttgtagaatgcatcccgagggaggtgtacgagggagggggctcccaggaagggcactcaggagacggtttacagaagacctccctccagcagggtctccttgctgagcgttccctttgtccactttacttacgtttcttatagggtcaccgtgctcataagtgccagctcgctactaccctaggggcttaccccacgtaggagttgtaccaaggctgtgcttacgaggccagttagactcccttggggcttcccaagggcatgtaggactaggggcgcaaaaccaaccacgaggttcgcttgtcccggaggagggctggaaaggagcaacgtggcaggttacgcaggactctggatatcacttgctgtctgctatggactctactgtaaccccgtttgctccttcaccagctgggtactttcgacagtatggagtttatggtaagctaattgtactgttcacccctatatttctcgctggttctcaatggagcctgcctcaatggtacgcaacaatggtaaaactccacttatgtggtctttctcatgttatatgttactcctcgagttagttccctctcatccatagtcccaacttcctagtacgccttattatacgtcgtgcttatttaaagccatttgcagtatatagagtaattaacttcaacatgggttcccggtttaagggttataccgggtttaacaaaacaaaaaannnnnnnnncgggcaatacgggagaaggtaccgcccctgcagggaggggtggcccccaacggtatggagggcgcggaaacacccacagatgctgttgtgcaacagaagtggtggggtcccccaaacaagggagagaggccccgatatataaaataaacgcccaagggagctaatgaggcccaggagcggaaatatacaccacggcctgtggaaacctggggaacaaaagtgcagatgggacaaggaggacgcacgtggggagggaaaggcaaccctgttagaaatcagtagagccgtggtgtagcacaatagagtggggggcacacatatcttgcaggaaaatttatcaagcgtctaatgtggaaagcatttaaaggttataaagagaggaaataaggggggagaaaaagggtgaaaagacagggggatagaaaaattgggttacaggggatggttttgggaaagtttatcaagcagagaag

SEQ ID NO: 414650 - DNA, 1225 bp, Homo Sapiens
agcaatggtggatactgaaggcggaggtggttgcccgaagaagggaactctggcggtgaaagctgacggcgtcgggggtggagcgcatgtaattgctgtgaccgacgcctatggcctgcctgatcatattcctccaagacgaaggcaggacggacagagtgtcggatcagcgatcgtacgagacaaactttctccgacggaaggaggtgaccctatgctgcacgtcgcacgacaagctgaacgggtggagtcaggggccagagtggtaggaacgaccgatgcgtgaggcaggtgacaacagagtcgatgtccagggaacacgaaccttgcggacgacttcggagagaggaatgagagcgagaggcgtagattcatctgagtaggaagcgcaatgaggggatggtagagaaagatgagtgaccaggaaattgctgggagagaaacaccgcacaggtggcgttgggtaggtgacttttcagtatcttgggaacgaagcgtcttggaatggttggcaccgaattgaaagataatgatgtgcatcgtagcgacacgaaggctgtttgcagggcatgcgaaagtctagcaagggaaccagtttcataggaaaagaaagggtatccaggatcgattcccgtgaaggcggatgccaaaagttattcggaagtaagaataggtccggtcgcttggggcattagatacgaactcaggtggtacgttgagcgggacctccaggtctggaggccttggcacaaaaaagcaccttcgtggcgcattggggggtccccgaaggacggatgaaacaataatggtagaccggttgtggggtttacgataagtgaaggaatcgaaagagataagaattcttgcgtcgaaaaggatcagtgcgtaagctcggatgaagaagatcgggagattgtgaatgcggagtggggactactgtcgaactcgaaggcgctccattctgtgaacaggaattgaatttcaaccaggggagagtaacaggaagtgttgcggtccggccaagtggtgtaaattctgccgggaaattcacacaacaatcattggtgccgcaccgtagagccaccaatgagtaaagagttggggttggatggaatggtatgacacaaaggttattatatgatagcgtatgcacttgaggaaaagggttgcttgtagacacgtaaggcaatttggacgaaaagtagggcagcacctgtagggatta

SEQ ID NO: 414651 - DNA, 825 bp, Homo Sapiens
cacgcgtcgctgtgtcctgggcgactgctgctggctctgattggcattctgtggggtttggttttggttttgctgtagtcctttcaaagataacttaagtgaaacacttgaaatactccattttaaaatttaaactcttttaagttaaagcacttttcatggaaccctcagtcacgagttatttccccacatccttcagtacttaatctcggagcagaattggaaatatcgatagaaagtgtaaatcatgccctcctgctgaaagcgttgtatcaggtttcggctcaaaagagcaccattacctttagctgtcacggatctgtacacttgatcgataaacttcaaatattattagaggtagaggcttcagagattgctctgttcttggagagagacagagataaagtctttcttaaaaattgacttgaatttgcactctcagtcttcctggtgaaatgcatttctcttaggcatccagcaactgcaagggggacagatttataggccatgtgcttcttgtactgaaagattcaaatggtaaatccttcacatatgacttcacaaatcatgtaaagttaaaagatttttaccgtttctgttgctgctgtgcttaaattgtaaggtacagctagtaaatcattttaatggaggtgtcgtacttgactcaataaaacagagaagaccagggttgagctaacagtccaaaatgtcaatgtattaaccaacgggagaataatggcgagactacattataaatctcaatgccataaggaatcagcaagggggaagaagcaccatgctaactaaaacgcgacacgacaaaac

SEQ ID NO: 414652 - DNA, 1331 bp, Homo Sapiens
gatgagttcgataatggggggtggatttgagcattggtgtgatgactcgcggctcgcgatggaatgcgtaagaatgggacatgtgatgtgtggaatgcggctggcttgaaaggtcgagtggatagtatgagccggcactagtttgaaatgtgcggcgccgtcctgatcgcggtgagagataggttcggttgaacacgtagtacgtagtggtatcgatggtttcgctacatggcacggcgttaggagacaacacacgcctgagagactacagttagtactgagtgagtgtgcgtgcagtgtcttccgtcgtagtctctggtacattttgtcacaaatggaaggcgatatgcgaatatgtcactggtttaacatctgttacgatctatactacgcaatggggaacgcaatcatgttgtaaaatgtcctgctcaggctatagatttccacataggggtatcttgggagttcttcggtaacactcctagacgcttgaatcgttaacccttgagaactatctgaaaagatgagtatacagggtctcattcattgacacgtatctagagcaggttcatgtaacactggttgtcgggggccgtccaccggtgctacgttcatcgttttgtctggcctatccaatgattgtttagaaatcctatattgcgtatgccctgaatggtggataatagacgagagcagaactctgacatctgtactctgtgtctgctagtccattaccgatctcgataccaccgctggtgtaatcagtggggtcccacctgctgaatggactcggtctggggaacgcacgagaggaatttcagactgggaattcaccatacttaggtgaaccacttcgttggttttcagctgccttggtgaaatttggagtactaggttccggatttgaaccccccttcccgtttcacactaaggacccggactactagccttaatggaaatagacttgaggacgggtaccgagtcatatttgtagtagccaatatgtcgaaaacggatggggaacaaaaatttcaatatcacaatcccacaaaacagaaccggagagaataaagaaagggggattcaccgccaaataacgaaatggaggatagaaaaggaccccggaaatccaatggagatcatatacccaggaaaacatagaggtacacgagggcaaaacaaataaagaggagggtaacagagatgagaaactacccatgggacagatggagccgaattatgaaccatgtccaaggcacccctgggagcaggccaaagacaccagacgtggatggaaatagactagaaatactttgaggaaggagaacacg

SEQ ID NO: 414653 - DNA, 1692 bp, Homo Sapiens
  misc_feature (906)..(906): n is a, c, g, or t
gcggtggccgacggaagcggggaacgtcgcgacgcgcgaagctgggagggcactttacgcgtgaagcgtatcacctccgctgctatgtggcgctcgcggaccctgcatgccattctggaacgcagcgacgaggtcgcatgggagggagcagctgaacgaggctcgcttcgtagtacgggggaccgcgcgcctctcccgacttgtgtgtattctgggccacggccgtcggagggaggccggcgggatcaggaagagccgacccgagaagatagccgacggcatgggtgcccagcctcgtgcgtgtgggccgctgcttaagcgactcgtggcatgtgcgtgcgacgaaccgacgagcattccttgcatgtgtcgaaatagctatgaactgtgttgttagatgaggagcaatggtggtaggtaaggcgtagccaactagtgagcatcatttggatacttgctgaatggttccctaaggagcttgcgtagcggtgagtaggtacttcggtccatcacttcggatacgccacttgatgaagataggaaaccctgcattgcctgggaaatggctgggtgatcggtcgtggtaggagctcatgtggcacatgacgtggggggaaaaggctatcggttacccggcctgtagccctcacgggagtctattcccgggagaacgggaacatggacagataatctctgagcaatcatccatcccagtgccggttcgcgatcttcgaggcttatgcacttgaaaattgaactgggcttcacttgaccaataagttgcttcaaaacgtggcaatctccaattgaaagtgtaactttgtacaggtggcgggggttaatcaccaggggtaacgtgaggttggtccaatctgagagcagaagtgggcatgtccccttggatcnccaatttgccccgtagtgaccaatttgagagactttgcgcctagggaaccgggtggtatgggccaatcgccaaggattcttcccttgaaaaggttgggcgtgaatcagtgattattcacgcaggggactaaaaacgtgttgacacaactgtttcgtccatggacatgttaagggtcccctgggagagctggccagaatttgatggggaatatgtataatacaaagaattgacgaggagtgttaactaacacaagtgaaaaaagtggactcatttactgaagttgtgacgaagggcaaccaagtacatgtgatgaatgaagcaccagagaatatattttacctggagatagagagagaacataccattgatggataaatgagaagagagaacatgaatatgaagaaaatgagagcatatcattagatgggatgtgaaatgtaactcggcggcaacacacgaccaaaagaagagacgcggaggacaggacacacacgcgacgggagagaccacgagacgaaggcaaagcacaaggacagaccacgaacaccgacagaaaacgataggaatgcgacgaaccggccgtaacctcaaacaaagagacgcggcgagcaaagcgaaagccacgaagcacgaccaataaccaggacacagaccgacagaaggacgagagaaggcccagacgacaagcaacaagacacgaagacgacgaacaaccgacaaacgtaagaaactcgaaacgcaccataggacagcacaacctcgcacacacgcaacgaagcatacag

SEQ ID NO: 414654 - DNA, 651 bp, Homo Sapiens
agtgtacgtcgattcggatatcgtgaacagcgtcgaggctaattcagaggatggggctgcaatggggtgtgggtgggtctctgaaggagacctcagaggagagacacgagtaggagggcaggaacgggcaatctggatcccacatcagtgtccacctcaggcagtgctcgatcctgttatctgtaaccagctcaacaaagcaaatactcagaaatgagcatgggagctgagagcaggagacctgtgaggaggtggctgtgggcattcacagagggcagcaggatgccaggcatggcagagcacccagcatgcaaagacgcggctgggctggggactaggtagtgcccaggccggccccgtccctctgagcaggaactctggcagcagctccgcaaacgtggagcagggggacattctccccgccagcccccaggatctccatctcagagggccacaaaggggagcagctatgcccagtctgaggggcagctgaacatctaaaccagccagcaggacattcagctgacagagggtctcgagaccgggctggaagtctgaccacaatcctgggggaccaagaggcgctgaggattctggagcacaggagtggggtggctggtatggccctgtagtcagagccgggtaggactg

SEQ ID NO: 414655 - DNA, 634 bp, Homo Sapiens
  misc_feature (590)..(591): n is a, c, g, or t
  misc_feature (600)..(600): n is a, c, g, or t
cattgagcatcttcagggtgttactctttccttattttactatccaagagctccagaatccctttattccccatcccaaggccacttaaaaaattactaagtgaacaattactaaaaattgctactagaatgaatatatttaaaaatatgcttaaatttcagtattgtcctatacaaaaccatttctcttcgtaggaagagaactatttcattgggctacattgagcatcttcagggtgttactctttccttattttactatccaagagctccagaatccctttattccccatcccaaggccacttaaaaaattactaagtgaacaattactaaaaattgctactagaatgaatatatttaaaaatatgcttaaatttcagtattgtcctatacaaaaccatttctcttcgtaggaagagaactatttcaagaacctcactatttcaagaaccttattttgccattacttctttgttagcatcttcacatggcacagtgagtctggaaagatttccagcctcttttcttccattttgaattctcagagggcaatattttgcttgattctaaaagatacatgagtgaaaannaatggagtnctgtcagattcctctgccttggactgagtcatat

SEQ ID NO: 414656 - DNA, 235 bp, Homo Sapiens
  misc_feature (182)..(191): n is a, c, g, or t
  misc_feature (196)..(196): n is a, c, g, or t
gaggggggggttttttatctacgggggcacaatctaaaaattcccccaccatggcatgtgggacaccccgcctcttttcctggagaacttgggcctgtgtctttggccccatctttttttccgaggtgtctctggggggggctgcacctttgcacccctaatcctaatcttttttttcaacnnnnnnnnnnaacanaggctttttcttaacaccctcctggggagggggccctcc

SEQ ID NO: 414657 - DNA, 140 bp, Homo Sapiens
tactcacaggttcagctctttattggacatgttaacaaaagcagtttagtcaaaaagaccaaagcccatgtcatcctcggattcttcagattcttccttctttgcttctactttcttctcctcagctggggcagcggcgg

SEQ ID NO: 414658 - DNA, 165 bp, Homo Sapiens
tttactgactataacaattttattgtaatttggagataacaattgatgtttagtatgtctttaggatttaggggcatagaaaactcccagagtcggaattgggaagagaaagacaaatcacgttccaagtatggcatttgacaatccagcctttattaataacta

SEQ ID NO: 414659 - DNA, 157 bp, Homo Sapiens
tttttacagagtaaacccttgataaatgggaggcgttattatttcctagtacaacagacccaacggtgaagtcaggaagtgagagcttggtgaagggccttggaaccacccaaaaggctcactcgcgctgcttctcgggctaggattttccaggtag

SEQ ID NO: 414660 - DNA, 100 bp, Homo Sapiens
ttttgctcatccaatttttgtgacttgtttaatctaattaattatataagtagtaacggcagctaaaatccaaatcaactttagcttcataagaattgtt

SEQ ID NO: 414661 - DNA, 255 bp, Homo Sapiens
ggcccgaatgttcctttttattcatctatctgctgcttgacaggattcacggatggaggctgtcatattgtacccgcagctagtatactaataccccggcatgttgctgttccggcttctctttgcagacggttgacgctgtgaaggaaaccgggcatcttgagcatgtcgctagtatgtaggtatttgggggctattgaggtgaggctgcatgggaggagcagtggctgcctgggagctgatgttggcatccaa

SEQ ID NO: 414662 - DNA, 226 bp, Homo Sapiens
tgaaattaaaatgttttatttgagatacaagtattacaatttgacacatacatgaagaatgggtgtctttagtgtgtccaaaacataaagagaaagttagaggttttataaagagggagacagagagaaaaatggtgtgtatttctctttgagaaagttcactggcaccagtaaggtttttgagagctggcaggctctgacaggtgagggacagtggtgggtaaaa

SEQ ID NO: 414663 - DNA, 376 bp, Homo Sapiens
ttctatatcgactggaaggtatattatagtaggtagatactcaaagcacaggtgttgttacaccagcgtatcacatggaacagacctccttgcggtcttacacagcacagcacgccttgcccctcttcgaaacaacgaaacagcgtaaactagtttacagcccaaggctctttgcctttgaacggacaacattggcaatgtcgtcctccaccgagtcattcacctggggctcccagccaagatacttcttgaacctttgacccacgctcttggagttttgacccagcgaatccgcgacagggatgtaacccttgagctgcttctgctcggcgagactcacgggcttgactgtcacttcctttgcataaccttgctt

SEQ ID NO: 414664 - DNA, 393 bp, Homo Sapiens
catttataaaggaaagaggtttaattgacttacagttcctcatggctgaggaggtttcaggcaacttacaatcatagtggaaggggaagcaagcaccttcttcacaaggcagcaggagagagacgagtgaaaaaggaggaacttctgaactcttataaaaccatcagatctcgtgagcactcagttactatcactaggcatgggggaaactgcccccatgatccaataacctcccaccagctccctccttcaacacctggggattacaattcaagatgagatttgagtggggacacgaagcctaaccatatcacccaccctgttcatgggcttttccctgagcactgcccccataatgatctaactccattattgaaccagtgaaataactta

SEQ ID NO: 414665 - DNA, 340 bp, Homo Sapiens
ttaacattttgtcttcaacaattccagagattggtatgagaatgaggataattgaaaagtagctgatggaggctagttggccaataatgataaatgggtgttctactggttggcctccgattcatgttaagactaggaggttggctactaggattcagtaaaggatttgggtgattgggcggaatgttaagctgcgttgttttgaagtatgcaggaatggtaggaaggctaagattaggattgataagattagggctacgactcctcctagtttgttgggaatggagcgtaaaatagcgttcgcaaagagaaaatatcattctggtttgatgtggggtgg

SEQ ID NO: 414666 - DNA, 367 bp, Homo Sapiens
tttttttggtctagatggcattggtcagcatcatgcacactgtatattcacaaaatgaggtcctcagggtgaccttgagtgagtgctgtgggtgttactgaaaattaaattgtactgattttttaaaggtaatgcatgttcttggtgcagaattataaaaggacaaaagagagtgtccagtgaagagtaagtcttactcttacccctgccttctactggcatggttgtttacgaagaaaccacgtagcatttctgcaggcatttccgctattcagatacatccctggccatgaacaaggtataagtggacccccatccccttagcacacaaaactacaaagacctcacttggggtggattgaagtgg

SEQ ID NO: 414667 - DNA, 150 bp, Homo Sapiens
atcagttaaagcatctttatttttgcaattatcattccatacaaaagcaatagaaatgcaaatattgacaagtttacaattgaatacatgaacagagttatctgtacacatcatttacagcaatattacatgggaaattaactgatcatt

SEQ ID NO: 414668 - DNA, 491 bp, Homo Sapiens
  misc_feature (93)..(247): n is a, c, g, or t
tttttttaacataattcagtttcttccccaaaaccacaggctttagaatacaacaaatctagattcaaattctgatagcaccacttaatactnnnnnnnnnnnnnnnnnnnnnnnnnnnnnnnnnnnnnnnnnnnnnnnnnnnnnnnnnnnnnnnnnnnnnnnnnnnnnnnnnnnnnnnnnnnnnnnnnnnnnnnnnnnnnnnnnnnnnnnnnnnnnnnnnnnnnnnnnnnnnnnnnnnnnnnnnnnttcctcctgagttctgcatcactcttggtctccccagttggacagtaaagttgtctaggacagagactgtgtgccatgctactttttattccccacacagtgctttgtcagaagcaacagctcaataagtacactacttgttcatttgatctttgcaaagagcactaagcttcacgcggtgataaactagaaattgttgtggattgagttgtgtctgtcaaaaagatattttgtagtcctaagc

SEQ ID NO: 414669 - DNA, 120 bp, Homo Sapiens
tgtttcaatattacccttcaacgagcaagtacttctttgcggttaaacatcggtcaacgtcagggttgccaactgtgcttgtcaccgtagttctcccttgaacaaaagtcaattttaaat

SEQ ID NO: 414670 - DNA, 359 bp, Homo Sapiens
  misc_feature (121)..(132): n is a, c, g, or t
  misc_feature (150)..(313): n is a, c, g, or t
aacttttattttaggttcatgggtacatgtgcaggtttgttacacaggtaaactcatgtcacggcggtttatttgttgttcagattatttcatcacccaggtactaagcctactacccaannnnnnnnnnnngagacagagtctcactcnnnnnnnnnnnnnnnnnnnnnnnnnnnnnnnnnnnnnnnnnnnnnnnnnnnnnnnnnnnnnnnnnnnnnnnnnnnnnnnnnnnnnnnnnnnnnnnnnnnnnnnnnnnnnnnnnnnnnnnnnnnnnnnnnnnnnnnnnnnnnnnnnnnnnnnnnnnnnnnnnnnnaggatggtctcgatctcctgacctcgtgatccgcccaccctggcct

SEQ ID NO: 414671 - DNA, 321 bp, Homo Sapiens
cttaaatagcatttattttctctcaaaaagcctattatgtactaacaagtgttcctctaaattagaaaggcatcactactaaaattttatacatattttttatataagagaaggaatattgggttacaatctgaatttctctttatgatttctcttaaagtatagaacagctattaaaatgactaatattgctaaaatgaaggctactaaatttccccaagaatttcggtggaatgcccaaaaatggtgttaagatatgcagaagggcccatttcaagcaaagcaatctctccaccccttcataaaagatttaagctaaag

SEQ ID NO: 414672 - DNA, 119 bp, Homo Sapiens
gcctataaataaattttaaaaagagttctttaatttgggtaacagtaccttagcaggtatgatttgtaaatgtcttctcccattcttgtggattgacttttcacttttgttcataggaa

SEQ ID NO: 414673 - DNA, 449 bp, Homo Sapiens
aacataactgtggacatataaacatttaataaatcagcacacaactgtgatggtgattgatcctttgacacgcacgctctgtgtggacgacacgtgctcccagcatggtaggggaatgacctacggggctgacttcggaactgaagactccccatatatgcacactgaacacttgcgtgcagacgctcccgaataccgcagtgcttagccaggcaggggtgaatggagggaacagagcagctccttccagcctctgggcaagcagagtgcttcctttttccagccccaggcatcgccttccctagacacggttttctctctgtgtgttctctcattctttccagcaacagcacagacagagctcagactggctgtgtgtggggtggccacaagacagcgagcctgcttgcgctgccgttgtgctgtgtgatccccgcccagcccttgcc

SEQ ID NO: 414674 - DNA, 151 bp, Homo Sapiens
cgggtgggagcaggtagtggaggaaagttgagccggtagggacgtggggtccgtggaagcctgtgctgcgaaaaatgttgagccgtagaggccgtcggaaagggtggaggggagagtgcgaaggtagtgctggagggcgtgtagggagggt

SEQ ID NO: 414675 - DNA, 241 bp, Homo Sapiens
tgcgtcacagcccctggctaattttttatttttagtagagacaggatttcaccatggtgcccaggcttgtctcgaactcctggactccagccatctgcccgcgtcacctcccagtgtgctgggattacaggcatgagccaccatgccttgccaacagcatgtctctatggcacttagggtgcataaatagccaggagcatcccagcatctttttcatgctgagttaagactattaaatcca

SEQ ID NO: 414676 - DNA, 103 bp, Homo Sapiens
gagagaaggagaaagagcaagaagcgaaggggcgaggagaaacaaccagcagggagaacgaagcagagggagacgggcgggagacggagagaacaagagagag

SEQ ID NO: 414677 - DNA, 256 bp, Homo Sapiens
ggcgttccctactagcatgggctcgtactgctcgaatctgcacgcgcccagtgatagtcacggcatcgtctgagcacactgcggtcgtactcagtgcccacagcgcatgtggtatgagaccagcggtagtgaggcccatctccagctggcatgctattcctcagttactcatctcgaaggaagtactcggcccgcgtagcgcgtgggtccgctgcggcctcgagactagcatcgtcaagactagtgtagcgtgcaa

SEQ ID NO: 414678 - DNA, 296 bp, Homo Sapiens
  misc_feature (55)..(55): n is a, c, g, or t
  misc_feature (80)..(80): n is a, c, g, or t
  misc_feature (207)..(239): n is a, c, g, or t
gcgctcacaatgggggtcacaataaagggctcggttttttcgcacctcggtgagntgggcacaaaactctgtggtgtttnaatactcgccgcttcgctacgccggggcgggggtcctcctttaaggggggggcttctaaggataaagggttgttctcaccgtcgggaagagggggttccttcttgggggggagaaaatttttgaccnnnnnnnnnnnnnnnnnnnnnnnnnnnnnnnnnattgtaggggattttatcccccttttttttgacccctcacaaaaaatttattggggg

SEQ ID NO: 414679 - DNA, 187 bp, Homo Sapiens
aggcgagacgacgggtcaccaaaccccccccgcagaaaaaaaccgcccaccggacacgcccaccggccattggcgtcacaggggcggaggtgccaccaaatttggggccaccccgatcaccccggggccacaacaagctcccggggaggtcaatgcggtggagacaagagaaaccccgcgggtcaaa

SEQ ID NO: 414680 - DNA, 297 bp, Homo Sapiens
aagattaataaaatggagtcgccattgctttgttcaacatttccctttgagtaataacataattaatctactgaaaagaggagccatgggggcttataaagaaatgccgtaatacatgtcagcccaacaacaacaaaatgtgcaacagaacagcccagaaagaaaactgaaatgggaacctctgataagaatttttctttgcatgaggctcctgggcctacaactaaacaagtatcgcactgcccaagtagctggaaggcatttcctatttaaagggtgcaatcactagaaaggagt

SEQ ID NO: 414681 - DNA, 335 bp, Homo Sapiens
caattgtaaacattgcttgttcagtgaaaaatatacttctttcctaagcacagctctgaaatgttacattcctatcatcctaggtaattcctctggtattctaggtttacctggtggatcttctcttagaccctacttatccttttttcacagttcacctagcttttctagtctggactccttaacactaaaggcccagatccattcaaagattatacctgctgcttctctaatgcccctatgcaccactgtcaccaaagattggcaaaaatagttaatcatatttgctctatccggcttgtactggctacttcctctagaatctgactatttta

SEQ ID NO: 414682 - DNA, 174 bp, Homo Sapiens
gtgaggcaccgcgcgtggccccaaaagtactattttagaaagggaaaaagattgatttggaaaacaatgtaagaggaaggtaaattttaaaataatcattcaaagaggagcccttaatggaagactatgaaaaaattagaatagggaaaatcaacaaagtaaaaagaatccctt

SEQ ID NO: 414683 - DNA, 413 bp, Homo Sapiens
cacttcacctgatattttttaataccaacggtttgtggtagaagcattacacagtccccttgtgggccacactgtgacacaaatcattaatagcccccaatagccattcttctctagtcaaagaactcccatattttaattgatcacaaggccactgaaaagaaaaaccacattagttaatgtgatgtaagtaggagtggtatgacaacttcaaacaagtgttcttaaagaaacgaggtatgatcttcttggtcctttctccctcctgatgtctggaacgcagacatgatggcatgagctcaggcagccatcttgggctatgacatggaaggcacgtgcttaggaagccagagcaaccagatagaaggaatctggttgcctggacactgtagagcccatattctccctgaatc

SEQ ID NO: 414684 - DNA, 430 bp, Homo Sapiens
gtctttcctggtgttctgtcctttgccttaaacattctcccactgactttcattatttttttaattggttaactcgtatgtatgcttctttactcagctctgatattacctttttcctttgaagccatccataattcctcatagcagttcctcattatttttttaactagttaactcctatgtatgctcctttacttagctctgatattaccattttcctttaaaaccacccgtagtttctcatagcagtgtgatgtaactcttctgcaaatctctagcaccctgcacagacatttttgctgaacttgcttcactgaattggtatttttagtttacacatctgctcctctctttagattctatgctattcaagggcatgtcctactatactgcttgtcagtaaatattcattggcttcataagagaagac

SEQ ID NO: 414685 - DNA, 138 bp, Homo Sapiens
cgggttgaaaaataaagcatttattttagaagttaattcaaggggtaaagggaaaagaaaacttaatattttatttgtatctattcagagaatgaaaccaaaggtcacacagcaacacacaaactacatgaaacaacg

SEQ ID NO: 414686 - DNA, 438 bp, Homo Sapiens
aaacttttgcaaaacctggctaaagcctcaaatacaatattaaacagttaagaaaaattccaagatgaatatttcaaaggttatgacaagtaagttccttcccaccttacctggaaagatccatcttaaggtgtaacagccagacatatttcttttaattctttagcaatcaagagacaacactcactagatgatgctgaatttctgattacaagcaggcattttgagatctttatggcaaatgtattcctactgtattatttatgaaattttactaaattatatcatatttcatttatacagagtaagctaaggaaagatactttaatacgctttaagaaatattgtggtacagttagaacaacctagttttaagtctggaatcagtcagctgtttaccagccattggtcctgaaggttaagttacttaacctgtca

SEQ ID NO: 414687 - DNA, 940 bp, Homo Sapiens
  misc_feature (351)..(389): n is a, c, g, or t
  misc_feature (411)..(422): n is a, c, g, or t
  misc_feature (930)..(930): n is a, c, g, or t
taagttgctgacctctgtaataatacactttaacttgattgttcttttaagtgtaaagaaagaaaaaaatacccttttgattacatttgctttagtgagagccttggttttagagaaacctatgtattggacttgtgatgttttgggactactgttgtaatggggtgaagtggaatggtagatgttccagaaacttttcagtgattatgtacacctgtagtggttttcatcttgctgcaagctcccatatacaatgtgctaatactacttgggttatcttccagttaaagctagatctttgtagttttgaaacatctgtattcaaatatataagctgcttactttcttttnnnnnnnnnnnnnnnnnnnnnnnnnnnnnnnnnnnnnnntagcacacacaaaaaacaaaannnnnnnnnnnncgaaaaagatttctcccggagggggccccaaatatatgccggacccccccgcttcttggaaccacaaggcgcgccccaaaaaagggagagcccgctacattatacaaccacaagccagcggcgcgccccgcgttgtttctaacaaacacacgcgtggtgcactggcgcgacaaaccattccgtctacaagacggcggcacaactctgtgggcgggagagacggaagcaccacccactataattcgcacagcgagggagggggggcagcgacaccacatttgtggtgtgggaaaacaaacactcactctccccgctagacagagagatactatgcataggacggcctctccaggggggaacaaacatacatcagcaactttcatcagacgcggcgtatcattcatggtggcgttgcatacacacaaccacaagccgaatattcttgctgctcggcgtagagagaacaactgtttgtctccaagcagagaatctatttcttcaaacaccnttttaccacg

SEQ ID NO: 414688 - DNA, 1269 bp, Homo Sapiens
  misc_feature (1107)..(1107): n is a, c, g, or t
cccaaccactacaacgcggctagacgcgaactccgctgtccgacagcggctcggtgaccgcgacgtaccgtagcgcggttctacgctccccaggcaacatctgcatgctaacactcgagtcaacacggcccgtggcgtctgatgcctacaccattggcctagtctcttggcgcatccgtctttcgtcgctcgtcggctccgacccttccgtcgttcgccctctcggtcccattggcacccgtaggagctcgccgactcgcactacgaatcagagcactgctcggcgcctcgacgcactgcgggagtctggacgatcccgggacggaggggtgtgtatcgctctggtcatccctgggagagcgtccgagacgtgtggggacgtcacccattgtgacatgcaagtgcgtaacgagctttgtgccttcagcgggcgcgcgcgagggggacagacgagcacgggccttaaccatgcgcattagcgcgagtcgtcagtgacggtcccgacccttccaagagttcgtatcctacggctagacccacgttggaagggatgggacataccctatgttttgttgacccaatcccttgaatgacaggtcctcgggcgtcgacaacgcgaacgcacggctcttgcgcccgcacgaagtcggccgggccgtcgcgtgcttccctactgcacttgccaccattggaggcagccgcttggcttggaaatgcctacgttatgctcacgatttgcgttgagaaggcccacgcggtgggaggcctacccatttacagcataagcatgggcttgcccattgggtcgcctttaccagaggtcgtgagtcccggaagtgcccggtggctgccattgtccgcggaggggtgtccttgtcgttgcttctgtgggaacagatttcatatggccgcgctggggaggtcagagagggcgggtagggggagcgcttggccccacatgggggtcttgaggtgcgctgcaacggggcttggtggacaaacggtgcgatagtacccccgaggggacacctgtggtgtggttaccccaaccgccttgtgccactaggagacttgtaatgcccgccttcgaggtagttcttgggacgncccgttgcgtgaagtcttggcgagggggacacatgtcatgggcccccccaagaaggagacttttgcaggggggcgtaaccttgtgtttcatgtagggaactttcctctcgcggcaaacaacttatcattacgcacaattttacgctctatccccccttgtgg

SEQ ID NO: 414689 - DNA, 738 bp, Homo Sapiens
tttctagctgcaggcagagcagagttgagcgtgtgggagtcgaaggagatcgagatggctactgcatatgctcctccgatggcaagccaggtgatgaagagcggcttggtgtgctccaagccgaggggactgtccggcgcttcactcaccaggaggccccgcttcgtcgtcaaggccgtcaagtccgacaaggggacgtaccaggtggtccagcccatcaacggcgacccattcatcggcagcctggagacgcccgtcacgtccagccccctcgtcgcgtggtacctctccaaccttcccgcgtaccgcaccgccgtcagcccgctcctccgtggcatcgaggtcggcctcgcccacggctacctcctcgtcggccccttcgcgctcaccggcccgctccgcaacacgccaattcacggccaggcgggaaccctcggcgccatcggcctcgtctccatcctcagcgtctgcctcaccatgtacggcgtcgcctccttcaacgagggcgcgccctccaccgcgcccgccctcacgctcaccggccgcaagaaggaggccgacaagctgcagaccgccgaaggctggtcccagttcaccggaggcttcttcttcggcggcgtctccggcgccatctgggcctacttcctcctctacgtgctcgacctcccatacttcttcaagtagattatctattattggcatgcatgtacgatgggtgcacaactgcagatgatgtga

SEQ ID NO: 414690 - DNA, 804 bp, Homo Sapiens
cagcattcactttaacatttctattttcctttatcatttctgttacttgagtgtgtaagagtaatcaacataaataatctatgtttacatctcttatttctctctgaaacagttccctagaatccacaccacatgaaacacaaattgagtagtgtatgacccacctgaattccaaagcattctaaaactcccgtattttccagcctagcagttagctcctgctctgcaagacacaccctcttgaccttgctgctagactgtatgggccccctgaagtcatagtagctggctcttactcatccccacattcacttggcatagttgatgttcaacaaatatctcttggttgcataacattgaacgagccaagtcacctaagaaatccttaatttatacacaggttcttagggtacctgaatagggcaacacatcagaagtacaaattgagaactatacaaagagtaaaataattcttgggttcaaataccctagagccaatcaagtttagtcacaaagaatttcaattcacttcaatgtggacagttaagaagggaatttatcagccttaggtggaaatcagagccaccatgagtaccacgtgcagcccctatagtgtttagctttgccagaagtcaccagagaaagtggctgaggaacagaattccagctcatatctggctaacagtggcactatgggagtttatatgatctgttcattattctgtggcatcaccttctaagagcagagatgtgacccaataccccttgttttccttaaagataaccatttaaattatatccatg

SEQ ID NO: 414691 - DNA, 1033 bp, Homo Sapiens
  misc_feature (326)..(326): n is a, c, g, or t
cccgtcaccaagtgtttatgggttctacctattgtcagaaatttgggggagaggggaacctgttgtacttaacccggttgttggcacccatggatttatcctcttagaagggagaaaaaacccaagcactttaacccaagttaacttaactgtgactataaaattagttcccaggagggtgtgccactggtgcctagtgaagaacacccaaactgttagaaggtgactcagatgtagaagctacctagtggaagactagcgccgagttttcacaagggaaagcacctcgtgaaaccacacttttggaccaaagaggcccctgtggnccaagatattctttggacccagaagttattccccatgtggcgaaattgtgaaaagacgcgacaacacacgagagttccccagggtgtgtgcccccaaccgcgctcttgcagacattttcttcacgaaacattacccatttattatatcgcccccaacaacgtagaactcaccttgacgaaccacgatgggcaaacaaacaacgtttgttagtctcctgtggctgtggtatatacgggagaaaaagacgctcttctgtgaaatctcataaacgccatgattgtgtgaaccccaagcgcctgtaggaaaacacaccacaattgaacaccctgttgtctcccccctttgttggggcccataagggcgaaatatggcctcattcatcctctcccctattcccacagtggcccctccttagatttactaaacaacggctctgacaacagcgtgtggaggcaaggacgtgtttcccgcaaagagggaatttatgtggcccgcgagtcttttttacacacgtctcttaaaaccccgcgaattttgggtgaagcccatatacaccacaggtgttcgccataagtttttagagccccaataacaaaagtccggaaaaaactccttagaagttaaaccccccagtggggaaactctgacacatcacaacagtggcactccaccgccccaacccctcttcttttcccgaacacccgaa

SEQ ID NO: 414692 - DNA, 569 bp, Homo Sapiens
ttatcccccttctcttttccccgggcaaaataatagagattgtctcccccccctgtctctccccgtgtgtggtgggggactcttctcccagcgcgagtgtctgtgtggcgcacccacgcacgcacggagtgaccaaatattttttgtcttcgtcgatgacaaaacaccgtgtgttagtggtggctctctcacaaaaagacagttgccccaggtggtgaaaaagcctggtcctgaacacaaatgttggtgctaatagactcgctcgctccaacatttcttaaacaagtgcgtgctgctgcgtgtgtaagagaaatctctcgctcgcaaatatattagaggagctcctctctctcttgagccccccctgtgtgtggatataatatctcccccacgcggggaacgacaatatcaatgtatcgtgtgagaaaatatattatctctacaccccgcgtgtggtggggtccgacaaaggacaggacggataacacacacaatacatttaatctgctcacaaccgtaaaatgtgtgtggaggtatatctctgtagaaaacagtgcgtactgagagag

SEQ ID NO: 414693 - DNA, 1192 bp, Homo Sapiens
  misc_feature (487)..(487): n is a, c, g, or t
cttgtttgtttatgtgaggagggggaaaagggggggccgccccctgccgccggccagcaccaaaacaacatctcccctcccaccgaagaaagagccacaagacgcctcgccgggcggggtgaccatcacgtacacaccagcgaaacaacaaagagcaagacgtgaaactacataacattccaaacagagagcgtgcgcggaccaatgaaaaaaagcacaaaatacaaactagagagagacgatgaggcgaggagagagtgagccgcgctcgaatgactctcatctctctctcgatgcgagaggaggtcactactgatcgagcgcgatgcgttgtggatctaatcttggtggagagcgggacagagtgtgtgtgttgattgtgtcctcatctgtatcatgtatagatgctctgagccgacctaaccatacatacagtctccacgcacacttatatcacttgtagtgtagtgtcgcgtaacgagccgangcgctgtcgtctcagcctctaatactataagagaagagaagcgtagtagcgagtatccgtatgcaccgagaggcaccgcacccaaccccgccatctgaggaaccaaaaagtctaagaaacttcgccccctccctacactgcagaaccgcatgatcgtctctgacttccgctgtgctgagctggtgctgatgcctcgcgacgaactaaaagataatcctactaactcacctctgacgctatgaagtcgtgatgtttcgctgcgctacgtatcgcgtccgcgccgatgatgataataacgccagttggcaaccgtctcccgataatagatgctcacaccacgacctccacaagagtcagcaactcactactcaactacgtctacgtacgatcgtatgtctctacccgcaaaggagataggccacctcaattgcacgacagtgctgcgcatcctacgtccttcgtcaccctctccaaaatcgtctagacttacgccaaaccaccccggcacaagaatacacatggtagtacgaacgatatcctcgcatagaaatagatgtgttgcagagtgtgcgttgtgggtcgtccctctacctcgttgtcggaccctacccggctcttagatggaatgccgctagggctccgtcttcgtcgatctggacctatggtgttgataagtgcgatgattcccatcatactacattcttg

SEQ ID NO: 414694 - DNA, 1331 bp, Homo Sapiens
ccgtatttacacccctttccccaggcggttagagatagcgccaagggccaacatctgggaatgaggcgcctgttggtgcttttaagagattttgcccataaatatgaaaaaattttgtcgccccctcccacattggagagcatccaaattggtgggcctacaagtttccccctcattctctaaaaaaagagatgggcggggagtctcctcacagggggtgtatctctcccgagaagactatgtgcgaaaagagcgcgacaaacacccgccgctttatccgcgtatctgtggtctgacacaaaaaactctggtgagacacaaacgcgccacaaaggggggccccattttgtgtgcgtgctcccccacaagtctttggcacgcagttttttttctctcagaacccacgctctcttggtgctctgtgcgaccaagcagagagagcctcgtcggttgcgcaccaccctctatgtgttttgtgccgccccctcgtcaacaaaatattgtgtgccaaccccacgggcgggcgcccatcatattttaaacagagaacagaaactcaacagagaaattctcttgcgcgcaacctgtgtccgacagggctggcgagttcttctcatcacaacaacaatattcgtccgcagaatctatctttcttcacccgaccacttctttcttttacactatccacaccggctctgccggaaactattcttcttattatatatatctatctgctctctctctttatactactacacacctctttgcctccatgcgcgaacacacaacgcgcggccaccggacgctagcgcggagcccatctcgaggaagacccacactgcaggcaacccaccgaaggcaaatacacacatctcccgtgtcattacatccaaaaacaatgtgtttttcgagcactctaccacacggacggaagacacattttttctgcgcgcccccccaaaacattcgtcctaactaaaatgatatgttgtttccacaccacccgccggccgaaagaaaataacccagctgcccgttcggtattatacacccccagcgagtgtctctctcttggcggagggaaacaagccaccccgagtgggcggtcgtcttacacatcgtgtctcttaataagaaagacacatcatattatcacctcccgagcgagggggaagtcacaccacgagaggaaagtatcgtacatcacaccatactccaaggaggggagcaccaccacactatctctcaataatagtggcggcacccccatccctccgccccctccaacaatttattagaaaatcatgtcctcccgcggagcatcttccccc

SEQ ID NO: 414695 - DNA, 1565 bp, Homo Sapiens
  misc_feature (1309)..(1322): n is a, c, g, or t
cctctgctccccctccctaccaccaaaataatcctcacagccgcgacaagtgaggaggaactatactctactgaggagaaaatagaactccgaatagaagacgcattcctcccatggattgtattttctatatcatgccctcgatctcatgtagtaaatcatagtcttctctctgaactaccttgcagtggtggtgtagtcaccaccacatatatatttatcggccgctcgcgcacgcatccacccaaggtgtgggcgcggcgacaccgttgagggcgataatgtattgcggccctccgtatgtgtatgcgtgcgcgcgcgtctcctattatgtacgtagtgttatgtgacacacacaaaccacacgtctctctctgtttacatccccgccgggtcttccgcgtctgtatgtatctcgtacgacctccacgtcggtgtgcgagaccatataatgtatgtacatatcctatctctacaacggatgtgtgtgctgtgacgcgccccacctaccaatctatgtgtgcgtgccgagtcaccctactcctctacgcatacatactacctaacaccacacagagcgacgggggcggcgcgcgcgtgcgaccacaacatcatatgatgtgctgtgaggcgcgcgccaaccatccatgtgctgtctctctttgctgacaggcgcgcggcacgccgacacacacatcgagtggcgcacgccacgctatccttacatgttacacacatatatatcctatcctgccgacgctggtgtgtgctatctagcgcgcagcgcgcgcacgcaagtagagtatgcatgtatacggaacgtcgcgtgctgtggcgtacactaggtctaaagcggctcgacttcaacccacatccgcctctctctgtctggcgcgaggaacacactcccccccgcccaaacaaataatacagaaatacactatctcccgccgggtggcgaatggaccaacaacatgtgtgcgctccgccctgtacttatgtccaagaacacaccgcgggtcggggagcaacaaactaatggatctcttgtcctcctccctgtcaaggcagaggaggcggcagtgtcctcttctggcacatcggctccgtgcgtccgtccctcattcgctcgtgcttcatcatccgccatggttctgcgtgcgtccgtgccgcggggcggggcagcttcctcgctcttctctccgccgccccggagacgtcttctcggctctgtgccgcgcatccacctctcattctcgtccccgcggcgctcgtgagcgtgcgcgttgtcggtgctgtcttatcagannnnnnnnnnnnnntatgtactcagcggtgcgggctgttctgtgtcatccccccctccaagctgggtcttctctgctccccgccgcaacgtctgggcatgcgggcaccccccagcggcgcgcggggggcgtccttatctccgggccgcgatcatggcgcgcgccgcgcgagccgatctatatatcttcggcggcgcggagcaccacccccccctccgccctcgtgctgcgtctggtcatccaccactcgagccggtc

SEQ ID NO: 414696 - DNA, 788 bp, Homo Sapiens
cctgaccactcccgagcgacgccaaacgcgctgcgaaagagaacaccatgttatgacagaataactagcgagtagtgttagtagatacaacacccctctctttcttctttcgccgggcgcctcgcgcggtaaactaaacaccccacgtgtcattataaaactacctctccgttcttcgtgggcccccccaaagaaagagaccccgaatgactttttctcttctcaggccctagccctcaatttgattttgttgcatgtggtgcggggcgagaagctcgccgcactcacgcgagctgttcgcccccaagatggcgtggaagagaataattcatcttgtgacaagcaatgaaatgacccgcccacatgagagagtgggtcggttcttgctactgacaactctctctgatctacgaacacgaggcgagtatgtgctcgcccctcctgcgtctgggagagggggaacgaccgctcctaggtcgcgatggagaggctctcacctgcgctataataatagaacggagggggaaaacacacaacccccctagacacttatacccggcgcggggggatggtccgaacaacactgtgcgtacgagaacaattgtgagggagcggaggaaagaaaaaaccctgcgtaccgagaagaagcccgtgttctgcgacagcaaacacagagagaggtgcggtggggagtactccttggccccacgtggtagttccttgccccattgaaggtgagctacccacagcgccgtggggggccttgtgtactcggagcacacgtcttc

SEQ ID NO: 414697 - DNA, 1247 bp, Homo Sapiens
  misc_feature (247)..(247): n is a, c, g, or t
aaacaaggccacacctttttctttagggtttttgttctacaaaaactttaaaacccgggcccaaagattacggtgtttttaaaaggcagaaaaggttggaaaatcttgtggcgcccccgcgtgtgggggccagctgccaacacctctctaggccttctcccttcttgggcctcccagtgtggggtgggcgtgcattcttgtggccagagggctggttttccccgcctgtggggccccacctgtgggngcgcagacacgtttgcctgtggaggagaagcggcgctgctgggtgggcgggagagacgtcctcaggggacaagagagaaagagatgtgtggtccacaggcggccactcccgtgagggagaggtttatgtgacgacaccctcggtgtgtttctcgggaagaggggccgggtggtgtatagacacccacaggcgcaaggagagtctcttgaggggtcccccctcttctcgacaaagctcgcttggtgtggggcccctcgtgtgctcccccctatacccacagagtgtgtgtgtgtgctctccccacctgtgcgtcgtcttaattatgtgttcgcccccctccctgtaggacgaccagcgctccccttgggggaaagaagacaaacccttttgtttagagggcgcatagaacaggggagcaaagaaagagccaccgctgtgtgtcgataaataaaggatattttgtccctcccctcgtgtgtttgtgggcccacagtgtggcggggacaaaaggcctcgtgtgagagtgccccctttgtgtgtgttaacacgtgggagagaaaacctccgtggtgaaagaaacccgtggaaaaagtgtccctcacacgacagttcttccgaagagaagggctccttttggcaagagaggggtgtcttctttatcaccatgaccaattcttcttgtttgcttaaaaggacggcccgcgttttgtgaagcgtctcaaaaagcagcgattaatggttgcacacctcccctaccaaggccccccaagtcctggtgtgtggggggccccagaataaattcccacaaagggtacgatggaaaaccacggagggcgcgataattttctcaccgcggcctagagaaagtcgtgttgtatagtgagcaacgtagtatcatttcgcgcaggatgatttcttctacgaaagtgtcgtggaaaattccctctttagaaaatgtaagagtcgcggcacagggggtaatcaccgggatattcccacc

SEQ ID NO: 414698 - DNA, 1435 bp, Homo Sapiens
  misc_feature (110)..(154): n is a, c, g, or t
  misc_feature (193)..(243): n is a, c, g, or t
  misc_feature (251)..(293): n is a, c, g, or t
  misc_feature (938)..(1025): n is a, c, g, or t
tctaaaacaaaaggaacacgagaagacacagagaacaagcaatcacaacacacaaaggcacacaccatcccccgaccgacacaccacccaggcagacccacagacgggcnnnnnnnnnnnnnnnnnnnnnnnnnnnnnnnnnnnnnnnnnnnnntgactagactccttcactcatctaccatcctctcacaannnnnnnnnnnnnnnnnnnnnnnnnnnnnnnnnnnnnnnnnnnnnnnnnnnaaacttcnnnnnnnnnnnnnnnnnnnnnnnnnnnnnnnnnnnnnnnnnnnctcaaaccaccctcccactcctactcaactctccacccaccacttactctacactatataagtagaaaccaaataaacaatacataattctacggactctctccaacttcaaattactccctctgagaactgcaagcgagcatacgataaacaaccgtacttacaataactcgtctaaatgtatacaattactaaacgagaacacactaaactgaacatccttacattagctcaaccttagtctaaagctccatacactactggctcaacaaagcaacaaactacatatctcataactaccactctcttgtgacgacacccatcagctggcacgctccgctgctccacagtacacgaaactaggcagacggaccccgatgccactacggccctccactccgctcacgaccgagcactagacactggtcctaaagcgaaaagacgtgcgcaaacacacacgcactacacacgcaaaaggctgcgactgcgctcgcgcgacgtcaccctcaccaacactagcaacaccacttaaaactctgacaagacgacgagtcgacgcaaatatgcataacgcaataccacggcccagctacgaactgagcctgcgaccacacgccaccccaaaccatccacccccttccacgnnnnnnnnnnnnnnnnnnnnnnnnnnnnnnnnnnnnnnnnnnnnnnnnnnnnnnnnnnnnnnnnnnnnnnnnnnnnnnnnnnnnnnnnctccatcacctcctactaacccctcacaagctccacctctatcaccatacaccatcatcaatacctaaacatctcactccactcaccgacacatctcacaccacacaacaaactcaacacgccaacatccactccctcacactcatctttcttcatccactataccaccacctacaaaccatatcatatcaaactctacacagtcaccccctcacactcccatacacacagccgcagcacatgacaaccaacacaccctcaacatcaaccaaacataatcatcatacatcaagcgccgcctccgcaatccatccaagctaaccaccactccacctcacaccctcaccacaaccaaccaaaccctactcccaaactccagatcacaactcacagtacaaaggcacaccgat

SEQ ID NO: 414699 - DNA, 866 bp, Homo Sapiens
  misc_feature (394)..(394): n is a, c, g, or t
ccgggtggttacctttaccttgttttttatctctttcccacactctccaaactgtgacaaaaaaaaccatctaaaatctcaacaaccttcctctcaacaaaagggtatcttctcttgaacagcacggggtggaacaaatttgtatgtagtgagaaactcctactccaccaatctttcttaacaagcctggaacaatgaaaatcctctatcgaatgagtacatagcaccatcaacaacattctctaacgtgctgtatggagacaccatcctggaagaggctcttcatgaaaacatattttgtggcccccggtggatattccccacccttttatataacatatttcctcgcaaaacgcaggagaaatctaaacagggcggcgagccacacacgagngtgtgttgtgagatcttccaaaacaagccaacccgccaggctttatccagaaactcactgtcgccccgcgcgcaatgtagtgaactatctcccaggacagctttatatagaccgctgttacccagaaacatcgatttccctctcgagcgaagacaagaccaaacaccccgtgagaagagagtaaccactggcgcgtggggagtgtacctccactccacaagagaaatcccaagtacgcccccccacctagaaggggtgtgtggaagcgcgcgcaccccccaaggcgacggtattttattgaagggcaagcagaagcaattgcttcactcttagatgataatataagacagccggcaccaattaagattagttttcaccccccactcggtgatgtggaaccgcgaagcagataattcctcgagcggggttctcacccatcgcgcaagagcagcaaacaacaacccccggatga

SEQ ID NO: 414700 - DNA, 1060 bp, Homo Sapiens
  misc_feature (994)..(1002): n is a, c, g, or t
caattccacaccaaaacccccccgcttgcagaaaaatataatagagggttgttctgaatgtcgccacgaaggagggggcgcctcaatcctacctcctcagctgtcttatttttgtaccaacgagaagtgatggtgtcggtcgccccccccattatgaatagcggtgcacgtaactattatggggcgcgtacatatacaaaaacacacaaaaaaagacgcgcggtgttttgttttattacttcccttccccagcgtgcgaaacaacaaaacattatcattctatctacaaacaaacaccttgagagcgtgcgtagtattcaatgccactcccctcaccatcctacctactatttaactcttcctctctccctcctctatttatttccctcccgccaagataataaacacactgcctccattctcttatacaacacataagacacgacaccatccttgttgtatctaactcgattctattcgtgctctctcttcttctctatcattctacatcctacttgtgttctctatacacaccgaactccttgctcttctcgtcactaaacagaggagcccgactctttttatgtttgttatccctaccctgaaacgtggccccctcctctccccatacttaaagtgatgtctgtatgatattctctccccgccaatgcagacaacacactaaaaccccctccacagaactgaggctgaaacacaatacactccaacccattccctatcgtaccaccacacaccacatctaatcgtcgtgactcatacaccctatgctgttctacttttaacacaaaagggaacacgcaattttttctcatacataccatcatacatgcaccgtgcgtgcgccgccaccacaataccaaaaacacatcatatttttcttattccagcctctccgtattaatataacacacaccacgccctattaccaccgggacgactctctcgcggacacgcgcaacaagactatggcggnnnnnnnnngtatcatcatcttgctacaccaaaagcactgccgccgcctctccctcccacgacaccg

SEQ ID NO: 414701 - DNA, 1145 bp, Homo Sapiens
cattcatccgccaaaaaggttgatataataattatatttaatgaaaaaaacatgtacgcaccaccacgaaagaagaaaagaccaaaaacaaattagttgttgctctcctctcttgtatatatatatatgtgtttctcctcgcatgtgctgtgtgtggggcagcaccatagaacataatcatcataacaagatggtagtagctctcgtctaccattatgtcttgggagggtggtccacaacaacacccacatgtgtatgtgtgatcgtcatctgagggcgcgcgggagtatccatagatacatataatattaagggagctccttctctacaacacaacaacactctatgttatctatctatatctatctacgagagagacacacctactctaacctactgtaacttggtgagcgagcagaccaccatctcctcatcttttaatcttttcctcaaacagagacgaaagctacctcactctagtatacacaccatatacactaactcagctctcctcttagaatagaaaacacacaccaacagacatataaattaactttcgcccgccgaccaaacatacatcaattcacaccgcgcgcgagggtgagcggcggggggcgaccacgacatatcaagtgatgtgccgtgacgggacaggcgtagaggggcgggaagactaagctatgaaatgaggaatccccgccgtgtgctggcgacataccacgctaaggcggcgcgggaataatctacccgctccacaggaggggaggaggcgaagcaaaaggccggccacccactgatataagacagacggaagagtgggcacgccgccccgacagctgctgtccaataaacgcgggcggtgtgtcatttgtgaccacgacgcactgccgatacaacaaacagacaaccaacggcacacaatgtatagtacatgacccgcgaggggggagaaaacacaccacgaccggcgcgggcgtggtcacagctagaacaccccgctcccacgccccgcgcgaggacatcaaacaatactgactagctgcagcgagggaggatgaacctcggtcatcagacagcaggcagccattcagggagtgggaggggggcaactccccattatagatattagagcaaacacaagacac

SEQ ID NO: 414702 - DNA, 1245 bp, Homo Sapiens
aaattccccaggatggtttttcccaaagctgtggacggtgaactttaaaacaaaaaaggtgactcgggtggaccctgaaacaaaaagacctttttttccaaaaagggttgtggaacatcacggccatctcaaggcacgccagcccctcagcagggcacagatgggctaattgctgcctgaaccgcagggactttttggtcccagatttcaagaaaccccaaattcccttctctcttctacagggtcaaaaactttgggagattctcgtggggcccagattagctcgttgcatgtgggggcgcagccgcaggttacacgctattccagacctggggacattcatcctttgggccccccgcgtgtggtataggtgcgctatcctctgtatcccccccagtgtgttcccgggcaagttatttaggaccctctgggtctagacggacggcttgtggaccgcaacttttttggcagcaattctttacccacggtgtccggggagtaactgttctcccgccgggatgtgtttatgtggtgcccccattctcgcacagagaagtgggccccggggcccgtcgccaggggtgtggaagactccccctctgttgctctgttcgctcaatcgcgcggcccatgcttgtgtgtttgggcgacaacaaacatcttcttcttgcgcaggcccacccttgtgtccccgaggtttccccttatcgttctgcccctcacacaatactctagcacgtgcagacgccttatgtgaaatgcgtgttggtactttcaaaacccggcgagtcgtgtccccaccatactcgttggttctgcgcggcggggaaacaccaaaccggcctcatatcaagcgcgcgggattcaacactgggagacgtctcgcgaaatcaaactcacgcaggttcgcccccgaacgagaagaccgcttttttcttctaacacaaccaattagtccctcgagagttcacaatccccttcgtcggcacaaaaaatcccgcggacaacgcccccgtcgttgggcggaccaatcgtcggacacaggttctgtttgccccaaagataaattttcccccaccaaaaggggctatgtataacaagtgtggtggtctctcctccacattataaatctttcgccggggaggaaagactcgcgccctattcagttataatgcctcaacaaatattcaccgaggggcccctcccaagaacacccgtgtggggtcaactagctgttgtggtcgt

SEQ ID NO: 414703 - DNA, 1226 bp, Homo Sapiens
cccttttaataatttctgcgggaatccaggcaaaaaaacccttattggggaaaagggaccgagcgcttcccgtttctccccaggggtggcccccctcgaagttggggttatgtggggcgcaccagggcctaaaggaaaggccaaggtgtggcgattttgccccagcgcttccccccttaatgaatgagaccgcttcaaaacagcgttcgcgtaaaggttaagcctcccgtgagctccgaagaggcaaacctcggtgttgtcacaccgcaaaaagaggtttctctttgacatccaaataaaggtgccccatgtggcgctccaaagccctttaaggcacacccgttgtggttcctgggacatttctaaacgggggtcgcccttggggcctatcacctttggttctcacctggtgttaaggcacggggataatcccccaagggttccccacgtgggaatatctccctctctgtgacacatcttcacgacatgtggcgcctcctctcgggtgcgtgtgtggttttctcacacatattttctgtggccagtctcgtgcgagataaattcatgtggtgcccagtgaagataaacggggggatcaccagggccacgagaaagccccacaagagagcgtgaattatactcgcggacacccgcgcgtcagtataaaacccggcggtgtaaagagggccacatcctactccattcagtatgcagtgtgtgggcacaccccaccagccgggcacaaagtccagtggggacaccatgtaaacggtgtgttcccaaaaatcactccccggcggccataacagcactcttaaagatatttcctcccctttttctgaaaggggtctctaagtaatgttcccccacagaggccttctcacccgagggtgtgcgcacaagatttccttggccgacccgtgataatcaatcagaggggcacaagacaccccccgcggtttgtaagaggcccgcccacggaatagccagcgggtgctactagtacaagcgtatgctaccccaacaagcccaagggacatttgcgcgcgcgacgaccacaggggggggccaccacggggcgcaaacaaacgcgggtagaaatgcggcgcacaacaaagacgggtgcaaaagaaggggggggacacctcaccgcgagggggcacaacaccgtttggtgcccacaagagcacccgcagaacaccgctgcagcaccaggtgggtcccac

SEQ ID NO: 414704 - DNA, 699 bp, Homo Sapiens
gatctctataatacgtatggtccaaataagaatgtatgtaaaaggaagaggaataagagatgctacgaccggtcgggaagacaaggggacgcgaggacgggccgccacagctgcgggccaccaggacaacgtgggccgcaggacacggagcccaggaaaccggcccatcccgccacacgccgcacgcgaccgacctccgaccagaccgcacacaaaatagcgcacaacacagccagcggccgctacgcaacaacctgcgccgcggcatcgagggccccgccgccgagatcaccagcacggacccgtcacgacgcgaacgccgcccgaagacacacacaaacagggacgtgctgcacgcagtcgcaaccgcgatcgcgcgcccgcacggtccatctagcactcagacaccagccgaatccgggcacacaaaggcgacgatcccctcaagcccctcaggtccaacgcgactctccacgtgtcctcgcttccccgacaccgcctacacaggcgcgacgtacacctcctaacagtccgctcaggaccccaatacgaacagcaaagcggccgcctcgcggcatacaaccctgcgcgcacgtcagaccatgcgccacggacgcccggaacaccacacgacccgacggccactcgccgacaggaaaacggaggcggacgtggcaaggtactggataccccacaatc

SEQ ID NO: 414705 - DNA, 755 bp, Homo Sapiens
  misc_feature (78)..(92): n is a, c, g, or t
  misc_feature (305)..(314): n is a, c, g, or t
accaaaattgccctatttttacaactctaataacaaaaagtgtgccacaaaatcccccccaaaaaaacgatccccaannnnnnnnnnnnnnntatacaaacacatagtaaacaaaccaggcgaggcatcgtcgcgcgcaggtaccctcggacaaagggcgcgtagtttccgccgcacgaaaggccgcgtgagtgtggagcatgcggtggggcgccaccccagaacgagacgcccccacaagaagcgtggtcctaggacgcccgcacatcagagagaacccacaagggcgtcagacagaggagggnnnnnnnnnntcgtctcgcggatctaaacacatgtgtgcagattatatctcgctcgacggatattcatgcgggggcgaggagacacaatcgagttgccctcttccggtgagagaaaaaagcatgctccaccccgcgagcagcgcctccctaactagagactgtgctgtttgctccactcgtagcgaaacgcccggttgtgtttctctcgctaaacaaaacagagagcgcgcgcctctacaaaaagaccaagcacgcaggggagagagggaggggcgccctcaccacggaggggtgagtggaggaccccccccacacgccggaatgacgatcgaacatgagagcggggagctccctcccccaagtgtaagggggacacaccccccctactggggaagcaaccgaatgaggctcgctccgaggacagacaatccctcacccacagcagtggcc

SEQ ID NO: 414706 - DNA, 620 bp, Homo Sapiens
  misc_feature (57)..(65): n is a, c, g, or t
tcgtccacagaaacaagcagacagatgggcggaaaagaagaggcgttgctaccaccnnnnnnnnnaaagaatactccgcgcgcgcgcggagagagtggctgcgccagcgacgaacgagaggacactcaactggctaccgcgcgcggcgcgcacgacgaggcggctgcgaggcaagagcgaggcggtaggtggtaccaccgcaccgctggtggggagaagcgaccaccaacgcagcagcgggggcccgtctataagccgcccccccgcgcagcaacgacagccgcacgcgagtgtgtgtgtgtccaccccagggccagccgctcgcggggccgcaccgacggaaagaccaagacggccgcgcctgcggaagaagcggggtcatgagggacctcatgtgagcggcccccgccgaatggtgaggaagaagctgggtggggtggcggcgggaagcatactggcggttcgtcacctacgcaggtgagtggcggggcggcgccgcccccctccaataaccaccacctgcacctaggggagagacataggagggcggcccataaacatcctccatcgcgggggccccgccatcatgtgggggggcgcccgacaaccaacccctcctg

SEQ ID NO: 414707 - DNA, 809 bp, Homo Sapiens
  misc_feature (92)..(104): n is a, c, g, or t
  misc_feature (315)..(315): n is a, c, g, or t
  misc_feature (646)..(697): n is a, c, g, or t
gaaaatataccccacatagatatatatgtccgctcgctctctatgagaaagaaaaataatatgttgcgcgcggggaggaggaggagaaaatnnnnnnnnnnnnntgttgcggagaaaacactccttctctctcacacaaccgcgctctttaggagacaaaaatattttcaataagaatagaacagagagagcgaggagtatctactcttctctctctagcgcgcggggcgagtgtatcacacaccacaccactctccgcgcgatgagaaaacagacaaagagtggtgtgtatgtcaggcgagaggtgcgaacacncacacgtggtgcgtcccagcgaggcggctgcgtgagtgagatgtaattgtgtgtgtctcgaccaacaacaacagagagtgcggtgagtgtgtaacacaacaggcgcgcaccgagcaagacacacaaaaataaaaaggggtgtgtggcccccacaccgagagagcgccgcgcgtagtcagacacataaaatatacctaaagagagagagaggggtgcgaactacacgcgagcgcgagaaagagaatcactgtgtgggcgcgcgccaccgcgacgcaacaggagaacagcgcagcggagagaaggaacaaacataaagtgtggcgcgggaagnnnnnnnnnnnnnnnnnnnnnnnnnnnnnnnnnnnnnnnnnnnnnnnnnnnnaaaaaagcacaccgcggtatcatcataacaaaacgcagagagcagacgccgccaactcacaaagcatccaaaccaaacaaacatattatctcactctgcttctaaagagagc

SEQ ID NO: 414708 - DNA, 595 bp, Homo Sapiens
  misc_feature (370)..(402): n is a, c, g, or t
taaaaagacaaacataagacggggagggggacagatctctctgccgcccccccgggccgaggattaactctcttctctcttatagtccccacacagaagaggatcgtataacaaaagaaatgagaggacagacgtcgtgacataactcaccaccgaaagagaggaggactaacttccgctctcttggtgggtgacaaaacaacaactatccttgggtgtcggagggagaaaagagggcgcgcgcaccgacggcggtggcgcccaacaagacacctcttgcttgtgtctcccatatacaacagagaagacgagagcggagcaaagaaaactaaggaggagagccaccacacaaagaggatgagccaacacnnnnnnnnnnnnnnnnnnnnnnnnnnnnnnnnntctatctagcgcgaggggccacgccagaaagagagaacgacacagagcgcgcgcctgcttactgaatgaaaaaaccagcaaccacactgcgcgggatcaccccacaccaacccccacagcgagacccgcgcccacacacaagtgggcgcgcgcccacacaagagagagagaacagaacagcggcgtactgacc

SEQ ID NO: 414709 - DNA, 1216 bp, Homo Sapiens
  misc_feature (116)..(156): n is a, c, g, or t
atctgaccgaaacacccaaaatattctctcaaacaacacaaacaacagacgacgcgtcgccacgcgcgagcccgcggaggagggcggagcggaataaaaaaagaacgcacacgcgnnnnnnnnnnnnnnnnnnnnnnnnnnnnnnnnnnnnnnnnngggcaggaatgactaacggtccggcatgaaaacaaaataaaaatgcaagcatagaaaatacggcagcagcacagtggaaggcgggtgggtatcgtacgccagtgcgggagtagcgaggagaaccaaaacacaaaaggcacgacgccgcccgcgagaccacagtaagctacagcaaacagcgagagcggggtcgcggctgacaacgcgcacaggcgaagcaatcgtgtgaggtaacgaggatcgaagatagaaaacacacacaccacacaagacgcacccgagaagaggcaagcgggagcgacgggctcacagactcacagacgcggaacacagaatactaggcagcgaagatgcgtaccgcaaccacgcacggctacggacgctgccggagacagcccgagatgagagccgcgacgcagtgatggaccgtaggcaccgactacgagaagcagggacacgcaaggcgcgaatgacctcctacgcagaacgaaacaaacaggcagacacaaaaccgaagccaagccccaacgacacgagacatagagagaccaccgcctacaaaccccctatagagcgacagcgggacggagggccgaacgaagccaagagagcatcaaccgcgacacgccgcggcgagcaagacaccagacagactcacgtataagatacgccgtcgaggagggacgaagagacgcacacagcaaaacaagaaacggcgagacgaggagcgatgcggcaagaatcggatccaatacgatcagtgatcttcatgaacaccaagcttgatcatagctcaggcgtagaccaataacaacaatcgcacacggacactaaactcgtgactcaacaggacacatatgagtgcagcatgtatcgcagctgcccactcccctggtctcgccgcaacgggaggacccgcgcgatcattcgcgaactgactgaatcgtgttgcgagcgttgcgaaagtctctacgcgacatacacccctgggcagagcacaccaccataggaactcgaggtgagagacgaataatgatcaggcaacagagacaaaccatac

SEQ ID NO: 414710 - DNA, 1106 bp, Homo Sapiens
ctatattaaaaatttttatcatttaatcaaatatgtaaaactgatcggaatgtcctatactttaaagaaagagagagaccaccgcgaagacagccaaccgccgagcgcggaaccaggaggaacctggcggcgcaccctggacggcggtccgtcatgcgtagcgcgggcgggacagacagaagagccaaagagatacgggcgagcaagaaacagagaacaacgcttggcatgtctgacggcgtcagacgggtcgaccaggtcaattgacacgacagaacgcgacggaaagacagcaccgcgaagtgggctgatcggaacaaaacgcagcaagatggacgggcactcgcaccatggaaccgggtcacgtaggggaacgtcagcacacaagagagagcgaccacgcagaaccccaaatcgctgtggcggcggtcctgagcccgatctgcgtgtgagatggggggagccgagcacggcagcgagcacgcagccccaacgcaaggaagtcgaacgtgcacaggcaggcaccgaacctctgaaccaccccggacacaatgggcaacctcctacgtgtccaacgtagaggagagcacgaaccgccatagcaggtcgtcagcggtgagactggagcaccacacaacgcgacacccacgaatcaccatggaacgggaagtcgacgcgaacagacgacctacccacttaggccgatgttacccgtgctcgtcgcgcgacaacacgcacgtcgcgcgtcggcccacacttgcccagctgaagagctcaccgagacaaaagccgaaaactcacatcacatcgtgataagtgacgacgaggtcacacgaacaataacatagactcccaacctacggccgacttccaccaaattatccacacacccatttaccaacatccattctacgatacatattacactactaatcatctataactctcaccatctttcatcaccatcatatgaactattgaagaccccattacaaccaacattgaaacaaccattcatcctcaatagactgcgcgtgcatcaccaaagagacacatcagtaacgcatctgaacacacaaacaccttcacaaatcacccaacacaac

SEQ ID NO: 414711 - DNA, 511 bp, Homo Sapiens
cccccctcttatatacaaagagtgggccaacaaggatataggaaaaatagggcgggtaataacaaccacacgagcgaggagaattgtgttgccggcgggcacacttaggggagacctcttttttccaccctccctcaaagtctaccccctctccagatgtagtttctgcactctcaccccatcagtatcagagaagggtctctatacagactgaataccgttgttttttcgtcgccccccactccctttgagcaagtcaacatatcctctgccaagtaatgatgcgtgccctcgcccctatattatttagatctcccactagagggcccacatgggggtcccagcaaagtagctgtcaaggaccaccagttgtgtcgacgcatacgataccccgtgcaggtgtcagttcttctcctttgtgtatagcaggagctgtttctcccgattgcgaagacaccacacattgttttcatcgcgtggcggcaacaaccacctcagcgagcagaggtgg

SEQ ID NO: 414712 - DNA, 906 bp, Homo Sapiens
gcagacagcacgccagcccctctcggttcgtggggtgtggcgctgcagctcgtgcggtcacagctcatagaaaatacgcgcacccgccgtcctccactttcggcttggggcgggcccgcgggtggggtgtcgccactctctgttcttcttgccgcctccgccttccgctcgttccccgcgagactctctgtctcacaaccaggaacaaagataaccataggcgaactaccccggcgtcactcaccccacccacgtcgactgggggtgaccgcccccggaccccacgaacgcaacgaagcaagcgggcggtacgagaacggcgtcgctcgggaccacggcatgtctctgggaacgggcgtgaaccctcacaaggtgaattctcggttgcgggggaggaggaggggtaggcgaaaacgctacaagggaaatcgacgcgcgcgccgccgaacgccgaaacggcccaccggggtgcgtggctgctgaatctcctttatatgtcggggggacgatcctatgagagaggaaggggaggcggcgtctcaatcttggggcctcctaaatgtgtctccccacgtggagtagcgagaagcgacaggtccgtgtgccctgggcggcctgacagcgggtgaaagcggaggtgcgaggaacacagagcgaacttccccactgcgcacgggggagctgagacccagacggcgtcgtggcgttagccaacgccctccctcggcagattgccctgcccctgaaccccacgatgtgacgggcacagacggggcggtcggatggacaagtccccctcccgaacgcaacctgggcacctactaacaatctgagaagagggaatgcgcgcgccccggaccgccagggcctgggtacactctatgcagcaacgcgtccggtaccccc

SEQ ID NO: 414713 - DNA, 606 bp, Homo Sapiens
cgtcatcatagaagaaatcaggcttcttttttttatttcgctctctatataattaccgcgcccggcgggtcgcacgagacaaagctcaccccgctgctgaacaagagagtgttgcacgagacgagaggtaactgaggggtgtgtcttccagaagagagaacctgccgagggtggaagacatgagtgtgtctctctctctacggaggagatcatcaacgtgttgttgttctctctccacaacgagtgctctctctcccgccgcgactccgtgataagtcattcaccgatctcgggggtgtgtgaatatgtggttgtcgtccccccaccagagtaaaacatctatctaggttgtggtggatgagatggtgtgtggcctcctcctcacaactatctgtcacgtgtggtaccaccccactgcctgagccgcgcgacgagattgatgtctgcggtgcagagcccaccattctatttttatccaggtgcgggaggatctacaacacacacaccaaactatcagttacaaccaacgggttgtttgtggcccccccaatactttataggcgatacccactcttttctcccgggcgagggagcgcgaccccctcc

SEQ ID NO: 414714 - DNA, 411 bp, Homo Sapiens
attttggccgccacccgcaaggggcggatccaaacgtggtgattgcacccccgtcgacccctgagcaaatttctgctccgccccgtagataaaacgaaatatatactctctctaaccccccccagtagaggtggcgcaccacagttctgtcgtcgtcgcccacaccccccgcgataacacctctttgttgtaattctactgaaaaaggggtgtctaaccccactttgtgtggcaggggcggttgtcacaacaatctctcgtcccccacaagataacaccctcctcatctttgtgccttccaccaacaaatgttgtcgtggagaaaacgtgtgttgtctagcaaccacgtctcgtccccctgcaagaaaagaacacttggaaaacggagcacttcgataatccatacaagac

SEQ ID NO: 414715 - DNA, 1382 bp, Homo Sapiens
cccacgcgctattttttgtgtggctgcggaaacaagaagagtggggggaggacccccacacgatgaaaaacgtactaagagacgctcgtcgtgatgggtatttcttctctctccggaggaggggagatgatgcaccacctacatcgtctgccactggtgggcgcgggggtcctctcttctagagaaaagtgcggctccatcaatatctattgtgtgggtgttctccacacagtatgttgccggggggtggctccccgctgggtagcagtgcgtgtgttgtggtgtgggggcgaccccctcttttgtgttcctccacccgccgacggcggcgtgtgatcatagtgtcgtcttcatatcacgcggtgggtgtggccgacaccagagttgtggagtgaggcgccccctgctgtggtgtgtatgttcactgccccgctgagagagaagtatgtgtttttttcccgcccgcggggagcgatggtaagtaatatttcgccgtcgctctagggggcgattctctatggtgtgtgtatctttctttcttctaactggcggcggactaaaaaaattaggttggtgtgctgctccggcgggcgcgccattatattctctactctctttatttagaatccaccgccagcgtgaggtgcatcagtgcgagtgtgagggtgagtgcacctaacttaacaatgacgccctccgctgtgtgttgtgtatatgactacaccaacagctacatgacaggcaagcaccaggcggggtagtgtagtctatcatctatcccaaccagagtagagtatgtccgcttctagctggagagaaaaataaactctcctccctccctcttatttgttctcagcagagatcaaaaatcagtactgcatttggtgtgcatcgctatctcttccgctgcgtccattatacaccatcggcgagaattatatatctgcggcaagcggcattgacaccaccccttgcttctttttattgtgtggaggatacaactctgtttgtgttctactaagtggtggcgcacccacacaatcagagcggcgcgcgaaactaggatgctactatataaactgcgtgctcgctcctcgtgatggataggatataatatgtattgtattaactacgcccgcgaggcgccggtcgtattgattataatgaatagctcctggcaggagtgggtgtgataatcattcagacccccgcccggtgagtttatatacttaacgtaggagtgaagcctaacaacaaacccgactgtgcgtggtcgtgttggcggctacctcacgtgaggagcgatagtacgagggcggctgctataacagaaggcgctgctttttagttgttccacgccgccgcgagggggagggggtagt

SEQ ID NO: 414716 - DNA, 724 bp, Homo Sapiens
gaaaggtgacgcactcccgcggaggggggataaaaacaagtcatagcgaagcggaaagagaaagagagagcgggttgtgacgacagaatatagacagctgtgggtcggaagctgattcggtctgtctttcctcatagaaaacaagagctgggggtcgcgggtacgacgcgagtagcagtagtggctctcttttgtacgatggtggaagaacaccgctcgaggttggaagtaaagtcttgttgttctttagttattatcagctacccgccagccgtgattctgtcgttcgagcagacacacaagagcagtatagaagaagagatagagagaagaagatatatcacactcacacaaaagaatataaaccaggtgcggcatgaggtgtgaatgttggtttcgctgagtacgcagagagcgaactggacgagagagagagatgtgcgaccgtgtgttgtgtcgttctcgaagataagaaaacatagaacttccaacaaggaatgatgggtggctacgagacagttctgtatattgattgatggagcgcgtttgatcaatggtagacttcattctcgccgctaagtagaaaagcactcctcggttcgtttgcggggggaggggcttcacttgaagaactgcctcgacatggtgtcggcggagaaagaagaatgtggaggcgctgtgctcctttggtggaaagtagcagactgtgtgtattttttgttgg

SEQ ID NO: 414717 - DNA, 1434 bp, Homo Sapiens
  misc_feature (942)..(965): n is a, c, g, or t
ccctttttaaaaagaagtgtcgactcagtacggccctctccccctagaataagacaactgatcgtgctcatttctatctggacgccccccaccaagacaatgaacaatgtgtggtgagaggacaaccactctcttctttgttgattctttttatgagcgggcgggtggggagggagtatttctctgcccccgcggggggcccgcaccccggtgctggtggagggaggcgcttcccctccactactaaccgcacgccccaccctgatctgtgtctgtgtgtgcgtctctctcctctagacagatagtctctctcttttctgtctgaccgacgagtgaggtgggagtgagggagtgcgcgtgggcgcgcacgactgaggatgtacagacagactagagtgtgtgggctaatcacatcacaacaccacacacaactatatcatgtatctgtcaacgatacgatatatgtttctcgtcacctagcgacgatgagacgtgtgtagtgatctgtggaacaacacctctactactacgatgccctcatatctctcgtcgctcgacgggacgagggattgccccgacaccacccaactcagccctcttctgtgtactacaatagtcaaaagcaataatatactcacattcccgccgccactatctcaccatctcatatcttcatactatctccttctcttctctcttactaacgagagcgagactcatcttctgcgcgcctctcccgccgatctcacgctgctgctgtgtgctgcgcggtcgtgtgcgctgcgtgtggctgaccgcacgagcagaccacccacagatcgctcttctctgctcccgcccgccgcggcgctgtgctgctgcgcgtcccgtcgtccctccgctcgcgcttgctcgtgtgcttgctgtggcggcgttgcttcccccgcttcgctcctctcctannnnnnnnnnnnnnnnnnnnnnnntccgcgcgctcggttcagttgtactgtctacctccacctcaagagaccacacaaaacaaacggcacaacgacccgaccgagcgagagagcgacgcgggtggcagaagaccaacacgcgctgggacgcctcatataacacacaccacccacgtggcgggcgcggggggagccagtgcggacggcaatcgccaactttatctcgtacactacttgccctatctcatcaccacttcaaacagacacgatgcgacgactcactctcaatgttatcttctatctcctactcctacacagaagttgtgtccgaacacacccacacgcgcccttctctccgctctgtagtcaggcgtccacacacaccaacacataaccacctcctccatgtgctccctactcccccgccctctccctccgcgctcatccttccacctctccctcactcacgctactcgtccttctagacaacacc

SEQ ID NO: 414718 - DNA, 183 bp, Homo Sapiens
actctcccccacacaacaacaaaacgaaccaaagagggacctcgcacttgaactgaagctacggaggggaccgcgagcacccgtgctattacagagaagaaaaacaggaacagtgcatgagtacatgcagccaagaacaacacaacaagaaggacgtcccaaccacccaaggggaaaggaagc

SEQ ID NO: 414719 - DNA, 1182 bp, Homo Sapiens
  misc_feature (748)..(807): n is a, c, g, or t
caaggcgtcgattcaaaaaccactgcgtcaacacaccaaccgagggggagcgcgatgtccccctgagaaaaaagcacgcacagcacccgcccgaaaaagagggggcgccaaaaacgtcgggagcgccccgctgctcaccccgccgacgcctatggagtgggcgcccccacaaaacggagaggtggtagtcctcccacaccctctctccttaagaggcagctgaccagaagcctggggcgctgtggctccagcagaaatggtgtgcgaccctccaccacaaaaaaatagctacgtgggggagaggcggggcaccaaacatttattcacaacagcagcggctgcacaaccacgcgcatgctcggcgcggcacacaaaacacagaagagatccatatccacaacatatatcatccctctccgccagaagtggtcattagcaagcgtgggtgccacccccgcacagctccacggacgcacgtaatacatccgtctctctctcggccatgcggcgcacccacacaaagagagatagagacatctacttcgcccgccaatcgctattttctctctttccctccctcgacgatcgaaccgagacataaaggaagaacccaccgccacaccccattcgtagaagagagaaggcaaaaacacaaatgctacacacccgaggggtgaggaacctaactaaaacggccccccccaagcgaagggagcacacaacgcaacccccgaggaggaggcgacgnnnnnnnnnnnnnnnnnnnnnnnnnnnnnnnnnnnnnnnnnnnnnnnnnnnnnnnnnnnnagcaaagagcagtacccgccccggtggcagcccgacacacacaaacaacacgcaatcgccctgggccagtcgccaccgcacaaccacaccacatgggaaaggcacaccgcaaccacatccaaaagaacgacgcctcagacacccaccacagcacgagttcgcgctgcacgacacaccaacaccacaaccacgaaacacctcgtgctcggagggccgccccccgcccacaccagaaggtggagggagccaccaccacacaacaaacaaagacgagaaacacctccagcccacccggggtgacccgaacacgagagcgtgagtacacaccctgccagggcaagcagatatatccacagccacccacacaccgaaatg

SEQ ID NO: 414720 - DNA, 1076 bp, Homo Sapiens
  misc_feature (73)..(86): n is a, c, g, or t
  misc_feature (133)..(196): n is a, c, g, or t
  misc_feature (981)..(981): n is a, c, g, or t
gggtgggtgaaaattttttctttataattgggtggtgtccctttctctctccccccaaaaaaccccctcttcnnnnnnnnnnnnnntaatattataaacaaccaccaacagcagtagaaaagaacaccacacnnnnnnnnnnnnnnnnnnnnnnnnnnnnnnnnnnnnnnnnnnnnnnnnnnnnnnnnnnnnnnnnctaccgcagggaggatatccgtggggtgtgcgccgccccagtcaactagtttctatccatctcttccttgcttcgtggcgcacgaccaccttgtgagataagccagcgcacagagcgaagatatacctcgcgccgccgcgagaggttgggaccgacagagctatctcggtgcggcggcagaaacgagactctctcgtcgcgacgaaagacaggggggggcctcactcgcacgaagacgcacagcagcaaaagacgcacgcggggcgagcggaggggcctcaagagagagaaccttgtgggagatcgcacgccgcgagagagaagagagcgagctggtgaagaagaggagcgcacctgcgcgttactatccacacaccccgagtgtggggcagacgcaccaagacacagacgcaagaagcgccgcgcctgcgtgtggaacagaaaggggtgcgagcgagtgcgggaggaggaggagcaaggcaacagcccagcggcggtggagcgaacacattactctataatgtgtggggtgggcgcccacaaacgagagagaggggcgggagacaccgtctccctacccaatggagtcgccccaacgacgtgagagcatgtactctactgatttatgttgtcgtgtgtggcgccccacagaagagagaagcaaccaccccagcatgagtgctgcgcccgctgaggtaaaacaaagccacgctccgcccgacgagagaaacacaattgatcagagcggtcaggtggaggaagaacacaccaacacacgccaggangtgtgatcagttccacaaaggtgggcgccgcccgaaaaacacaaaaagcgtgtggcgtgctaccaagcgggggtgggggcgacgacccacaggaa

SEQ ID NO: 414721 - DNA, 854 bp, Homo Sapiens
  misc_feature (108)..(119): n is a, c, g, or t
  misc_feature (430)..(438): n is a, c, g, or t
actgagcgacttcaatcagaaacgcacaaccttatcttccccccagcaaaatagaatgagacgcatgcggtgggaacacacggcggcggcagctacttgctgcagcannnnnnnnnnnnagggaccgccccgcggcgggagcagcagcgcgtgtactgacgccagaaacaaagaggatgctcgaggggggcgctcctatgcgtgagggggggtgggtacagaaagaacccagtgcgcgaaggggggaacagtagtgtatactcctcgccacaagaaaccagaagactaccagcggccgcgcaacgcggaagaatccgcgggcggggcggaggcggcggagtacagctactgataaaaaagaggagaagcatagtagtatagagatggaggtaggagggaaaatatccaggcacgagaagcaacacagatnnnnnnnnncggcaggagagtacagacacaccctactccgagagcgagagagggaaagcgatgggcacatcaagcaccaacatccacaattgacggacgccacgaaagacacatgcgcactatagtgcatgtcgtggtgtagacaccacagccgaggaagtctggctgacgcaggggcgtcgaacggtgtaagtagatgcgccgggacacaaacaagacgaacacgacacacatccgccgagacgggagaggtgggaaaagagcccaacctataatacaatagaacacccacgcccgcgccacagcaaaatagggagtgcgtagacaagcaggcaggacagatacactgcgtacagaagtacgcatatagatgagagaagagacttctacggtcagcgcaacatcgaacacacccccgcctccgg

SEQ ID NO: 414722 - DNA, 1211 bp, Homo Sapiens
  misc_feature (639)..(649): n is a, c, g, or t
  misc_feature (930)..(938): n is a, c, g, or t
  misc_feature (1154)..(1162): n is a, c, g, or t
aaaagagggggatgaaaaaaccttcttctttttggaaaacccccggggggggaagagaagggatagggccccccacaaaaaggcccccatgtatatccccccagcacggcgcaggtggaggtcgcccccacaccaaacgatccatccacgacgggtcgggcaccaccaaggaggcgggggcgtgcaaaaccgcggcgggtgataaaaaagggtggaacaaccccgatataatctcgtgagagcaaaccaccgaggggcgtcgtgcgtgaaaagggggagggtcccctaggaacattgcacaccgagcggagagctatctattgcacagacagagagcgtatctacggcggctagaaacacgcgcgcacacatagagtgtgggggacgagagcgtgccacaccaccctcagagaaacaagcgatcgaagagcggcgaggcaataacagcgccgcgacacagatagtccgagcagagagaagagataagcacacgcgggaatgaagtcccaaggaccatattgagagaggcgcccaaaacccatcttgtggggtgggagtagcgaaagaggggagaagagcacacgcgagaaccatcaacaagccctccgtcgcgggaaagagcgatgggccgtcgcacgnnnnnnnnnnncacggcggtggtgtcatcctctcacacaagaaagagcagcgagaaaggaagaggagagatatctaatcttattaatcgcccgcggccccctcacacaaaaagagaggggggagacggccgcagaaaaaatggcaggtcatccacagaagtgagtgagggcagacacacaactctcgtgtgcgtcaccacttcaaatcagacggagggggagggaaaaaccaccgctgcgcgcctccaacaatgccgctgccccatagaaagatgtgtgtgaaacaataatnnnnnnnnngcttggtgtagtaacaacacaaacccgccgaaaaagcaatcgaacatctatactgggggtggtaaaacaacaccccccagaggagtggtaaccaaaacggtgtgggaggaaaacaaacaatgcgttcgtacaacaaagtgaggggaccaccctcgtcagacgaataagaggacacacccataaaaagagcgccccccttgttggcacaaacaaaannnnnnnnncacgtagtgaggaaggacgtcgagcagcaaaaaatatcaaaaaccaccc

SEQ ID NO: 414723 - DNA, 1284 bp, Homo Sapiens
  misc_feature (295)..(303): n is a, c, g, or t
  misc_feature (589)..(597): n is a, c, g, or t
  misc_feature (723)..(776): n is a, c, g, or t
  misc_feature (1204)..(1204): n is a, c, g, or t
ttcgggaggagacactgaaaaaagaaagcacgccgcaggcgcacaacggacgacaagcaaaacgccggcagcaaaacactaaaacaacctcggacaacaaacgagcagacaacgagaagaagaagggtgggagtacccacccctcgctcccgcggggtggggaggacaaaaacatgaccaacaagcctcgaacaaaagagcggaggcgcgcgtcccgacagaacgaggaaggaagttagagaggaggtgaggtcaccctcgtaaggagatacattctctatttttacagtaactnnnnnnnnncatttctctatttgttctacgtcagaagaagggagaagagggagagggctcgcttgtctatagattgatatatatctatgagagcgagggaccaactataactattacgactagcgagggtgaggtgtatcactctcccgacacccaaacacgaacgacaagccaaggcagacctacaagtgtaacagaaaaacaccaagaacacgcgctccccaccgagcgacagcgagcgggcagaccacagtgtgagaggggggggagcgacactccacatccgaccacggannnnnnnnngcgcgcgcgcgcagggcaccgcaggcgggcccgccccaatctaatctccacaaccactgccccaccgcgaggcagggaccaacccaacacgcgacgagcagccagacggcgaaactgcggaccccnnnnnnnnnnnnnnnnnnnnnnnnnnnnnnnnnnnnnnnnnnnnnnnnnnnnnnaacgaacgcgcggagagagcgcaaccccccaccccagacaatctacgctgcaccctacacaccaaacgccccctcagaggacacgccggcacccctagcacaccacaaccacagcaagcacgccggactagacacaagaacacaaaccagaccaccacccgaacaacacataattcaatgacgaccgaacaacgagcagcaaggcgcgcgacacccacaaccaaaccaacaaccctcacataacgacacacacacctacacaccgacccacgcaacgacaagaaaaagatgggatccacaatgaccacaacacacaccacacggcaacggtggcaggcacggcatcgcacaccacccgcaacggaacacggcctccgatcctacaccacgatgagcgacagaccacaacgacaaaccgtcatatacanaccacaagacaccacccgcgccgcaccccagccaccaccacacgcacatcaacatgccccacacaaaggcgggagccacg

SEQ ID NO: 414724 - DNA, 1154 bp, Homo Sapiens
tgggggtggattgttcggctcactcatctttctccctacatatatgtttgcatcaattatattcattccaggtggcacaaaaaaagcatcatcgtcatgcacaaaaacataatatgattaaacacacacaggagcatgtttcaagttgtactccacagcccagggtgcaagaccaccttatctattgttttcgtccattaaacaatccaggcaggggcgtgaaaagacacaagcgaaaggaaaaccaaaggaagcgttctcggtaagcagcgccctgcgccacagaagcaaataccaccgacgggcgggtgtagcaaaaacaacaaagatgtgtgggaaagacacagaggaggataaacaactccgtccccccagacaatgagaaccaacaaatatgtgtgtgcgcaacagacattattcttattgagcaggagggagtgttctactacgcgacagaaaaagccttcttaagtcttttgattttctcttctcacaagaagaaagaaccagagtgtgcgtcgcccccttgcactaaaaaagtcagcacaaacagctccagcgaaaagatccattccttctgtcccaaagaatcactcaggagaggagggagagaatatggaactgaaaaagaggagttggcacccacaccggcggcgagacacaggaacggaagaagagcccacaatcagaacaaacccccctacgagaaaacaaccccagcccacaacgcaacaaatagtgagggagtcggaaaccccacgaaaaagcagcaatacaaaaaaccagcggggcggacgcaatatagcgacacagctgatggccggcacttaccaccggggacgggcccgaaaccacaaaaaatgatggagtcatccacccaaatggaggagaagaaccaaggggttgccgcgcccccaacaagacaaagataacgcgaggggaaaacaccccgattgaatagtccgccccgggctagccacgcgccgatgcgcacagaaaaacaccccacggggacagtaggacacaaaacaagagcgtatgggatagccgcccaacccctgccccccgagggggcgagggggagccccacaaaacatgtagggtaggaggagacacacatgcgctctgtgcgccagggggggagaccaacaaag

SEQ ID NO: 414725 - DNA, 1127 bp, Homo Sapiens
  misc_feature (211)..(269): n is a, c, g, or t
  misc_feature (302)..(315): n is a, c, g, or t
  misc_feature (920)..(928): n is a, c, g, or t
  misc_feature (958)..(980): n is a, c, g, or t
gtgggaaggaggaaaacacgccgtcctgaccgcaattcctcttaaaacacgcgaaagcactacgagaggggtggatgttttattgtgtgatgcagtaatatagacatacgtcgtagtagtgttagttagttgtatggaggggggtgttgctcgtcgcggggtggtggtgttgttgtgggtgggcgtgtgtagtagtgtagtatatgttgtnnnnnnnnnnnnnnnnnnnnnnnnnnnnnnnnnnnnnnnnnnnnnnnnnnnnnnnnnnnagggaagtatagacagcagacgagggtgaagannnnnnnnnnnnnnggcgcccacccagcgagcgaggggaggacagccgagcgcccgcaccacagagggagagaggaggcggcgaaaccgccgcgaggacgacagcccgcgggcggcgggcgccgcgcgaccgcggacggagaagcaggagacggagccgggacacaacaccaacgaaaactagaagacagacacccccgccgcccgggggggcgtggggacgcccccgaccgcacggcgaggcgagggggagaggctgacctcaccggcgcgaggaggcctgcctgagctagcgaccaaaccacgcgcagaagagagagagcgccgggcgcgtccccacacaaacaacagccagggcggggggtggacggcactacacccccacacagaagcacgcagggcgtggagagcgcgggggagcgcgccgccactccgcggcggagggcaggaaacatgcagcgcgcgaagcacaccaaccaaaaggaaaaaagagagcaccaccacacacaacaaagaagcggggagcccagagaggccaagcgggaccaacagagggcgaggaggacaaaaccaaacagagtggagggggagacgaaacaacaaaggaggaggcccgccgnnnnnnnnngccggactccaccaacaaagaacgaagagnnnnnnnnnnnnnnnnnnnnnnnacacacacagagaaggggcgggcgacaacaaccaacgccacccaaccagtcgaaaaacgagaaaggagggaagcgacaaaacataccatacactcagcgcacgagatcctagcgcgagggagcgagagaagagcaccaaaaacacca

SEQ ID NO: 414726 - DNA, 488 bp, Homo Sapiens
ggtgtttgtcgggagaaacgagatatgttgttagaacaaagaagtgcaccaagtgtgagcatggctaccacacaaaaaagacgccaagatgataggtggtgttgattaattaattttgtcttcggagaacacccacaatataaagaaatgtgtgggtctctatagagtggctccgtgcacacaaagaggggggacaagaatggttatttcccccacaaaagtcgtggggtgggtggagattctctctcttgttgtgaggggtgaataaagaagataacgacgtggtgtacacccccccctattttcgtcgggggggaatcagagagatagagtgaattccgcgggaggaaaaatatcttggccaagagggttaatcacggaaaacaacgcccaccaaagaagtggtgcatacaaaaaactccccaacgaacatgatgaagaaacacccatggggccgacagcgtctccaacaagaagagacccaccca

SEQ ID NO: 414727 - DNA, 1146 bp, Homo Sapiens
  misc_feature (63)..(63): n is a, c, g, or t
  misc_feature (194)..(205): n is a, c, g, or t
  misc_feature (699)..(708): n is a, c, g, or t
  misc_feature (944)..(965): n is a, c, g, or t
ccccatgtttttataaaaacagaaaaggagagagagagaaaccccccgagcgccaggggctgncatggcatccttctacaccccccaacacatcaaagaaacgccgccatactaaacaacagccgggggtgggagcaggggaacgcaacccttcttttctcctctgtggggggggctctctcttctgccggtgnnnnnnnnnnnnatcatatagagcggtggagttcatataaaaatctaaagaaacagacgcccccccgccgcgccgggaggcggggggaggccccaacgcaagcacacaagacaggagggggccctaacacaacagccaccagcacgaacgataggagccggccgccagcacttcaatactactagccaggcggccccacccctcgtctgtcactcgcctgcctacctccagaagaagaggcactcggccggggacgcctcctcctgcagcgcagggcccgcagaagtggaaagtctcccccccactcccaccacgccaggggcagcaagaccacacacaacaggtacctcctgcagggaggcgacacaggctgcctgcgtgagaaacacacgcgcggagaacaacgactcggggtcgtcagccatccgcccccccgccgcaggataaccataaaactccccgcccagcggaggcgacgcacgccgagggcggacagcccctgacannnnnnnnnntcccacagcgcgaagagaaaacaatcacgcaggcgcccaacgcccagcacacatcgcgcagcgacacagacaaaacggcgggggactggcttctccccaccacagcgcgcgatgggagagcaaaaacaacacctgcaccacccaccaccctcatacgatggggtcgggagccaacccaccacacacgagaggaaaggtccgaacccaacccacacagcggggtgcgggcagcgcannnnnnnnnnnnnnnnnnnnnnactgaggtacgacacgccaccaccgaggtgggggtaggactgacccaccacccacaaagaaaagaaccgcggcgaacgacagggcagagacaaacccgagcccacgcgcgtcatcacccacaaacacgtcggagcagcccaagccaacgccttcgaacaccaacaacgaataccaatccgt

SEQ ID NO: 414728 - DNA, 1421 bp, Homo Sapiens
  misc_feature (42)..(56): n is a, c, g, or t
  misc_feature (702)..(702): n is a, c, g, or t
  misc_feature (1180)..(1192): n is a, c, g, or t
ccaccaaacaaaaattgtaaagggggtcgtgttatatttccnnnnnnnnnnnnnnnctacacaatattattctgccggacgacttaaaccgaaaagataggggagaaaaaataataaggcggaaaaaccgaatgaatagattgcaagagagcgaggaggaacgtaggctacgatcgggcctggcgctcgccgggtgactagagacatcgactagtcgtacccgtctcatccagtcctccaatatattcctccgccttcttctacacaagaacaattctatgagagagagggagtgagtgtgtgtactcgccacgcaagaagagagaatacagaccgaaaagatggcccccccgcataacactcgttcgttggctgtattcatcatcaaacaacaacaacatcaattgtgtgtgtcttccccccggagagagagaataatttctttattcatgcccgccagggtggaagagcccgccgcactcactctcgcacacccgcccacgctcgtaaaatttatatgtggagggaagcacctacacaagagaaagacaaagaacacacatacgtccgagagttatgtctctccacacccgacgcaacgaaagagtgatgtagagtgtctatctgcgcttagaacgaacaccaaaagcagcggtgagggagtggagtatggcagagacaagagcaatcatacacaaaccncagacgcgacgctgcgccggagggaggacgaagagagggtcgcccaccacacacaacacactattctgctctgatacaaaggaacaaacatctaccccaccagcaggcaccacaagagaaagagacagactcgacggaccagcacaccgactagacaaacacaccaacatacaccacacaacatgaaaaacaggccctgacaactggacagcccaaccaaagaaaaacccaagaaaaccaaagccagaacgatctacccgacgcaaaaacaagatatagacccacgcgtcgaagacaaacccaacgacaaaatagaatatgtggtagtttaaacagcgagaggtaggagcgcgatgtaaaaccagcaagaataatcgccacggacacaaacaaccctcttgttatattgtgtgccgccgcaaacacaacaacattatcatttccattggatgtgaccaacacataacactatcgggcnnnnnnnnnnnnnacccaacacacaaagatcatactattcattcatgcagcacaccaaggcaatcatataatactaggaaatgatagtcgctaggcagtacgcaaagcacctacatacttcataataatttattatgaggtctacgccacacccaacatatatattaaatttatactacctatccattatcacctcctatctctcacaacacacacaagacagtgagaacacaaaaagtatg

SEQ ID NO: 414729 - DNA, 721 bp, Homo Sapiens
agtctttcattcaaaaaatattttataaaaaagagagaggatgttttttttctgacacaaaagatgaaatacggggtggctgcaaacaaataatgatgagtcagtagtggcaacgcagagaggtggtcaaaaaagtggtgagtagaatgaagaccgcgccgatgaatagacaacactgcgtttatgaagagaacaaacaataaataacccacacagagaaaaacaaacagagtggcaccgccgcgcagcaagagacaatgaatctaaagctaccccccgcaaggatgacaagaaaataagagagagggggcggccgcagggagaggcaaaccaaggcgcggggaataatccacaccaaaaaaagataaacaacaaataagtattctctattctcatgggagggagaataaacaaggcgagcggggtatggataaagagtgtgtgcgaaatatatactacatatgaggaaagaagagaggagtttaattaagaaacagggaagagaagttgtatatataaaagaatatttttttatgcatgaacaagaacgatatgtgtcgtgtgcgtgcgacccaaaacagtcagcaaacaaaatagatgttgcgccagacgaaaaaacaaacaacctttgttcgtgtctgggtggggaggcgacctcctcacctccctgtataatagtaagatcgaaagcgtgtggtgcttagacaaccaactaatcaac

SEQ ID NO: 414730 - DNA, 626 bp, Homo Sapiens
cacccagcggaccgaccgcacccaaagcgtccagaaaaagaatcataggtccaccaccaccgtgtatattagttggcgaacgcaataatgtgaagattcttaaatgtcccgttaaaacgcggggtggaggcactgaggccccgccgggagagtttcatcctgctgacgggtctttgagagaaggagaatgttgtgcgccacccacacaatgtgtggtgtatcaccccaaagcaggacgctattcccgcacgtgagggagggggtgagagaaaagtgcttctcgcggagaagtggggagaacgcgcgtcctcggagggagacaatggggtgtggagcacgcgctggataaactacccggaacggtccgggaggggtgtggtgaaagatatatctcccccccgcgaggggtgacatggtgtgtgcgaccgcgcccctccgcggaagagttgtggggggcgcccccccttatgttatccaaccacaacacgttaaccacaaaagaccccccagcaatcgaaggccgagcgaatgaacacccaacagagaggactggggggcccccccacttgtggggaacaagcgagatagaacagaccgtggcgggagggagaataaccgcgcccgca

SEQ ID NO: 414731 - DNA, 564 bp, Homo Sapiens
  misc_feature (57)..(71): n is a, c, g, or t
  misc_feature (102)..(181): n is a, c, g, or t
gttatttgtcgtaattttgtttattattacgtaggggagcgaagaaggagaaggagnnnnnnnnnnnnnnngaatgactagcatactacaactgaatgtatnnnnnnnnnnnnnnnnnnnnnnnnnnnnnnnnnnnnnnnnnnnnnnnnnnnnnnnnnnnnnnnnnnnnnnnnnnnnnnnntggagaatgaaaaataagacaagtaacaaagaaaaggacaaaccagaggacaggagagcggggagcgaggcgagcactcacagagcagcacaacaagaaagatactattaggaacacaacaaagaacagagaacgcaagagcagcgagcggaaggcacggtcacgatcaaataagagagaaaagacccagcaaacaacaacacacaatggcaccacaacttggacacaacaaaccctgctaaacacaaaacatagagaagaggacaacgggcgaaaccacacgcacaaaacaccacaaaacgaccacaaccagcctacgaacacctgaagtgacaaaacacggacactaacacaaacaggacataacatgaaagcacacaagc

SEQ ID NO: 414732 - DNA, 752 bp, Homo Sapiens
  misc_feature (425)..(425): n is a, c, g, or t
  misc_feature (553)..(603): n is a, c, g, or t
  misc_feature (696)..(696): n is a, c, g, or t
agaaagaatctctagataggtggttgtggggaggtacacacaacacagcaaaacggacccgccatttttctttgtttgctcataaccaaactaattactctatgaaaggaaaaaataatatctatttcttctttgatcccctgctcctacataaaaaagaggggtgtacttcttgaccaagatagaatacaatatactactgcaccaccgtgagcgtaacttgcagcacataagaaaacataaacagtgggtgggagtgcatgatcatattttcacgatcgacggggaacaccactcctcactcttgatatctctatctctgagaaaaaagatagagatcaatcatagtagtgtgtgagcgcacacgacacacatatatctatgagagacaaaagaccgcgaacgtgtgtgtggaaaacaaacanacaaacgcgtggaaatgagtctgtcatatctatagatatatagatgacagcgaccactcattctgttattttcattcacaaaaataatatcgccaccagcgcaggagaaagacaacaatcgcaacgcnnnnnnnnnnnnnnnnnnnnnnnnnnnnnnnnnnnnnnnnnnnnnnnnnnngggccacctggatatctatctatactaataccagcgggcgaggacaccccaaatcaatctgaaggcggggaggcgcggcgcccccgacacganaagagatcatataaatcggccggcaggcaaacgcgatgaggcgaagagaacaacac

SEQ ID NO: 414733 - DNA, 591 bp, Homo Sapiens
cacccctgtaaaagagtgatcccaacaagataggagagagagacacatttctggggcgaaatgaagagcgggtgtgaacaaaaaaaccgcgcgctcgtgctgtctccgtccgaacaagagacacgcatgctggttgagagaaacacaccccctccagtgagggacgaagcgtgcgcgacaccgtcatagttgatgaagcacccccccacaagaagaataccacccacaagcaacgacgagggctcacgaaggaagggggccaacatgacgagcgcgacgaggagagaagaagaaccacccacacgggaagaagaacacacacgagcgcgagcgactctagctcgacaccccaacacggagaggagagcgagaaggggacgaacaccaaccacactgtgaatgcagaagaccccacccaccaaccaagcacgaaacgaccctaccaaaaaaccaagcgcgcgcgcgaagactataaagagcgacgaagaacagccccgcctgcccacacacaacatgagaagtaataggagggagcagacggaagacacaacacaaacacagggagagagccaagtacaggaagcgggaggc

SEQ ID NO: 414734 - DNA, 1166 bp, Homo Sapiens
  misc_feature (86)..(96): n is a, c, g, or t
  misc_feature (654)..(671): n is a, c, g, or t
gggatttaaatattttttcttttattcggggttggaaaaactcaaaagaaaaaataaccaatattttttaaaccccaggttatctnnnnnnnnnnnctcgaaataacatacacaaatttaagctcttccaaacccgctgtgtttcacaaaccctagtgttggacgggtgccttgttgtagccaccaagttcagggcagcagggcgggcagggagatgatctcgtagagggccaaacagagacgaggggtggagagaggggcatactcctgaggatcccggtggttgataacaccccatatcacaaaaggggatatcctcagaaattctacaaagtggagctcattgaatatatctttccgcgagggacagcggaccgctttgggggcccccaagacacgcagtattcctcgtgtgcacaaagattttacaaagaaggccattacccaagaggggttttttcaccctccaaatgagacgagcgggggctgcataagcctacaccttattattgcctccctcttgtgaacaagattgtcgctcgtgcggggtgacactcacaggattagacgaggggtatttgaggggcatcaccgtggttatttacacgcgcgcggaaattgtgaagggctcgacgcgcgagcgacaagcaaaannnnnnnnnnnnnnnnnntcatacaacatagctgggcagttgaacacgaagagagtagaaaaacagagcagtgctgtctcacaagtagggagacccccccgtcgttttttatcagggggggcaatccccaccaaagagcgtggtgcagacacagcgatgggactcccacttcgatgtggaggggtctccacacaacaaggggcatttctcgtgggcaaaaaaacagttgtgccgcgcgtagagcggagccaatttaacgcgtcaacgatcacatcgtagggggaaaacaccacgctgcgttctgtcgaacatctcggaaccagacaccgcgggcgatagtgcgtggcccacagtcgtgcggcacgacaaacacatctgtatgtgcaggggcaacaagggcaactggataacaagaaacaacgtgtcacacgtcgtgtgtgccgccgccccttctcttcccacagggggggaacacgggtctcattggagggaccacacaacaccaccgcccaa

SEQ ID NO: 414735 - DNA, 737 bp, Homo Sapiens
gaaaaaaatgtgtatgagagagagatagaataacaataagaaagaggtcggggaaaaataaaagtttgtctctatatactccaccgcgtaatccctatttacaaaaaaaggggttgtctggccacacacacgcaccacgagcaaccaacatggtgagagggggggtggcaaagaaaaaacaccatatttagaaggggggttgcatataataacacatcctattttgtgtcgagaagagaaaaaatatccggggtctacccagcggagaagaaaacaaagatctgcacgccgcacatcgtggggagaaagagtgtatttgctccctcacaaagaagagattggctgtgcaaggaagagcaagaacgtgtggtatacataaccggcgagggagttgagtaaagaatattctctctctcttgtttgtgagcgaagatgattgtagtcgcacgaacatgtttctcataaaaaagtatgtttcgcaataataagagaggagagaatcactctcggcggacagatattatctatatggaggtgcgatcttatattaagtgagggggcgcgctcgatataaaaacagaggaatattattcttgtgctacttcaagttgtggttgacgagcacgcttccccccctctcattggggcaccgcgggggagtcaacgcggaaggacaacccattgaggggcagcaacaaatgcaggcggaggagtacttaatgagcgcaccacgaggg

SEQ ID NO: 414736 - DNA, 1272 bp, Homo Sapiens
  misc_feature (62)..(84): n is a, c, g, or t
ggatcgccacaccccactcttcttcatctccgcccgcccccactcacaagactggggggagnnnnnnnnnnnnnnnnnnnnnnnttattttgttccccccctattttttggggccactatttgttcttgaggaattgcccgaccaccagaaaaaagaagaagaggacgtgagatggcatgatcgcagcacagtgcgatggttattatctgtctctcggcgggaggactgtatgtgggagagagcacacagaaaggatggatgcggcagcagcgtgagggagaacgcgaagatgaggcccacaaagataggagggcaggatggtgggggaatgaagtctagtgaacaataagtgtgattggcagtagaagagaggctgagaaagtagattgtgagccgataaaaagaaataattgtacgaaggcctctctctatatgttggagggtgaccatgagtatagagaagatagtgttctttttggaaggagcaacgcgggggattgtatcatcatatctctagagaggaagagacgagtaggcaatgcaagcaagagcctatagacaaaataatactctctcgacacggagagagatgggatatgatcgcacagcgcgctgcaccccccgcgccgcgagcaacgacgcagtgtgtttatctacacacaagaagaaagagtagagcccggcaccacacaagaaatgagagtaaacccacacacagcgcgagtggagccgcacccgcagcaggagaatatacaacaataagatgagcggggccccgccccaccacacacaggtagggtgtggtacaagaaacgagacggctgcgattgcctgtgggctaaacaaccacaactatatgggggagggcagacgcgatcacagatagtagagcggaggacgagacaacggacgaggaacacacaacaacagatatctcctcacgccagtggggaagggaggggtcgtgtccccctccccccacgacaataacacgaaacgagaacgtgaaagtcaggaaccacaccaactcaagcaagagggatcgagccgacaacaatcgataggagagggagcagacacaccaacccatgagtaagagcaatagaccgaaatagaggaaagcatcatacaaagcagcaccaccacaaacaggtggtggggctatgccaccaacacaagatgtgtgtgggtgtggcaaacaaacaggcgtagcgggcgcatacagatgtgagagaaacaaccgccgcaagaaacaaaaacaaaccaccgta

SEQ ID NO: 414737 - DNA, 1020 bp, Homo Sapiens
  misc_feature (200)..(209): n is a, c, g, or t
  misc_feature (231)..(231): n is a, c, g, or t
  misc_feature (878)..(891): n is a, c, g, or t
atatatatatcctgttgtttttgtggggacaaaatatatattatcaccacaagagggtatattctggggggcagaaaccccacaaatatttcccgtccgagtagagcagcaccgaaagagaacaaaaatgtttgtggcgctattattaataaatacaatgcgagaagagagagaggtgtgtgcaacccgttgtattattnnnnnnnnnntatattcttgtggaggaacaanacatcttgttgttagaagaagagagtggcggtccgcaggaggggagtgtgtcctatcaggtgtgttccatgcaacgcaaacgaagactatccgtgtttgtgggagggaagaccgaccgcgagagcggcgcaccgcggggtggactcaacaagagagcgacgagaggagagagaacgacatacatacgtgtactcgcgcatggaaaacacacacgcaacggagggggtgagtggggcggaaacaaccagcacaccagcccacgagatagaagacgcacgcgcgtggcgtgtatttatatctaccgcgcagaggggagggcccacgcgagagaaaacaaacaccacgcagcgcggggggagagaacggagagtgtggcgccagccagagagaacacactcgccgagtgcgggccaagaaagaagagacgaccgctaagcccaacatagaatgcaggcggcgaggagagagaaaaacacccgcacttccatctcaaccctctgtttactaacaacaaagaaaagtaatttgctctggggagggaaagagcgagcgagcggagattaattataggagagacgtgtctcgcgcccgcgccagcgcacacgcgcgagcgagagtggggtggcacacacgcacaaagcacgcgnnnnnnnnnnnnnntagaaggagagcggaggggcgcgggaaacgagagtagtgactgactcccagacacaaaagagcggggggggagacaccacccgcgcgcgagagagacattaaaattaacgcgaggggggggagaacaac

SEQ ID NO: 414738 - DNA, 465 bp, Homo Sapiens
ccgggggccccttttccgcacaaacccaaaaacgaacacaagcacactcattgtcgtctgcgcgcgccacccttgtgtgtgtcgcacccccaagaacagcaattacctttctaaataccactcgtctccaaataatgcattcccccacgcgcgcgggcacttacaacaacacgcctcgccgacgtcaccgctcaaaacaactcagtgggcgcttgaaataatactggcgctatgacacagcaccaatatgctccatctgaacctctccctcatcacctctccgtggtgtacgcgagcaattaatgcacgcacccaaaagacgcggtttttgtgagccaaccaaatctttttgacccgaaccacgcattttacagaaccagaaagcccccgctgtggaagagcgggtcccccgttacagccacagcgtataatcctccccactactccgagccagagcgttgtaaa

SEQ ID NO: 414739 - DNA, 837 bp, Homo Sapiens
gaccttcttgtcttctttcttaaaacaactcgggctaccatttcccgggggccccgggatctcccacaaaaaatttgggagagacaaatactcctttttttactggcacagcacggcccaaaacagaaggggggggtcttcaacctctccctcagcaggagcccgcactacaaagtggggggggaaaagagaaacaacagggggagcaacccagcaaaaaaagacggccaggcggggtacacacctgttcaccaccaagaacgtcgtgtagggaccaccccacacgtgggggcaaaccattgtgtctcgcacaaagagggggggtaataagagcggcgcccacacagaagacggaatttagcgcgagcagcgagagagctcgctcctctcgggcgcgcccacacacaagggggcgcgccaacgagtgaatggagacaactattcagacagacagagagccaacaacgaaccacgttgattagtataccaccagcgggggcccacactggggggccaaacaatgtatgtatatagagaacgcgtcccagaagaattactccacaataaaaccatactcatcttcactacagagagtgtgtgtattctttcatttaagaccaaaacagtgtgtgtgcacctacccacgacgagagctgatgtgtagtgcgtttaatcatccccatatgtagatgatgatgtctgcgcccgctctcctccctgcacaatatttgggtttcataaaagaaataaaactatgatgtgtgtgaaagacaaccaccccgcgtatgtgttgtgatacaaaaacaccagagctctggcgtgaggggggcgacaccc

SEQ ID NO: 414740 - DNA, 602 bp, Homo Sapiens
gttagaaaaggggaaccgaataccagagcatcaacaaagaacacacacgaggaacatagaagtaggtcgcctgcactgtcttgtatccataaaaaaaacttgcgccgccgggagggaagggcggggggaggaagaaaaaacaatggcggcggcggagaaacaaaacaagagatcgctaagaagggggtggtcggggaccccacccaccccagcagaggggaaggagagaggaccataccagggcgggcgcggagtgtgactaaaaaaagagcagaaggagcggcgcccgctaacggaagcgggaggaagcaaacgcacacacgtaagcggaaaaaccatacaggaggagggtggtggacgcaagttccaagacccacaaacgagagagaggggggaccgcacaacaagagaaacgccgggcgcggcgcgaacacaacaaaaaggaaaacgacgacctagcataatggagacgaaccctggcagagggcagcaacaccgaggaagccagccgcgcgaggaacacagaaaagaggaagccgcgggcaaaaaggccaccagcacacaggagccgctgcatcggccacaacccaccagcacggtcc

SEQ ID NO: 414741 - DNA, 592 bp, Homo Sapiens
aacgaccgccgaggcgagggaacatccgcgcagggaggggcaaacaaacactgcctcccgagcccggtgcgtgcggggcgccccaacgagcggcgtcctcgctggcgcccaacacaaccaacgcactgctgcgcccgacgggaggacccagcaagagaccggctcggcctctacctctctctctacgccaccaccccgtgtgtgtgtggaggcggccgccccgtgctccccacaagagggtgcggaaaagacaaaaaacctagcggacaggggcccaccccccgcggcatgctcgggcaccgcaagcgcgggcccctccctggggcgcgctccgcacgccgcaacgccggaggcatgcgggtggtcaccacaacggcgagccacgcgcgcgtacccccgcctgtgtcacacgcgagggggcctccctcccccacacccgcgtgggccccaccaacaccgcacgccggtcccacggcgacacgcccacagcgaggtgcccgcccggtcatcgcacgcggggccaccaacatcccccgccccacaccacagaggggccctcctcccaagcacaacggggggcacacaccccgcc

SEQ ID NO: 414742 - DNA, 631 bp, Homo Sapiens
  misc_feature (275)..(291): n is a, c, g, or t
gtggggcgcccaaaaccctcttgggggaggaacacaccacgcgggggcgggtgtcgcacacgtggcgggcgcaccagaaccccacatctgggggtgcgcccgcggttgggagccagcgagagaagagataatgatcgcgcggttgacaccctgcttgggcgcatggagtgggcgcccaccgccagcgcaccaaccaagctcgagcgcgcactcacggggggaaaggggggcccgccggcggtggggaagcatcggctccgtcctgcatgagcacnnnnnnnnnnnnnnnnnagacgccgctaggaggtctcccgccgccgacaagaaggggcggtggtgcggaggacaccgacgagaggatggtagaactgccgcgcggggcagaatattcagccgaagacatggaggagagagagggcgggcggcggtcgggggaggtgagtctagccgcctcccaggaaaggaggggcagctccagagagagagaacaccacatcggagggcggcgcgaagaagaaccacaccccagcgggggtgcgtcaacaaggggaggggacacccctcttcctagtcgcggcacaccagagaacaccaatcttatcaagacagaaacatgcaaaagggaggagag

SEQ ID NO: 414743 - DNA, 1693 bp, Homo Sapiens
  misc_feature (76)..(95): n is a, c, g, or t
  misc_feature (357)..(372): n is a, c, g, or t
gttgtgtgtctgattgaatttcgtttgttataatcttccctacggtgtgtataaaaacaataacatgtcctgcaannnnnnnnnnnnnnnnnnnnctctctctgggtggggggaggaaaataatcgatcgtgtggtgtacttgatgagtacgagaggaatcaacagaaaacatcgacgagtgcgtgttttctcctctatcaacgaaagaagaatacaacaagaacgtagagaatatcatgaagcataacgtgagggttaaagaagaggagggggtgtagcgcccctagcgaggaggggagcacctcggcggggcgtgccggaggagaataaataccgagaacccacccgccacggcnnnnnnnnnnnnnnnnagcgaggggcagcgcaaccagagagccaggagagagcgcggcggatcacgccctagcgagatggagaagataggggcggggctgggaaagataaacacaaaaccggcgggccgccacgcgcgcagcggggggaaaggagcgtcgctcaccagagagagagcgagagaagaaaccacgctgagcagtgatgagcggccgaagaccgtgacgcgtcgcaactacagacgaggagggaagaggggagcgccgctccactagaatatgtgaacggccacaacagtatatacaactcgaccagcacagcacaaacgcgacggcgatgacaaaagcgcgagtggaagcggcgcgacccacaaacagacgagtgccggccgcaacacgacacgagccaccaagggagaccagcgagcgcgcgaggagggcgagagaacacgaagcaaggtgcgccgtagcaaaacgcccatcgcgcgaagcacggagggcggcgacaccgacgacagagggcgagaacaaccgcaacaacccgagagcgagagagaaacagcgaaaacgccactcttcacgcgcgtgaggataacaaacaaacagaaacaaggccaatccggggtgttggaaccacagagacagacgacaaaacaaacaagcagacgcggggcgggatccattcgacaactgcaattgaataaaacccatggacaggcgagacgacaccgagagaaaagacaccagccaaccaaaaacagcagggccacaccggcaggagaatgaacacacactacacacaggggcgtgcctgacacagagaagaacgacacaaccgcaacacgccatcaaggacaaggacaatacgagcgactgacgaacccgccaaccgaaagtgacagcggactggaaaaccaaaccaccaccactacatgagaggagagcagccgcactcactcatggagaagagaacgcacccccgcccctccccaagcccaccaacacacactctcgggtacaagcagacccaccactaggagagaggagtcgaccacactacaccgacgcagcggagaaagataagaaagaaacaccaccccacagcacgaaaggggagggccccaccacctctcacccaagcacgacaacaggcggaggaaacagaaacactctgcagccacgcaacgcacgaaggggcggtggaccagaccacacaaacaacacaacacgtctctggggcagcacaacgagcgtcagctgaggaaaacagcgccgccactatcctctctcgccagcacaaacacgacagagagtgtggcgggacggcagcacagtcgcc

SEQ ID NO: 414744 - DNA, 1176 bp, Homo Sapiens
  misc_feature (42)..(62): n is a, c, g, or t
  misc_feature (65)..(108): n is a, c, g, or t
gtttggtggcagagagaaaaaaccgacagcttatttgtgggnnnnnnnnnnnnnnnnnnnnngannnnnnnnnnnnnnnnnnnnnnnnnnnnnnnnnnnnnnnnnnnnagacacagacaaaatagaattctgcaaggctggaggcaccgggcggggggagctgcgaggagggcggcgggacaagaacatgatccctgagctcgccgcccgctcgctcccacaaatgggctagcactacatacgggcagccaccgcggcgtgagcgccgcgaggacgaagaaaaaaacaagcaaccggagccgcctgcgtggcccatatatatctcgccccagacgcgccgcggggcggagaaaagacagactccacccggcggaggagcgaggaccatggtgtggaggagcagagacggctcggcgcgagaggaggagcgtagcgcggtcggaggggagaaagacaaacgtgcgtggcgcgtggcgagtggtaggcccgcgcacgaggagcgtgacggcgagtgatgagaacacgagcgccccacggcagcggcgaggtgacaacaacatagatacagtacactaacgaaatctggggtcggggagagtgagagcgcacgcccgcgagcgaagagagaggggagcgataggtgcagaaaggacgaaacccacagacaccggccgaacgatagaagacgagcgccgcgagcaagcaggagcaagagcaatacaaacggaagcgtgcgggcaggccgcacaggacaggacaccaaacaaagaacgcggctgaaacatgcgagtgcgccacgcaaaactcccggcaaggcccacacaacacccacgagaaactgacgaagccgggagggacgcgtacacccaacacccgggcaatcagaaagacatgtgcgaagtgcgggcagacacaggcacaaccacgggaccccaaccaggcaaacgacagacacaagcaacacagacgtcgcgacgagagcaaggagcgcgacacgcgatgtacgataacgacggcgcaccgcacgaaacaaaaccacaagaagagggagagttggtggttcctcagcccaaaacacaagcaaaaaaagagacccgccgcggggggtggccggcccgcggcggggccctcccccccacagccacaacaacacaacacagacccaagagggacgtt

SEQ ID NO: 414745 - DNA, 1032 bp, Homo Sapiens
tgcggtggacaacaaccactctttgggcgggggtgtccccccctctctcttctggtgacaatttataaaagggggtccccccttttctcctcactaattatgttggtggtggctcatcaccctctctcataatcagggtgttccattggtgtggtgcttcaacacacaagggggtcctccaccaccacattgtgtgcaatacacatcgggctcctcccacagagtggggtcgtgacagcgtcacacacaagagagatgggctgtgggcgcgctctggttcaaaagaggctctgtggtgctacagcttctcgcggaacatatacccccgcggtggggcagcgagcaccctcgggaggagaaaggagagggggcgagttctcagaaaacactctctctgtgtgaaaacagcgcgctatctattacaggtcgctcccactataacacctcctccacgagcgagaggagacagtgcggcccctctcacacgcggccgccacaaagcgagcgggggcggtgtatcaccgcggggagacacgctccgatcttctcttagagagcagcggcgccccccaaaaagagatctatcgcgagcgctactcgcgagggaagaaatcacccggggaggaaaaaatcacggggacggcgcgagggtcacccaccgcacgcgggtgtttcgtttgacggaccccacacgcgcgggtgccaaataagtgtgggcggccccccaaaaaaaggagagggcaccacagatgggtgcgcccaaacgaggtgtatacccgcgtgtgtgtaacaagacagtgtggctaactagcgcgcccccgcgcggaggccatgagggaatatacacaactcgcgcggagggcgaggaagtaaatatatcgcaccacgcgcggggtgttccctcacaacatagggggcggccaacacccacccgggcggttgtagatgggggcgatcccccgagaggaaggaacactagcaggagggggatcacccaaaaaagagaagcctctcgtcgttatattttgaccg

SEQ ID NO: 414746 - DNA, 578 bp, Homo Sapiens
aaaaggtgtttattttcaccccttttgttggggtaggttctaaatggtatgtgttcagagtccccgggggtatcaaatggataacgccgtgtggtggcacctctcctgtgtgagtatatattccgcgattggtgtggtggccccatgttcaaatatatttatgggcgcctctgtgtttgtggtatggggcacccccctatgttttgacgccacactataagctataagtacctccttattaaaaatatccctcacaagaggcgggggccgagttgtgttatagcgcgaagaatagtgcaccactctttcgcgctctgtggcccctggtgtcgtgaatcctctttcttgacagagagcttctgctgttgttcccccccgagggagtgtactcttcccacacttatttacaaaaagaggaggttggggagccctaagaagatgtgatcgcgcatctcccggggcatcttattagcggctatcatttcttgttgggggggcacacactattttccgctggctcttagagagaagcgcggggaagaggggccccccacaacacaaaagagaaagcgcgcgct

SEQ ID NO: 414747 - DNA, 619 bp, Homo Sapiens
ggacgcgcgggggggagtgggacgtgcgaccagcacaaacaaaggagtagggatagaaataagagcatagagcgagggcaagcgcacaacaagaaaagagaaaaacactcatgaggacgacgacgggtggcgagccttactcgatgacagcagggtaacggatggcggggagggggggaggagaacaaaaacacaaggggcgacgcgccgcgcggagggtggtgagtgtgcgttgtcacgaaaacataaacaatagaaaagagtgcgggactggggcggcagagacagacacgaaccgccaagaggcaggggcgggggcgaggacgaacagaaggcgaggggtggcagaatccacgcgcacaccacaagaaatacggccggatactacaggatgaggtctgaaggaggaggccgggaagaggactccacacaaaagactagagaaaatagagcggcgatcacgcacagagagacagaaaggttaccagcaccagcgccacccggagaaccaagaaacaactatcacgaccagacagagaaccggctcccacgagcgccacagcacacacgacgacggggaaaaccattctcaacagcgccacgagcagatgtcaaaccc

SEQ ID NO: 414748 - DNA, 824 bp, Homo Sapiens
  misc_feature (174)..(269): n is a, c, g, or t
  misc_feature (430)..(482): n is a, c, g, or t
ccgtggtggtggctcctcccgcggaagagagctacgacaggggggggatcccaccgacgaaattggcactgtcgggtgccccaagagtgtgccccgtaataaccaagggtacccgggggagagtggaacacctcctgggaaaagcggcgtgaacacatgggaaagggggccccnnnnnnnnnnnnnnnnnnnnnnnnnnnnnnnnnnnnnnnnnnnnnnnnnnnnnnnnnnnnnnnnnnnnnnnnnnnnnnnnnnnnnnnnnnnnnnnntgtaattaccgccgggtgaaaaaaccccccgcggaataagtataccacagtgccgcccgagaaggacgcgctccactagggtgggcgccggggtgatatcccccacccacgacccacccgggggtcttggacagccgcaaacttccgcccggggggaaaannnnnnnnnnnnnnnnnnnnnnnnnnnnnnnnnnnnnnnnnnnnnnnnnnnnnccgcgaatcccccgaacaccccccgcgtggggtaataccgcccggaaacaccccccggggtaataagagggcgcgccgccaccattggggggtcccaccaaaaggacgcggggagggccaacaggggggcccaaataacacctcggcgccagtgtgggcccccacaatacagcggggaaaacccccctcccgagaaagcggtggaaccccagaaaatctcctgtaaaaagaagcggcatattcgggggtccccaccgggcgagagaggggccccacgtgtggggcccccagagaaaccaaagaggggccgcagggcccgctacgagacggaaaacatccttc

SEQ ID NO: 414749 - DNA, 999 bp, Homo Sapiens
  misc_feature (499)..(509): n is a, c, g, or t
gacagggggttaaaaatatttagtccgttgttacccccccgcctctttttaaaagaaggggtgcgagggtaatgtgtatattaggggtgggagcccacaagcggaggggcggggggtgcaaaaagctcgtccccaaaacatcgcaggaggggaggaggggcgtggtgggcgagaagacacaacacggcgcgggggcgccccacacatacgagtccacatacaccccggggaaaaaaaggggcgccccatattggcaacaattgcggggcgagaaggggggcgcccaaccagtggggagacacaacaacaagggcacgacgaaaagcagaggtggaaaatccctggggggggcagcaatcatacaaactgcacaagaaaaaagacacaactcagaaaggatgcaccagagactagaacctccggcagcaaagtgacagaaccccgagtgggagcactccgaaggaaagaacgcctcgtggcgtctgtgtagaacaacgannnnnnnnnnnaagaaaaccacatgggggcgaacgaacaaaaacaacgggcggaggcgtggagaagggggcggggcaacaaaaagagtggtgtgtggtcgtccccccgcagccgcgcggtgttatgcaaactgcaagacgagagagagggcgggtgatcaaaggacagcagggagagggcatactgcgtccccccacatttgtcagcggagggggcacatagagagacccccaccaagggggggcgggcggggaaaacaaaggcgcggcggacataccacgaaccacacggagtgggaatgacagaaacaaccagcattttgacgccgcgtgggaaaaacacaccgtgtccaaccaaaacgaggggaggggtggcaaacaagagcatggcgcagcgcaaaactcgggggcaacctctaacggagtgagaagaacaaaggcgggcccctatttaggccaccctgcccccctgggagagaaaaaaggccggcaaaaggggggg

SEQ ID NO: 414750 - DNA, 982 bp, Homo Sapiens
gatgggggggacaaaagacgaacagccggcggtgctacaaacaccacaaacacagttcattcattgatttgcacacaatcctcatcttctcaataaatacagcacaacaagagggccacaatgatgccgactcgcacaactccgctgatcgacgaatcaacatcggagcgaataagagcggaggatacgaaacaaacctgatacgacgcgaggcagacatataatgaaacaacacaccctcccgaggtgcgcgaggaggaaagcgtctcccaacaagacagagacgaaacaacacgacggcgagaccgaagacatacgagctgtgcacccatgaagcaagggagagagaaacatgtgagcacaacgcacacgcagcacacgacagcggggcgagagacactaacactccgccgcacacgacaggatctagcggagtgcgtgtgcagaacaaacacgcattcagtggcgcgccgccaccgaacgacaacatagcagagcgtgctgtgcgtgcctcacacgccgcagagaccaatagccagagatcaccaccccgcacagcgcatccaacaacgaaaggcgtaaaggagacacagcgactgtggtcagacagagccccacccaaacaaaacccacacccctgagagagagagagccgcaacgagcaaacgccagaggacgcgcgcagagagaacgccaaactcggacccaaaccaacaccgcctctcgaacgctctaccagctcaggcaacacaacggcggaggcgctgtcccgcaagaaaggaaggcatgacagcccacagagcaatgtgtagaaacgaacccccatgaccacgtccccgaaagaagggcccaccgccaccgaagcgaaccaacccccgcgcgttagccaacactgccccaaagacacaccaccacaaccttggaagccaggaagacgaaagaggggactaaacacccccccgcacgggggaaaaaacaaccg

SEQ ID NO: 414751 - DNA, 650 bp, Homo Sapiens
ataagtttgtcagtcatcagctgcaacggcggatacggatggagagacccacatgacacgggcatcagcagagacagcagcaacaaacagaagacggaacagaaggcaagcgacgacgaccagcgctgaacagaaagccctatcgcaccagcagcgacgcgcgaagcaggaggcggatgaaaaggcagcaccagacaggaacaggaagcaagccacgacaaggcatgaacggcaccaagaacgaagggaagaaagcgtcacgtgcgcgtcgagcgcgagagagagccgcggcgaaagacaccaatacgaggaccgaacaaggcatcgaaccacggacgcaggctgccgcagagaagaccacaaagaagaccaagaagaagaataagacaccagctggggcgcaccggacactgacagaaacatgaccctagaaatgagcgagaacaggagtagggacagacaaacaacacccgccccaagacaacggcgacgacagaagatggcccaagtgcccccgcacatcaatggaccacaggagcgggacaaaaacggagcgaagcgcagagagagaacggaggaacaggcaaaaagacaccgatcacagggaaaaacaggacgagctgaacaagagaaccaacgcttgggacgca

SEQ ID NO: 414752 - DNA, 1622 bp, Homo Sapiens
  misc_feature (60)..(94): n is a, c, g, or t
  misc_feature (330)..(330): n is a, c, g, or t
  misc_feature (914)..(914): n is a, c, g, or t
  misc_feature (1097)..(1097): n is a, c, g, or t
  misc_feature (1284)..(1284): n is a, c, g, or t
aagggggcacaccacacgggggtttttttccccaccaacccacaattccctcttgggagnnnnnnnnnnnnnnnnnnnnnnnnnnnnnnnnnnntttcccacacccgggcttctcttgccaaattattttacgcccttcttcaaagaaagactctgtgattcccacggtgggtgcatctattttgaatttctcagacgatacgttaatattatttttccagggggtatccccctattatgtgtccatctcccccacccgcggggcggcaccggagaaaacaacaaaccacttgtcacaacaatctccggcgggtcaacattactgctggncactagtgggcccagcgcatgtagtgatacacatctatctgcctatatatattaccgcctgctatctaacacatatgctatttactcccaggcggtgtgtatctcttccgttactcccacactgctacagagcaggaaaaatatattactcacctatctccccactctacacgcagaagacaaaacatataataaagcggcacgctatattgtgtgagtagtgtagaggacccctccgcagagtgggcgggacccgccccgtgtgtacgccatatatgatgtgctatgtagacatatacgatatattatgctgtgaagcacgcacctatgtgtgtgtgaggaaaagacacctctcctcgcgaacacacagaactatacatgtcctttctcacagaaattgatggagagacccacgcccataaggcgcgcttataatataagataatctcaccacaaatattatatctctctccacacagcacaaacagaaatatatatacgggctccatgaagccgcgcgcgtgcgcgctcttaagaaaagaggggcgtcgcaacaccccctcgcctcgtgttgttctctttcnccacgcaggcgtgtgcgctccagagaaaaatagtaagagaggggcgcaaccatacgtctggagaggtactatatcaccgcgcgcggagaaaaaagtcttctttaattaaaaaaaggcgcgggcggggggagtgtagggaagacaacaaaatggtctttgccttcccctctttaaaatgtagtngtcgcgcgcgaaaaaaggagaacgcgtctccttcgtgtgttgtgttggcgccccgcgtgaaaaaacaacccggtctcttctaatacattatgcgacaacacataacacccctcgtgtaatgtagagagtgttctccccacaagcagcccccacatgtgtcgtggggtttagctcccccccgtcgggncgcctttatataaagcatgatatcgacccggttaataattgtatagtgagcacacaagaatacacagcgcgcggcgcgctcgacagggccgctacacacacaagtggcggccacaaaaccacgcatttgaaatgacacaacattgaaatggggggtgatacccctcgagcaggagtggcgcccctaagaagaaagaggggcgccccccaaagaagagggttgctctgaataaaacggaggcgccacaaacgattgctcctgagtcacatgtatgagaaggacgggacagaccccccgcgtcttatattgccgggggggttggcggggaggagacaccc

SEQ ID NO: 414753 - DNA, 1159 bp, Homo Sapiens
  misc_feature (44)..(61): n is a, c, g, or t
  misc_feature (152)..(162): n is a, c, g, or t
  misc_feature (466)..(475): n is a, c, g, or t
  misc_feature (974)..(1058): n is a, c, g, or t
gtccacccaagagaaagaagatattgtgttctgtgtagtacacnnnnnnnnnnnnnnnnnncacacctaacgtcgcgcccgcgccgaggacactaactatgttcatgtcctgcggcgaggaagccagagagaggccgcgacgcggggaggannnnnnnnnnncggcacccaacgacacgtcgccggcgcggggatatccaagaatcatgccgctagccggcccaccccgctgtagtggagggtgcttcgcgctcctaagaatatacttgtttcggatcaaaaaaatactatcgtgttagacctgctctaaaaaaacactaggttggggggcgcctgcgcgagggagatgtttttaaatcaatagaggagtgaggctcgcgcgcagagtggggacaccgcagctagttgatgacgccctgggaagaacaccccgcagaagatggcaccgatgtgcggtaccacgcannnnnnnnnngccaaaatagagacatggatcgccgaggggcggccggcccaccaaaaacgatggcgcgtgacatccgcccttgctgagcacaccacggccatgggccgcggcacaccacaggttggaagcggcaagcctccccccggcccccaaccacaaaggacgggcctctgtatgagacggaaagcaagcgcaccgattgggcagccaccacccccacggtcggggtcccggagccggccgacgcgactcgcaaccgcatccaagagacccccagctccctggcaacaacagggcgccgagagagaaatcacccgcgcccccctcccaccgagggccacaaaccagcgaggggctacttccccgacgctgcgcggccagcgcccctgcaagacacacggcacggtccccgcctcagcacagcagccgggagggcgggccgcaccacccagtccgaagagcgctccccaacaaggcagggagacacatccataaagggacgacatgnnnnnnnnnnnnnnnnnnnnnnnnnnnnnnnnnnnnnnnnnnnnnnnnnnnnnnnnnnnnnnnnnnnnnnnnnnnnnnnnnnnnngacccaccccaaaagaggaggcatcgccgcccgaccacccccggaaaacgaggctcccacggctcagaccaacaaaaccaaggggtgcatcgaccaccccg

SEQ ID NO: 414754 - DNA, 1317 bp, Homo Sapiens
  misc_feature (1054)..(1054): n is a, c, g, or t
  misc_feature (1285)..(1285): n is a, c, g, or t
cccccccttataaaaaaaacaatatatattccctttgacacaaattgggggtgggcgaaaaaaagttatccccccatgggggggatacgacttcatcacaacacggctggtgaacacatggttgaaaaggagaggagggtgccacagcgcgagagaatatcttcaaacaaaaagggtggcacaaaaattctttggtgggcgcacaaaatggggcgagggggccgaaaacatagggggtgaccaagagaggagagcttctattttgtttttcactccacaaaaaaaatttgtgtagagaagaggtggttgtctctcactacaccctgtggggtggagaaacgtcgtgggcagaaagagggggagaaaaataacaaaattttgttgggagagacgacggagaaattctgtggtgcgcactcctaggattttcgaagaggaactcattttcttgtaaaaacactctccgcgagagtgttgtataagagagagagagggggacctcgattagacatacatactactgtctttttataaatatacaggagtggcggcgagtgaagcagactgtctatatatgtctatttaaaagacgctctttctaagaggagtgcgactgttgtgtatgaaaaacatatagtaaacaagacctgcttttatacacgagagagaaagagaagagcgggggtatgatacacccccatatgtttggtgtggggagagatgagcgcgccagcatatctgttattatattatatatctacaccaagaagcggtgttaggagagtgtggtgttgctacattaagctggtgtctcgccgactattataaaagaagaaggaggcgggcataatatttttttataaagaggagatgaggcctctcgtgcaaatataatttagagaaaggacggcagcgcttttcttattagttatatgctaatctataatctctatctgacaccagagccggggaggatggtaaatttataaaaccgccaggtggttggttaatataaatctctcgcccccgcactgtaatgttattagaaaaaaanaaccatgggcgtggtgtttttgttggacaacacacacggtagtttatcatcaacaagaaagggctgcgttcgtattgagtatagaggagaacatttagagaacactccactgcgttatgtttcaccgaggaataataaataatgtgcggcggcccgcccgcataattatataaatacgccacccccacccaacaaaaataaatttctattcaccacgataagattttatcncagacaggcggcgttgttactattacaaagca

SEQ ID NO: 414755 - DNA, 1041 bp, Homo Sapiens
  misc_feature (54)..(68): n is a, c, g, or t
  misc_feature (224)..(224): n is a, c, g, or t
ctccccccacacaatttgtttcttggcccacgcaacaaaatgggccgccccggnnnnnnnnnnnnnnntgaggggaatacggggagagtggcggggcccccaaggggatactacgcctcttacatacctcgggaatctgcttaatcccgcgggtgttggtgcaccgtcaagaatcctgtctagttaaaataatatgttcgtactaagatcttataaagaggtgnattgccgcccctcttgtttagtggggtgggcggcgccaccgcatgctcctatagttcgttggccagcagaaggaggggacaccaccgcgcgtggaggcaaagaagcacactgcgtcgctttgctaccgtcgcggcgcgacccaaccatctgggtgcggggtagagagacgaccgcgctctctatataaacgcacacgaggggggggcctcccacagatgggtgagagacaatagacgcagagcgcgctgcggcgcgagcaggcacaagctgcggcgagcgagaggaggtattacttgtgagtgccgacaaagagaaagacaaccgcccggcagtacatctcgcgcgaaggcgtgggggaggcgggcggggaaccaacgaagagagaggcgctcgccacttcgcttggcacccggccccgaatagtgcggggcgcacagtgtaaaaaccacacggaccccagcgcgcggggggtgtgggaccaaccgcacccagcgtcctgtgagcgaaggcgagtggggcgacatacacagacgtcaggcacgcccaacaatgacgcgtggttgggcccgctcgagagaaaagataagattcggccagcgagggggaactcgtatgagtggagggacgctcgcaaccagagaggagagggtgggtggcccaacacgagaagagggatcgtccccactccacaacaaggggattggtgccagagacaaccgctggggagggaatagaccacagccaggcgaggggaagatcctaaccggcgggtgccaaaatcaataacctcgaagaaggggagggccctccctcctt

SEQ ID NO: 414756 - DNA, 1215 bp, Homo Sapiens
  misc_feature (50)..(58): n is a, c, g, or t
  misc_feature (968)..(979): n is a, c, g, or t
  misc_feature (1041)..(1041): n is a, c, g, or t
atataggggaaaaaaatttattttctcacacaaggggagaagaaaccccnnnnnnnnnccaagccccacaaaaaccacaggtcgcgggaacacctgggggtccccggtgaaaagggtgggggccccccaaagaagaaaccccaagttataggccccagcgtggtgtctggtacaccaatcgtcggtcgccccgtggggggctggagaacaggcgaaatcgtggcccccactccggtgtgctggcggggccagggaactccggtagatcaggccacacaaaagttgctgccgtgataatagccccacaaaccgtggggagggatcaccgcccggtgtttcgggcgtgtgtgaaaaaacaacatcgtccaaggttgtgacacaacattgtcagaagagaacgcgcagagagaataacgtgtcctgctgggccgcccagatatgtgtcccctcctccaataaaaagtctgccgcccaactgggtgggtgttgagaaacacttctgtgttccctcaaaagaagctggctattctggggagacaccccgagagggggcgtcggagggcgcgcgtcttaataaaaaataagaggcgcaatacccccctcgtgggtgagggcccccggcgtgattaaacaaagggagaaggggccaacgcacggagcaatggggagtgtccacccccgggagggaaagaatgtacgaacaatatgtgtgtgacaaccacggggagaaaccctgtgtgtaccaccaacgcgctccttggggagagagaacccccgcgcgcgaactccgtgggggtggcttgggaaaaaacacctctcgctcgttgaaagccgcgcggtggggtatccatacaagaacgtctggggaaagatctccccacacagcccgaggtttacatagaaaagccgtctgtcgaccacaccttccctatgtgagagaacaaacagatcggacgaacaaactcccnnnnnnnnnnnncgaggccaccacaacagaggggagcggcggaggggagaaaacgaggggagacactccactcnctacaatcacccaaagagagggcggacggggaaaggagaaaacgcccgccgcgggacaaagaatcgtggctttcgaaccaaacacacggccacagacacacatgaggggagtagggtgatccccccctgccacaaagagggccttcgcaggggacccaaccatgtggagtggga

SEQ ID NO: 414757 - DNA, 1046 bp, Homo Sapiens
  misc_feature (249)..(249): n is a, c, g, or t
  misc_feature (529)..(529): n is a, c, g, or t
  misc_feature (533)..(533): n is a, c, g, or t
  misc_feature (668)..(678): n is a, c, g, or t
  misc_feature (873)..(873): n is a, c, g, or t
accttattaaaaaattatttgtaaaaaaagaggggatctccgctaaaggggggaaggaaagagagtatcatttgctgcgccccgtgtgggggctccgggagtgaaccaaaaaagtgattaaaccccccaagagtgtttctcccacagtgtcgcgacaaaaatacaaacgcaggaaaatacccaagagaaggggcgacctagggtggaaccaaagagttctgacatcataaggggggcccgcagcagaanactaaaaagatcccggtaggaggttagacaacaacgagagcgctgtaagtaaagaaatttgctgggggtctaagagaaccacatatatgggggtacagagagggtgagaacaacaaagagggggtaacgcgaggggcccatagatgtagaacccactctgtgggttgcaaagaggtgaaaggctcccctctaacttctaggaatgggcgacacaatatttacacaccggggggatacctcctagagaagtgaaactactattcttgaagaggtcccccanattnaaaagagtgcgtcgtctgcaccacgccgtaattagagcagtgcgcaagtgatattacccgcgcgcagaacacaaaatgttggcgtgggcccgagcgagaacgagggggcaaactactctcacgcaaagaagagannnnnnnnnnnccgcaatgatataaaactccacgagagagacgcgcgtgtggtggtatcaaggcagcgccgcgcgagtagtgggactccacccccgggagcgctacgacacaattatgagaaaagcacccctatcagcaagtctatctcacaaagtagctagcaccgcggtcgagaaaacacagtatcgtcgtcttgagcagaacngaaaaaaagatggcgactccccgcgaggtagagaagcggtattatagagcactcatgtgtaagggcgccaacatagaaaacactctatcagtgggtgcgtgtagaaaaggtcgggacgatattgttgccgacacaaacgggcgtaacacaaccgggggaagaagaggggcggc

SEQ ID NO: 414758 - DNA, 1003 bp, Homo Sapiens
  misc_feature (89)..(98): n is a, c, g, or t
aaggtctctttattaataatctcataagaaacacttttgtccaaaaaatattgctgcaaaaggcgcgtaattccgacgactgacaaatnnnnnnnnnngacaagacgcagacacccagagaggaacgagacgtcgggggacaaacaacaacatctcgtcgcccacagaagcaacgagaagcggcagatgagtgaccgccacgcctgcgccgccccgaccgtcgcacgaccgtgcaccaatcgagaaccacaacacaaacacacggcgtcgtgaaagcacaggacagaccgccacacagcaggcgagaagaacacccaaacacacacaatcaacacggcgacacactccacagagcgaccaacacaacgcatgcacacagaccagtcgccaccaccatagacacgggaaagactgatcaacccaagagactcggagaggacggcgcccagacacccacagaccacaaaccggccccaagaacgtcctgccacgctcgcgcgcggcccccacgacaacaccggtcgacctacaacgacaccagacagagcagagagagacacgcccactcccgacagacgaacgagaacgtgcagcacaaccaaaacgagccacggcgctcacaaagcgcccttcccgccacgcgcgacgacagcaacgaacttggcaccccctcacccccagcaatacgcaacgcaacgcaaccaccggacgtgtgtcgtccgcaccaacccacccccgcccgcgtccgggaaagccaaccgcagcaagagaagcagcccacacacccgcgaggagggaggcccagccaatagaataggcacaaccccccctagcgacgcgagcctcaacaacagggatacagtagcgagaacacgcaaaacacaaacacatacccctgcggcagcagaccaccagcccgccacagcaaactgacattacattcgccgaacacaccgacttccaaaacgacgaaccgggctggagacgaaccaacaaagaacca

SEQ ID NO: 414759 - DNA, 1475 bp, Homo Sapiens
  misc_feature (343)..(389): n is a, c, g, or t
  misc_feature (423)..(423): n is a, c, g, or t
  misc_feature (565)..(565): n is a, c, g, or t
  misc_feature (831)..(839): n is a, c, g, or t
cacaaatatttaggaaaataatttttttaaaagaggggactacacaaatactttttagaaagacacaaaaacacacgatgtgggcgcccgcgggggggaggagaaaatcccacagtgggccaccgggctaatcgatggtaccatcaaggggaccattattattgggcgccgctgtattaaaacccttcttctacgccgcaaaaataatagaccgccgctagggcggccctcctctatgagaggagccttctacaaaccgcccaccatgatagtgtccgttctccacaccaagagggggggctacactcgccgagaagaatatgtggcctaactatgcgcggcnnnnnnnnnnnnnnnnnnnnnnnnnnnnnnnnnnnnnnnnnnnnnnntctctttttatgagagaggagacactctcacttntagctcgcgcgagggggagtagtttcaatatattcgtcactgtattattattcaccgctcagtcgtgtgtatatatgaaagaaacagagtaggtgtatattgtcctacatattttatgaagtgggcccccaatattgtcacnacatcagtgtggccacgacgagtgatacgacggttctccacgcgaataagatgaggtgctgtccgcggcgcatatatagccagcgcgcgggacagaggtgtgtgatctccttccttatatatacagaccagaacaccacagatgagttgtctacacaagagatgtggtggtgcagccacctctctcacagcacatacattcagcccagcggtcatctttcttgtctaacaccgacatgagacacaacaccctgccgtggtgggatnnnnnnnnncttccgtgggtgggccccaccaatttagagagaggaggattttataacccacatatataggagagagggaggtggggacatataaacacccgccacgaggggggggcgaggaacatagtctcttcttcgcagagaaaaaaacacgatggttgttttatttcctcagaaagccggtcttaataaatctacttgtgttgtgttagaaagaagcagagaaaaaaacaaccctgtttctttcttctgctttggcgaacacaaaaatttgtgtccgccggcgggggaaaaacaaccccccacaagtgttggtgtcttctgtccccccacatgttatggacgaaccaaatataagtggtgttccccaataaaaaaagtgtcctcagatgtcgttgggtgcaccaaaatcaggggtgagtattaacacaaggcggggcttcttctttaataacagggtgtgcgtggcagcgcagaagcgggctatcttggcgtccaaacacacgcgggggcgttctgtatggccgggcgggtgtgtgcaacaaatgcgtgggcccacaaagcaaagtatgtgcttctggtggagaaaaacaggcgggtatatatcaacaaccgtccgtgggtcgagagttttatatatacgcg

SEQ ID NO: 414760 - DNA, 532 bp, Homo Sapiens
aaaatttctgacccaaaaaaaattttttggtgacaattaccccccatgggtttgtgactcaaaaaggacccccaaagggtggttctccattttcccaattaatttacagcccttgagggtccttggttgaagatcaaaggccaagggccgcccagggaagggtggacatactccgtgggaatgttcacctccggcggtcctggtgccgggtccaaggtcttccatcaagctttgcaatttcagcatcctggcgagtttcagacgccatagggtgagagctccttcgtgggatcagttcctataaaggcttctcttatctgggcaacaggggtggtgcgcttggtgacaaccctccctctgagcgggggaggaaatctgggggagaacagatggggccacagaagggagggccaatgggcctgagatccacagggcgggcatacgccatggagcttaagaaaggggatggagcgctattggagaccgggtaagcgagagggcggggccaaaaattgcggaacgcggagaaaat

SEQ ID NO: 414761 - DNA, 1788 bp, Homo Sapiens
  misc_feature (725)..(725): n is a, c, g, or t
  misc_feature (822)..(822): n is a, c, g, or t
  misc_feature (1123)..(1123): n is a, c, g, or t
  misc_feature (1673)..(1681): n is a, c, g, or t
tttatatttttttgggcccattttgtggagaaaaacgaacacgcaaaagggggaaattcctttgggaggaaattccattctattcagaaaccaagggggtgagggggactactcaccgccactatctactcgcgtagtagttggcgaccaataaaaggagagcaaagtgctggttggtggtgaacgccgaagaaaaaaagcacgcctccttactttgtgtgtttgtgaacaaggagtccaccacattgatgaaaaaaaccaatcagagcttgtagtaaccgcatccgacgacgtgatagaaaaaaatatactcttgctggaagaaaatagctcctcccagacacacaaacgaagtggggggagaaaaatagtctgtgtagtaatctacttgtgtaagacacatatctgtgcttggcgtagagccaaactgtgtctgtagacacagaaatattgcatgactgcctcccaataaaaatctgctttgtgtgtgtgaggaggcggcgggtgtattacatgcttctcatacatctattctttctttctattcaagacaagagacagagaacaaccactcttcgcgaggcgctctccctacataaaaaaagcgataggtatgtcaacgagcgggcggcctctctcgcgcgcgtggttactccactatattaatctctcgactcgcgcaaccaacacgctcccttgttttgttccctcgttgagacacccanaaatagatagaccgcactctctctcgggtggttgcctacccttatattatcttctacacccaagccactgtctctctcgagcgaggcgaagaggagntgagatcaatctttcgcattaatcacccgcacaggagcgcacggcctataaaacaactccccagcgaggggggacaaccacctctcctgctgtggggggtccctcaacccgaacgagcaacagtgtcgtttggcggcaacgacacatcgatacaaaactcgcgcatatactatcgccctgctgctttcttggtcggacaaacaaccccgcgcgtagcatatattcatctctccccacaaaaataagaaggtcttctatccaaaccggacgggcgaagaacagaaaagcgctccagcccaanacaccacgggccgggcggggccccacaccaagacaaataacaacgtcctctccagggaggacggaccgcccccagaacacaacactatgtggtgtgtggagacacacaccatcaccaccgcagggggaagtaaatactaaccccctcgaggacaggctgggcgacgaaagcaacagcgacgcaggaggaaggagggaagcaacccaccaactgcactcacagcgtaggaggggtgcttctctccacccaccgccccccgctggcggggagcagcacccactcggatcggcgttgacaacacaacaaacaagaacaccgagcgagcccgccccgaccgccacacccaaaaactataaggacggcaaggcgcacaccacccgaccgagccgactccaccaaccatattcctgtccacgcaaagagagggagggtgacgctgacgcacacccccacccacactgaccggacgacacaaagacagacgtcggagctacgtataaacacaccccgccggggacgaaacacaacacaccgaacgagcgagcgccannnnnnnnnaacgaacaaaacaacacaacgcgccgcgcgccctctctctcaccagacacgaacacaaacaacagctctgcaccacccaccccgaactcgactgaccacagacagcc

SEQ ID NO: 414762 - DNA, 1521 bp, Homo Sapiens
attgtaacaggagggaaaaaaaattttttttcctaaaggcttttctcctttggagggggcaaaaaaaagtcgggtccccatttccgttaaaaaaaccttttttcaaaaatgcttaacccaatatgtggggcgtcgggcccaaaatagatacttttacgagtgggtgatcaatatattgagggaaataaagttttggtgggaattataagatatcttttgtacaaaaaatagtgtcatcaaatgtagaattcaaaactccttttaaatagacgccgggtattaatagagggaagaaaaatatttgagcgtgggtttaataggcgggtatacaaaacacgcatctatctttttacaaaactagtctcttcagatataacacacacccaatatccacgggtggggtcctctctaaaaaacctcagggggcgggaggaaaaaatcctcgcggaatataaaaggatgacctcatcttgttcaccttgatgtgggtgacacacagacagcgtcaagtaaaagattcccccgagataaacaggtttctattattcttacagcgggcggcacccaccttatagcccccagaatctctctaccagagggccgctaggacaatacaacaccgtgggggggcagcacgcggacacaggttggcccacccagggggttggtcacaaaacttggggggaagcgccaacaacttcatccggttggcggacaacaactttctgccgccaaagatggcacaacacacgggcgtgagaggggaacaccgccaactatctccggagaaaaaccatctccccgtcaaagcatggcggggtacaaaaacccgggctaccccacacagcggtgcggccttagaccacacagtttgcaaccccaaaggcgcatctgcacctacatgcggacacacaaaccaagcgcacgcagggcgcccacacagaggagcggtgtcccacccaactggggggcactacctctcacagaaacaaatcccgtgggtgggcaccggcaggaggatatcgccccccagaaatagggcgacagcgcgccagatcgtagaaacaaagaaacaacaccccctgtagggaccgtctgctaaaaacaccccccgcgttgtcataaagacacccacactacacatcacggcggggagaatcaccccaacaaacaacagagaagagcgtagttgatgcaacgagaagaaagtgattgttcgccccccgagtgagaaccgaagccaacgcaggagagcgaccccaggggagtgagccgccagcacagacattaggtggggggcgcaccaccacccaacgccagtggtggagaaagacaagagcgcagcgaggcgccttgtcctggcggcgcgccaaccaacagacgggtggctggtctgcgcacccacgggggaagagggtagaaccacacgccgtcacccgagtgctgagtaacaacaccacgacgcgcacaccaccagggtggctcgacaccacactaggcgagagcggaacacataagcag

SEQ ID NO: 414763 - DNA, 671 bp, Homo Sapiens
  misc_feature (51)..(62): n is a, c, g, or t
cacctacccacctctcttcaaattccccgaaattttttcaaaacccacacnnnnnnnnnnnntattttctccgggggggaacacaaaaaaagacaagcggcgctttcctcttgggggggcaaccaacgacggggagacaactaagtgtatcctaaccacgagtgggggcgtggccagaggcagcaacacaccccacagtctatgagtgggggttgatagcaagaagaagaacatctcccactgttgtatcccccccaggcggctggaaggtcgacaggggtggagcacctcctctgcaccactgagctgagccaacccgcgcggccccgtgggagtgttgcacagaggaggacatactctcgggggcacaaagcactccccccaacgaagacgcgagggaacaacaatactgaggggggcaccgccacaacacagaagcgccgccgggaaaaaactctgcgcgggactctcttcacgatcagaagacaaagcaggcgtggctaccaccaaagtggtggcgcccaagggcgggactccccacaaaagacaccgtacgcaccctgtggtataaacaccgcccccacccactgcggggtgccccccaacaaagaaacaactcgtctgctgtgagagggggcggcgagcaggcgacaaccaccagggagggggcg

SEQ ID NO: 414764 - DNA, 1474 bp, Homo Sapiens
  misc_feature (1181)..(1189): n is a, c, g, or t
cacctgttgtaaaattgttattgatgtttgaggtgactctttaaataccctgaaaagagagaagaaaaagcaggggtgctacactagtgggggggaaatctttatgggccgcgaaaacaaaaaacgcaaccaaggacgaccctcgagggggggcaacaacacgaccagcagccgtggacaatggggggggaaccacaagggtgttcccccgcgggggttaaaaacacctcctcccaaagaactcgggcaaacaacgtgtggtctacccacactgaacaacaccagggggcgcacacaaaaacacaacccagcaaggtcaccaaacaccccgctcactcgtccaaagaggggtgtccccccacgagtggggggcccccaaccgagagcgtggatgaagaacgcccccaagagggctgccagtggtgtgtccaccacaaacagacaaaccgagctggtcagaacaagtgtgggcactcctggcacgcacggaacccgagcaatgtactcagacaaacgaagatacccagacaagagaaataccacagcgcggcacaaacatacaaaccgcgcgcgcagagcgagggcgaaagcacacacacacaacagtgtggtgtggtgcgcccacctaacaagaaaccgcacgttccttcaccccacagtatgaaagtggctccctcaaaaaaaccgcggcccgcccaggacgtaatcacactcagacacacccccctccctcctaggcacgacagaaagtgcggcatcccacacccagcggacgggggggcgatccaacaaacccacagtggtccctcccaagaaaagagctgcccgtcacacaacacaacactcgggggcgtgcgaaaacaccaccactagcaatcccaccacagaaggggacaacatttgttgccctaccgaatgcaatcaacaacacaacataggatggaccaccaacaacaacccaagaccggtgctaccagagaggaaacaaaacgacaggtggttccgcaacagaaccaacaacaactaaacaccaccatctgaaggggtggtcccacacccaccaatactatgggcggggacgcacaaaacaagcaacccacggaggtgtgcgggacttataaatcatacgggcacgacccacatacctcgccgtgatgcacaccccgaggcacggaaccaannnnnnnnngaggacaaaaacaacatcgcggcgacccatccaatcatgtagccaccaacaacaagacggcgcgccctacctggtctcttcgcacgctgggactacaccaaccacgcacacgaacaaagcaccaacaggctaggcagtgaccccacacaaccacccgccggcagcccacacacgagcaaacacagaccgctgctgctacccaacacacacatcgaaccgaaggacgcccacacaaatcattgggcgggcgacgtaaacaaaaatccgagttgcacggcgccaccc

SEQ ID NO: 414765 - DNA, 1659 bp, Homo Sapiens
  misc_feature (504)..(504): n is a, c, g, or t
  misc_feature (627)..(627): n is a, c, g, or t
tctctcactgtttgggtattctccctcgtttaaaccccaaccgtgtgaggggaggaggaaaggacccgacagcctctctgagggcaccggggcacgaaataattcacaatataacgttataaacgaggccgtggttgacaaaaagtatgcagtgtttctcgcaaagaaaaaaaaccgcctatatttagtttcacaagtgtgatgtggtgcctcctcttcgtgaaaaaatgtgcgaaatctctaaaaatgtggcgcccccacacatctctgtgtcgcacccaagctctgtagacagagagagcgcgctaaaacatctcttatacttctctagagtggtgtcaaacacaccgcttgtggtagtcctgcttaagcgaggcgggcctctccaattgtctcgtgtgtcaacaacccaccatgtgaggggtcgacgcctctaaacaatgacagagcgtcgtaagagactcttcccacgagattgttctccagaaaacacctcgctcgtgngagctagaagaaaagaagcgtaaagagtggggggatctcgctcccccctataaagcggtgggtcactcatttattcaaagccaggcgtgtgcgccgatcaatcaccccaagcccgacagtgtntcggtggccaccagtctgcgcccaacaacaagaggtccatcaacaaaacctggagcgcggggaggaaaacactcccccgtgggcattctaaacagatgaatgtccacccaccaacagcggggtgaaatacctctccctcccacagccccatgggtgaacaaacacacgcatacatctcgtatttgatgggcaaccacatgaccaacaagcggggcgttaaacgctgtgtagcccccactcccgggggtgatcgtgcgcgggcaagcggagccccacaccaggggacacacacaccatatgagcggcgcctctgtgtgcggccccaaaacaatggggacaacaacgtgtctcccgtggcagagaaaaaaccccctaccaggggccgccagagagagggcccacaaaattgtggcggaccaacaaacaaggcatgaggggggggtcttacttcagaaaaaggaggttcccccagaagtggtgctcccctacaagagggcggccaaaaaaaaccgggggccaaccctacacgaggaggcgcccccgaacaaatggggggagaggacttacctctggtgatacccaccacacccgggtgtgctgagctaacacccaagaggacgagaggagcacccacctcggggggggtgatacacccagctggcgtgcccacacccaaaatagtatgtgattgctacacacagcggggtggagaacatacctatctggtgggccgccccacacaacccaccgtcttggtgtggcaccacaccgtctcgctccgaacaggggaggagaaacacccaccacataacaagcgcagtcggggggcaaacacaaccacgcgacggatccagcaaccacgagccatccaccacaaaagacacaagcgtggtggggagtaaagcaccgcacgcgctcacccacgccgccacaggagcacacgatcacccaagacgacaagaggacgagaacaaaccaacacgcgcgcgccgacgcccgtgaccaccacacgagcagcgccaacagagccac

SEQ ID NO: 414766 - DNA, 1600 bp, Homo Sapiens
atttaatattgtttgtatatattaagaaagataagaaaaaaagattgtaaattcaggataaaacagccacgacgcagctcagaaccatggaacagaccagagaacaagaaaagaaaagaaccagagcacaccgcacccagaacaggcaggagcgacacaacaacaacaacgacagaagaacgagcggctgaccagcaaccaggagcgcgccgaccggcttcccacacaacccaccacacagccacacaagctgagcgacggcgggcacaaccaacaagacgcgcggcgcgcgacccccgaccgggcaccgactgcacgacccaggcaacacgcacaccccggcgcagcggcacaacagaacgcgccacggcacagacagccagcacatgaaccagcgaaccaaacacacacaaccaagacaagaaacaacagatggctggctcccaagcctgaccaggcacacgacacgcgaacggcgcccccgcatcgacgaccaccgagccagcaggcacacaggacggaaacgggaaaacaacacggataaaaacaccacaccgcggagccccgacgccagcacagaaccacgaaacaacacgacagccggtgagcagggcgaaagcagaccacccgacagacgaacaagcacgcccaacccacacactacgacaccccccggacgaactagactcaccgcgaaaagaacacaaccacaacacacacctacacgaaacaggcatgccacgcagacagcaccacagcacgggaaccacagcagacgcgcgtgcacgacagcaacgtcgcgagaggcgcatagagcacgacagaaccaccagcgcgacacaaaacagacacagcaagagacgcaaccgcgacgcccgcacccacggcgacacgcacgcgcaagcaacagcaaggcggaacaagcacagcaccacaagcgacgagcaccgcgacgcgcgggcaacaacacaacaccaccgccccaacgacacacccaaggcaccgaagcaagcaacagacgaccacaacacgccgccggcctcgcagccccgacacacgggcgagcccgcgaacagaaggagaacgaagaacaaccccacgccagcgcacgaaagacagacaggacgaccagcgagcccgaactgctcgcgcggcacacccagagcacagaaacagacacccaccagcgagaagagacacgacgcaacaacgcccacacccgatccgcagcgcagcacgcaggcccacccccacccccacgcgaccagcaggaggggcacgccccgacaacaccacccccgcaagcgccgcgccgggaccgccgcccagaccgcccacgagagcaacgcaggagagaagacacccgacaccggcgcgccgccaccccctcgcgccagccgcgccagcagcaagggaaggaacgacaacagacgtggtgcggcaacaaccgaccggggcgcgcccacccacgacgagcacgacgcggcgcaggacgaacaaacaacgcacgccaacacaaagacggcaggagcaacagcatgcgatgacgcccgaccacacagcagggcgcccgcacgaaagcaggagcgacgacccgccc

SEQ ID NO: 414767 - DNA, 1631 bp, Homo Sapiens
  misc_feature (105)..(116): n is a, c, g, or t
ccccccccgaagcgaacgtaaagggacgcgggccggcgggcagcggggagggccgcagcaagcgggagggggacgcagcaggagggaagcactcctccaaacagnnnnnnnnnnnncgacccgaacaaagaggagatggcgagacgacagcgggcgagcaagccagcgggccaccgagcgagggaggaggtggagaagatagacgaccggcaagccaacccgaaggacgcaagtggggtcggcactcccagagagaaagagagaggtcactcctctctcaagagaggagcgatgcagggaccgaaacagagacaagatgcggggacacaaacaaaaagagcgtcgcatgggcctctcgggaggatggggcggaggacgagggggcgcgcgctccctccatcgaaaataaaaagagcgaagaagaagtacacgacaatctttcgctcgtgtcgggagagagagaacgacttgtagcaaaaaaagacaaaacaaatactacttcacagagacacacaagaaagtgtgtctattctgtccacaaaacagaaaaacagacgagcgcgcgtgtgcacgcagccacacacagcaacaaacgagacagagcagagcgggggtgcgagtgtgcgagtctctcactccacagaagcggcactctgcgcgtcgtgcgagcgagcgaagtagcaaccgacgtccactctatgcaacgcacagcacgctcagccgcaaaccaaacgagagaccagtggagtccggaacgacacaacaaccaacaccacacgcatgcgagacgagaagagacgcatccccccctcgcatgtcaaacgcgggtcacaacacgtcgacgcgcagctcatacacaaccacccagcgagagagaagcgagtcagtcgaccacaacaacccccctgatccaaacagagaggggagcggggcgtctcgaccgccaaagcggaccagattcaccaaccaccaacacagagagacacagcctggtttcggtctacactcacacacagaaaacaagagtgatggaacacacgaaacgaaacagagtcgagaccaagtacgcagacacctccagataagaacagacaaccgtcccggaagagcaaagatgtatatcagaaggacaaaacaccaacgcatctcacgacgcgaggaggggtcatcacccgccctcgaaaaaataaatcagcgtggagcgagaacagagcagagaacaaaaaacagacccactctagcacatagccggtggtgccggcgtgggacgcacgacacatcatccacctcgatggagcgaagcgaacacgaacaggagcaagtgaagctaaataatgcgtgcgagaccccacaaacaccaaagaaaacagaacaagcaagcggcagtcacgctcgatggtcggaggaacacaacaacacgcgagtgaagggttcgtcgttatcccgccgcgaccacccgcccccgaacacataagacagcagacggggagaaatgactcgcagcgaagggcgccaccgcgccgcgtccttctagagtcgaagagaagacacagtgactcgacatcagaactcgccaccacaacacagaaccagacgaagggacgacaagaaagaccggtgcagcaagaaaa

SEQ ID NO: 414768 - DNA, 1597 bp, Homo Sapiens
tttgtttccccgtttataaagggggtgcccacatttggggccgatacagcatcttgtgagagactgtctaattggtctgagagagtgtcctcttattgttccccgacgagagggacgcctgatgatatcctggtgggaaacgagcaactcatcatattgaatagaagaatagtcgcaagaatagacaacttggtgtccttcacacccctttcgtttggttcacgatagcgcgcacatatgtgggagtgtgtacaaatacacagacagagagagacttatttttgtgtggaccatactagagagaacagtgttattatactaaacaggtgcctataacataagtttgtgtgtcttacaacaggagacatatctattcacgtggatggaggagggacgtccattattccatccacgcccaaataaatttcgttggtcagaaaaagtttctacgaaatacagacaaatcgaggaggagagagtgtgtgccctcccctctattataaaaagagatctccccccacattaatctgtctctcctccactacaggtgttggagagaaaacaagcctctcctcgatcgatggtcttccacaaccaaaaatattcatttttctcgcgggggaggagacacgacgtggtgttctagcaaacccaccggcgcggtgctatatatctatcttgttatcttcataccatccgatgctgacacatataatataagaccaggatacgtcacacgtcactctattgtacaaccgcccaacgacatcttttgcgcaatcggcaccaacccatatcgtgtcgccacgccgacgggaggtatcaaaaacacagggccccacaccaaaccagacgatgcgaccaagtagagtcgatccctctcccactgtgggagacccacacattctgtgttaatacacaaccacccaccaacaagagcaaaaactctccgtgacaaaacacccaagcactacccactcacctaatagacgcagcgcccccctctaccaacccatatcccgcgcgaacagaaaatcaccctcaccctacaggatcaccagcgaggaggcacccatcgtcactcgtccgtcgttgaccaaggcaggggcccccacctgctgatagacagccatccctgcccgacaaactgaggggggaccccaaacatatatattctccgcccatccgcgcggcgaaaccaaacacacccaagcagacgatggggctacacacacacccgaccaacacccaccgtcggccaacaccagcggagaccaaacaacgacgcgtcacctccagaaacacacctcccacacggcgagcatgggctgccacccccaacgcgcgtggtgcctctaccaaaaatgacgcgtgtgagctacacacccgcgctgacacacagtcgtgctctgatagcagcaaccagccaacacaacaagaacatagtataatgtcctcaagagaaccatctaacaaactagtaccagccatagatccaactatcccgcagcccacctcattctttccacagacgaggactcgcacagggcagtgtcgcagctgtcccgccgccaaccccctccagccgaagcacgtt

SEQ ID NO: 414769 - DNA, 1307 bp, Homo Sapiens
  misc_feature (661)..(671): n is a, c, g, or t
  misc_feature (804)..(804): n is a, c, g, or t
caaccacgcgcacgaagaaaactgcacagaaagcgcccgggatcgttcttgatgaaggcgcgcccaccaccacgtcatgtggcacgggggctcatgcaggggacgtgagaggacgcacagacgaagtgggccacagtgagggcgtgcgccccacagagagagggcagagagtgccagaaaagaagccccccagaggagcgcaccagaggtgattgatctggggcgcccctcagcggcggaggaatgtattcggggcaacctaccaccacaccaagcaggcgggcacaacaagccaaccgcgaggtgagagaaacaccggtggtgctggctcccacccagcgcggggggcgcgtgactcatcacaacacgcggagaaaaaaacaccctcgagggtctctaagaagaggtggcacaccccccgcgaagagagaaagactaccctcgctagagccccaccttagggagtgagagcccctcatcgggggggagagccccctcctagaaaaagacaacaccccccgcaagattagagatgagggcacaaccaacagaggaggggtccctccacaccaagagcgagaagagacagagcgaaatcgtcagacagtggagagaccccacccccacacgcgaccggcaagatgatcaaatcgaggcgtgnnnnnnnnnnngacagaagaagaaacacacatcgcgagaggaagagactgccaccacaacggggtgcgcgaacacacacaaaagaagaccaggagcgggtcttcaaacagggtgatgagctacaaacccaacaacaggttgcgnaccaccaaccaacaaatcgacacacgcgcaaatcccttccacgagaggaacacttaccagcagcgaggccaacaaagcagtgagcgcaccaggggcaaacacaacatcttgttaacaaaagcagacacatgcgacggcgacacagcggacagaccaccaacgggatgacagaagcgcgtacgtcacaaccccgacggagcggaaagaaagatcctccacccacagaagattgcgtgcgagcgtgtggaagcacccccccgccggcgccggctactcaccacatacatcacacacgaaacgcagcgaaagtgcgacaaagacgactggtcagcgagacagagcacgaaccaaccaccctacggtgaggcacgccgggcccaaacgatcgagcacacacccaagacaaccgacaccgacagaaaaggatagctcgatgatgtgatgatgtgcagcgatccacaaagagagagacacccacgccagagaagcagacgtgtggtgac

SEQ ID NO: 414770 - DNA, 820 bp, Homo Sapiens
  misc_feature (709)..(709): n is a, c, g, or t
ggtgggggccacaaccaccacgctgacttctattggggcccctttttcccaaaacaactactcacccaaaaacccgccggcggttgttacacaacacacaccgggcccccgggtggtgctcttatgttgtgttgggggggaactattattttattgtagacaggcaggaagaacatatatttgcttattaatagtaatgagactaagatacacacgcgggggtgtgtggcgcagcaaagtaaaagaagtatgccaccatagaaaacaaagcctggtggataactatattaaacaatatatcatatttttactaagagaatagtattctatataccaaaaacaaagagagaggaggtgcgaccacgtcacgggagctaactaataaagaaagaaccccacagaagtaagttgggctggtgttcataaaccaggaggccgcccacaagaacacaacccgtggtgtgtttgactgccaggcgtgtaagaaaactattagtgcgtgtgccccccgcacaggatttctattgataccaccatatgcctaccaaatatctgccgagagaggggtgcccgcacgagtgaagtggtgctctccctctatatgatcaacaaaaacaaaacagtcgcgcgcgcggggagtgtccgtgtcatgtacacaccagacaaacacgagaagcacagtctaatgtggctggtggataccgccccncgcggagggtggggctccaaacaagacgtcgatgctcgttccaccatcaagcaaccaaaaacaccgccctggagagaagcatgctccgcttccccaccacaacatgaaatc

SEQ ID NO: 414771 - DNA, 727 bp, Homo Sapiens
aacccgccaccgccgcccgcggcgccgccctatctcatgaatcgaaaacagccaccccagccaaaagaacgagccaaacaaacaatacacaggcagctaacaagccacgagacacgcaagacggacacgtcaccagcgctggcggtgcctccacccccacgcggcggtggggaccgccagtagtccaacaaacaacctctccgtgtgcgcgaaaacaacaccatccctcccccacgccgccgcgagatgggatccgcccagcgccccgccccgacaaggcgacgactcgcccacaccacccccagcggggggaacggcctcgcgcaccccgacaacaccaccgaggcgaattgcacatgtcgcaacccaaaccccacaccaaaacagaagaacgagtgccgcccccccacacaacagagcaaagacacgcgccaggctcctaggttcagcaagcgcaaagagatcaccatcgcgcgcccgccgggcgcgccccgatccatccagacacccgcgcgtgagagacgaagcaactcaaaactagcggccaagatcaccacacagcgcactctggccgaacacgaccacaacacaaccctcccgcgaggatcagaccatcagcggccgcgcccacacacaaaagacagtggcgacccccccaccaacaaaaccgcgccgcacctggaaccgcgccaacaccagatccgctcgcgcgtgcaaggacaacaac

SEQ ID NO: 414772 - DNA, 1459 bp, Homo Sapiens
  misc_feature (1235)..(1243): n is a, c, g, or t
cccctgattgaattcctacgccggctcttataagaagggttgcgtatcttttattaagcagaaataagcatagcctcttgtctccacaaccaggagtgggctgcgcgacgtatgtcacacaagaaaaactagctgccagtgatcactatctaaacaagaagtggggtgcaccgcacaccctgccccgcgccccgcgcgggagtgataagaaaaagaaagtggtgatctatgtcgtggtgtggggagagaaaaaccgcaagtggcggccgcagggggcccaaacaaatatatattcctccgaaccaaaacacgaacgtggcggtgatacacaaaacaacgtgtgtgtccgcccggcggcggcggagaaagataatccactcgcacctcaccgcccctcgccgagcgggagagaaaatcataaaaataaatatattatctcgcactctgagctgagagtgaaagagagagaggcgcgtgttgagataaatagaccgacaccacacgggtgtttgcgaacgatgcgtaggcgaagagcagggcgcggggccgctacaacatactacctactgtgtgttggggtggggagcacgcacactccactgcactatacaaaaagagcccaccactaagcgcgggtgccccacccagtaggcggagctggactgcgagacagcgggcgcttggtgggggcgggacccacacaaagcgagagaaaaaaacagagttgcagctgtactcctcccgtcactagagggagaagaacacaacactattctgtaatctaggtaccgcgagacaaacaaacacacacgagcctagggggcagcaaagccacccttccgacgatgtggtcagccaccacccaacaaaaacacgcacacacaggaatgagtggggcgcatcccacaaaaacaacaaaggaggagtggggtgccccacccagccacacgccacacaaaggcagtgagtctacaatgatatgtcggtgcgagcacccccactatccctgcgttcggtctagccggtagacggagacaacaagcaggagacagacgcgctggctgcgaacacaacaaaaatcaccgacgcgcgtggaaccacagaaagacacccaccaccgcacccgatgactgtaggcgagagcgaaaaaatagatcgggtccgccccgcaaccagtcatagaaatgaacaaagccacagggagcgaaggataggaggtgagggggtatgcactnnnnnnnnnaactacacccgtggcgacgagccataccacaactccacacacgaccgtcgcaaggcaagagtactcagaacgaacagcacaccaacatactatcacccacagggcgggggcacacattcatacgacacagacacaccacgaactgacgtggcgggacgaatagtattcaaaccaaagaaggaggttgcttgcggcgcccccccctccaaagaaaaa

SEQ ID NO: 414773 - DNA, 1070 bp, Homo Sapiens
  misc_feature (833)..(841): n is a, c, g, or t
gttggaaaaagcagggcgaggagaggggggcggtagggggggagtcaagcagacaagaagaccacaccgccgaattcttcctcgtcgccgacccccccgatgctgctcgtctgggggcaacacgcacaggcgggggtgcccaacgacgacgagcgcgctgctgtggtgtccaaccaccaggggggagatcacccaacaggagtggggagtggagtcacctccagaaaaatggcggcgagacgctgtctatcaaagcgaggggagaggggtcgaaatccgcggcctccacgaagaaaggggcagggaggccagcggctggccacccggtcgaaggaagaaagaaggggcggacgagcacccaccgcaggggggagggcccaacctctgaggggacaaaccacagggcgcgagcgcgcgaccctctgtgggcgagagccccctccgaaggaggcagaggataaaaggccgagaggagacctctccggtgaggagacgtacgtagcaccctcttcggaggggggcagaaaactacgagcgagcgccgtgggagagcagacacgctgtggggtgggaggacaaccgccgcccccaacaagggcgagcgcggggggacacgataagcggcgagcagcgcgtgtgtccgcgccgcaaccggtgcgagcgtagccgacggagggcccacccaccaaggtggtctcccaccgacggccggtgaagaacggggggcgtacccactccaccgcaggggatacaacggtgagtggcgccccctgaagcaaaacacacaggggggggcaagcacaccacaaacaccgccacggatgacagaaccnnnnnnnnnctcttcactgcgggcccccggcaaaaaacccacatggctgcacggcggcgggagcgcgacacaggcagagacaacccccgaagtgcgggtgctagcaggcacaccacgccgcggggtccgacccacttggcgcccgcaccattcgggggcccgacagaagcggcacagcgcagcccgacaggaggggaccccctctttggggggagcaacacaagagccgaagagaact

SEQ ID NO: 414774 - DNA, 883 bp, Homo Sapiens
  misc_feature (47)..(56): n is a, c, g, or t
  misc_feature (776)..(785): n is a, c, g, or t
caacatttacaaaattggttttattggccccccccttttttaacacnnnnnnnnnnttgccaaaagggcccatttcttttggaaaaaaaacccggggttgggccattgtgtcctataaccttcggggagaaaaaacgctgtccccaaattcagggcaccaagcacgtggcaggtctcctccaaggctccctttggcgaaaccacgcgccggggggcacaccttggtgacacacgcccaaggggggctacacaagagacacagaagctcttctggcagggaggggtgcagtttgcgaccctcttggcacttgtggaagagaagccggggagcaagggccgcaggaggaaaacccccgtgtgggtgcgcagagagacgcatgtggggggcggccccatttccagaacgccgggagaaaaaggcgtgtggagaatatctcaacggcgagaaaaaagtgggagcgcacatcgtggtttgaggctcccacccgagagaggggctgtggagtgagacccccgggagaaatacgcgggggcagcggtgtaccaccacagccgcgggctttttgcgggtgcacaacagcggggtgccctaaatagtggggtcccccctctaaaatatagggggcccaaaagaggggccaaaaacgatggtcacccgcgggggtggcaacaagtgtggtatactcgccgccccgcgcggggcccatagggataaaaaaagcccccggaaagggcgagaaaactcgcgcccccggggggagtctctcaccattaannnnnnnnnnctcacacaaccgggcgtgtgaaagagggggtcttacccacgaggggagaacaccggagggggtctcacaataaaggaagcgctcgggattaatataac

SEQ ID NO: 414775 - DNA, 1214 bp, Homo Sapiens
  misc_feature (101)..(109): n is a, c, g, or t
  misc_feature (604)..(612): n is a, c, g, or t
  misc_feature (705)..(758): n is a, c, g, or t
acctcttttttaaaaaaggggccccttgttgggggggacccccaaaacgggttgtctttcacccaggacgcgcgggggaggatcggagaccgcctctcgtnnnnnnnnncccccaccacaccagaagaacgacgccggactcgctacggggaggggcggcacgcgtcgctagaacgacccggggggggcgcccccgtcgacgagaaggtcacaacaaaaaacggtggaggaaacaattactccaacggggaactcacttgcgaggcggtggtggggggccccagcacaccaacacagatctcttgcaagccccttctataaaagaaaaaagcacccactcaaataaaacaatctgtcgggaggagcgggtagacacaacagtggggtgcccacacagcagaaagaaaacagccctatgatcgaggggagggcgaactcacccgcgagcggtcccaggaggcccccactcgcagcgcggtgggtgatccgcggggcctgacatagacaacaaacgccacgcggggcctgcgtgagagcgccctatctgctacacacgcgagtggcgcaggggacaccaagaatatactccctccccacacagaannnnnnnnntgatcaaacaacagtgggggtccaaagagagcggcgcaacaggacaacgcacccaacaaaagaccctaacatatggtggggctgtcgtccccnnnnnnnnnnnnnnnnnnnnnnnnnnnnnnnnnnnnnnnnnnnnnnnnnnnnnntacaccgttgcgtacccacctagtcacaagaaggctggcgtcggcactatgccaatacaacgccgcccgcatccgccagcaaacaccacccaaatatgcagaccacggcgccccactgcgtgggaaaacaaactcactggggtgtacaagcaccgcgcgcatgaagacacgagagtactagttgactctactcacacaacgacagcaagtgacccgccgacctacgagagaacacacgacctgtagtaggaagacacaacggggaggagaacgggccaaaaaacacaaacagtgagtggtggccagttatttacagccacacaccaccaccgagggagcgagccaagacatcccgccgcgggccagacacagttcagggcccaccaatgatttgcccccactctcccaaaaacatgggtcgaaacaacagccattgtgtgagaagaaccacacccg

SEQ ID NO: 414776 - DNA, 226 bp, Homo Sapiens
  misc_feature (113)..(121): n is a, c, g, or t
  misc_feature (147)..(180): n is a, c, g, or t
gttgtgtacccctcccgcgcgggcagatatcatggatgggtaggtctacgcgactcacccctcccagcgacaaacatcttctgtacgtcgccgccacaagagggctattaacnnnnnnnnnccaagagaggacatgtaggtacgctnnnnnnnnnnnnnnnnnnnnnnnnnnnnnnnnnncacaccacaaggggggggacagcaacaaaaaagcgtagaataatcg

SEQ ID NO: 414777 - DNA, 1792 bp, Homo Sapiens
  misc_feature (1399)..(1399): n is a, c, g, or t
ggtgaaaattgggccagttatatccctccggggaaaaaaatccacagggtatattgggggtataaatttttcttttaaaagttctttcacaacaaataggatttataggtgggccccctatgtggccgccttacataaaggtgggggtggcgcacaattattgtggcctgtcttcatctgtggtgcagaaacaactcctctgaaattatctttgggttggtatgagcaaccacggtgtgtccttctcaaaaagtgtcctcttactaatccacaaagagagaatcaaaagaagaaagacactaattaaaattccagacccaacaaagaaaaaaataatgctgtgggggtcatagctgtgggttagcaatatatatgtgtcttaatagtggggtgttgttttgtttttacacaccaatcgctccaaacaacaacacagtggctgtgtggacattttatatctccctacaatattgtgtgtgagcgcgtagaatattaaaaatataattggtgtggtattgtgcacaaaaactcgcgtgggttatgtgtgtcatacactcttatacacacacaggtgttgggagatgttagccaaatattatgcgcccatgttgaccacaagtgtgtggtgtacaaaacgtctttctcccacatggtgtgcgaaaaaatgtataccacgctggtgcaagcagtgtggtgtctccaaaagaactcccagaatatctaccccgtgtagaaataccttgctggtggttcaccccaggggaagaataatcaccctattgacaggacacatagttgttcgtctcatccgacgacagtcgttactcacaacacatcagtctcacatcaaggtggggagtggtcgtccaaacgaaatatatcccttcttccacgcccacaaatgttcgcttccagcgagcaccacagaaaacaaatctgcttgcgtggccctgcacaaaatcttcatcaactagtcatcgggggcgacaaaaaagacgtgatctcacgggggcgccataaagacgacaccccacgcggggtacataacgggacccgggcgtcgacctggaaacaatgtgactttggctctccccacaggtcgtgactacatcacacacaacacgtggttgtgctttcctcaaaacgacacctactacagataatcatgttgtgccccagcagaaacgcgctttgttaaggaggagcccgacaagactcaagaacctgccgctgttgttgaaacaagtcatctgtctagacgagggggggccccacaaaacagtgctacccaaacacgaggcgggggttatgctgattcgccactagtaagaaatcccagcctgtggccacgcacgagctgagtttataattgtcggggccgccctaccctcgtaggggnagagatcacacactactcactgatgacctactccagttgagtgaatctaacagccccacttaatctgtccgacgaaagtgcatgtgctaggagagatcaatccgctgactagtgccgcaccctcgggggtggaggacagacctctacgcatcacataaaggagcggagccgaaccatctcctacgcgggcccactatgagctgatcgtatctactccggggtgtgtaggtagtcctcacactgtatatccttaatgccaagacgagacagcttctgagtcacttcttatggacgacataaattcaaatagtgccgctttttgagaagaacacagtaaacagctcggagcaagaaacaaacaggacgcatataccacctctagcattccccaag

SEQ ID NO: 414778 - DNA, 988 bp, Homo Sapiens
aggtggtgtgttatattcccgagaaaagaagtgggggaacacccctggcgaggaaggtgagaagcgccgggcggggccgacaaagggggggcacgatggtggagttagagaaggacacacagcacgcgccgaccgtagtggagggccacgcgcacctccatggcatcagataaagcagctgctgggagtggaagcacatcttccctcaacaaaaagatggtcgcgtggcagcatgcccgccccgaaagaggtggcctctcccgcggtgagaagagagacagcgacggataagtctaccccaggaggcggagcagcatagagcagaacagatcgtcgacataataacatccttggggtgtagcgcaaacactggagtgctgtgcgcccgccgcgtgcgtgggtgagcagccacaccaccaagaggggatggaggcgcgcgcgcacaacacaacaaaccggacagagagggcggggaggtagactcacccgctttagatagccagatagacggagacagaaaagactcacacaccgctggcctccaaggcacgtagtgagacagcaacaagcgtcgggggtggaacccacacagcccgtggaaccagacacacacaacaacaccgggctcgccgcggcccacacagaaagaggagcggagtgcgagacacaacgaccggcggcatccccaattactagacagcaacaaaacagggtggtggccccacactgatgagggagcccgccccaagggagggcaagaagacaagcagcgcgtggccacaatgacaagaacaagagtacaaaagacacgaatccaacctgccaggagtctgcggccatcgagcccccgcaccctaccacccacacgaaacaataagcgcgatggcgacgccccaagcaagaagaaagaacacgcacacaacaaagcccctcctgcacgagcgagggggggacctccttcgctcacaccaaccacccccgcccgcgt

SEQ ID NO: 414779 - DNA, 837 bp, Homo Sapiens
  misc_feature (289)..(345): n is a, c, g, or t
  misc_feature (437)..(445): n is a, c, g, or t
  misc_feature (579)..(640): n is a, c, g, or t
tcgcccctcctcccacaacaaagaaacggggggtaggggagcacaagagaaacggcaccccgacgcgcgtgggcagcacccacggcaacggaggggggagacatccgcccgacaaaaccagtatcgaacagggagcgcaggggccgccaccacgcctggggggtgggagcggcgcgcccacacaaagaggagaagggtcgcaccactccccaccacgggaagtacaagcaccactcgatagaacgacacgacacaaacaagaatcatgtgtccatcctgatgccgcgannnnnnnnnnnnnnnnnnnnnnnnnnnnnnnnnnnnnnnnnnnnnnnnnnnnnnnnngcgcagagcaaagataaatcggcgggccgccaaacaacatgagggggccacaagagagagtgagggggattctcaataccacccctagaggnnnnnnnnncagcgcactaaccaaccacggcaaaccacacccggagcgaaacgcgaacaaaacaggggggcgacgccccccaccaaacaggagaacccggagaaaacaccaggacgcgacgacaccccgggggtatgtcgagnnnnnnnnnnnnnnnnnnnnnnnnnnnnnnnnnnnnnnnnnnnnnnnnnnnnnnnnnnnnnnatcggtcggacgggagaggaaaacaataacactaagcacccggcgaggaacgaacacaaagaagaccgcgggaggacaacaagagcccggggcagaatatacagagagaggggaacaaaaacggcgggagagagtgccgccgacagagaaaacagggtacgaggaaaaaacgaacgcgttgtttgtaaacacgagac

SEQ ID NO: 414780 - DNA, 1514 bp, Homo Sapiens
  misc_feature (712)..(724): n is a, c, g, or t
ggtgtgtggtgagaatgccgcgaacgcgccacgcaagcgcgggcccagagagacgatccgcggccgcgagctaaaacagaagaagtaaccaaatgagagaagaaacaagccacacaacccaccgagacccaaggcaatgatccagtgagagccaccatcaacacaaggggagcgtcccaaacacagatccaactcaatggtcagagcgcacaaacacagaacagacgacggagaacagaccgcgcgcggcggacaacaaacaccccaggatgtcaaggaggcgcgcccacaaccaaagagagggacataaaattcacgcggagcgaacgaaacagagcagggacaactcaaacaacagccaagagaaagtgacactcccaagacacagctggagacaaacagcaacaaagcaccatccgaccaagctaggccaaaaaaaatagcaacggcagcatgaagcgcgccggagccggcaccacacgaccaccaagaagcaaaaacaacagcgacgggacgcaaaagggcaaccagtccgcgcggaagcgagagcagagagaaagaagcgcacaacatcccagcgaacgaaccgacagacacgacaagagggccttcgccatgagagagagtagtgaacagaacaaacaaaatcgatagaagaaaaccgactcggaacagcacacaaacgacgacaagaccagatcagcagcgcccnnnnnnnnnnnnncaacgcgcgcggtctcaacagagagcagaatcacgtaaaccgaaacgaaccgccagacaagcccgctacaagagggccggacggacagagcgcacagcaccactgcgggagaacaaccaacagtgggccgaaacgtcacgagcggaggcacctagccaaacacaacggcggaccaaaccaccggggaatctcacgactaccataaacgacagctccgacgagacgacacaggtgacgccggggcgaaccagaacggcggggcaccgagggctagaccggcgccgagcaaaccgccgagacagcagctgcagggcgaacatgcaagcacaaaggcggctccaccccgacgaggacaacacagggcgagcacgaatcacagcaagacgcgctcaccggcggcagccgagcaacaagcgaaagccacgcgggagggcgaccagcgaggcgccaaacgaggagcaacgacagcacccaccacccacgccgcagccagcacgcaatgagcacacacagacccacaggcccaacagcgaacgggaccaccaacggcgctagccacgaaacagcgagacaccgtcaacacccacgacccacacaagcgaccacgccggacgcaccgccacagcgggcaccagcaacagcgcgacaaccggcgatacaagagggcgcccaaccagaacgccggcacaacgggccccacaacactgcggaaccaccaacgcccgagcacgacacacccccccaccaacaacacacagggagaaacccgcacggagcgaacacgccgaca

SEQ ID NO: 414781 - DNA, 1431 bp, Homo Sapiens
cgggctgtgaatggaaagattggattatgggaataaattgggggtccgttttaaaaccccgtttttcttttggggatggggagtaaagagggggtgcatttaaagtggctattggaagttggggaggacaaagaggggtgctgaatcaggaggttgtgggtgctcttagaatttgacggttgtcgccactgctgggagaattggagggtgttcaaaagagtctcgtttttgaaccggctgtgggggggttttgagccctccccttatgattccaggaggggcaagtttatttctctacaaataccattcttttcgagcagccctcttttgttggaaaatgtggagagttatcactcccccctgattttgtgttgaggaaactccccgtgcttggttgttcttaataccaccctcttctctggcaccaagggtgttgtggttgcgcccatacagggggtatgtggtgagcttcttgagcaccctcctaccgacgcactagtgtggtccccagtctaacataatgagagctctgtgggggcgttttaccatccccacacattttcttgcgctaccggaattttggtgcttcatccacaaaagagggagcgcctttgtgttaaagtgggagagcactaccaaagatgcccagcagcgatagtccttcgccagcgtgtggtgcaaaactatgtggtttctggacactaaaagaattcagggaaagcctcccttagctccagaatgtgcccacacctgtttggacttgtcgcgcaaagggagggccttttacccgccgggagaaaaaaaccgccaatgtcgtgtgggctcgccaaatacaagagcggggggcgtaccaccaagaagagtacatcctggtccgtcgagaacaacagtgtgtggaacatccaccacagaggatgtgcaccatctgtggtggtgtgaaacaccctcgtgcccactaatcgtggtgtaacaccccctgtcagacacgtgcgagcaccagagacgaagtgtgtcctggtcgttccaccaaagaaggtgactcactgaatgggagtacacatgaccggtgcgctggttgtgagtgggcacccagacagtgcaaccccggcatgagagacttctacacagatactccatcaccagaatgtgggggagcatagtaccaatcaacctcagcgatgtgggtgagggtcaccacaccaacggaggagacgaaaggtggtcctcaccccaaagatagtggtgtgggcccatcctgagagacagacgtcttcctcgaacgtctggtgagggcggacgaacccgtgtgttggccccccaacaacgaagaaaacgaacggtgcgagggagtgccccccctcgtgcggaggaaatgtagagacccctcccacatggacgcacgagttccgagaagaaacgaagacgccgaga

SEQ ID NO: 414782 - DNA, 1676 bp, Homo Sapiens
  misc_feature (1155)..(1167): n is a, c, g, or t
  misc_feature (1521)..(1521): n is a, c, g, or t
ggtccccaaaacgggttttatgggaatttcccggggaagtggttaaaaaccccatgggggcccaaaacccgggttggcccaaaaccgagcaggtctaccaggtgcctctgtcctttatatgccacacacttctgtctgttgcggggaccccctggtgagagatcgcgtctgctgctggacaactcggtggttaaactccatccgggtgaaaaagtggatgtctacgtgggttctatactatttccatctctgcaccacactattccacttgatcccagagaactaatcggaggacaacagagggcgcaagagaggatccccccgctctcaacaagaaataaacagccgcgccgctgggggtactgtgtgttgtgtgctacccaacaatggagagagtcaccccgagcgagaagtggttccctacgaggcgttctctgcgcgagccaaaaaccacgagaagacacccgcagaccacaccaggcgaggagtggcccacctagacggttccctgtgagcggccacgcggtgtatccgcgaagtagagcaccctctccccgctgggagagaaagacaccccgcgaggcctcttccgcgcgggggtgttatccacctcaagagcaggacgccctccaacaaaggagggccgcggctacaaccagcgtgtggtggagagaacgccccaccaacctcttctaggagagagagcaaccagaccgcggggagtttccaactgcgacagttgatggacagcctgtgtaagatgtatgagttgctcccccggagggggcaccctcggtggggaaagagaaccgccccccccaacacacgagtttgttgatgacgccttcaatatataaataacttctttttcgtggggggaaagaacacactccgtgtggtgagaccaagcgcgtcattttggtgcagcccgaaagtgattgtgtttatgtgattcccctctcacgaataacgcgtcctttaaaaagacgtgttatttgttgctgtaggcgcagcaggctttcctctgtgtcggcccctatgtatagatccaccccccagaatattatttgggggccaccccacatcatatttgggtgtcgccctccacacctctttgtggttgcgcaccttgtggtgcttttctttggtgttctnnnnnnnnnnnnntaggtgagtgatgaagtggtggctctattaacatagagaaagaccgactcccctttttggagagcgggccgcctatttgtagaacggcggcgcagcagcggggagagttaccaccacaaggggacgtctatgcagcactcccaatgctcgcagcgtagtctagtaaaccggaaaaaacaataggggggggaatgaggttcatcaccaggccactacacaaagcggggcaggaacagagtgcccaattctccgctatactaatacgagacaccacgagctcttcctcccccctagttgcacacccacggaggctcgcgttggagtcgaagacaagaggtctgaccgacagcgatntttaacaacagggggagagtggcaatatatgtcggcgctcccccctctaggagcgcacacgccccgtagttgtaccaacacaacaaggcgcgggaggcaccacccctcgaactacactcgtagttggtggaccacgagatgtgtgtgtgtagcaa

SEQ ID NO: 414783 - DNA, 1629 bp, Homo Sapiens
  misc_feature (255)..(255): n is a, c, g, or t
  misc_feature (817)..(817): n is a, c, g, or t
  misc_feature (826)..(826): n is a, c, g, or t
  misc_feature (944)..(944): n is a, c, g, or t
gggcccataaaatccttgttggtcatttaaagacggggaaatatgcttgagggcgggaagagtaaattaattgggtcatatatatgtgtgcggagaattcttggggaggaagaagtccttgttgtcacagaaatcagaatgcctgttgcctcagaaaactattgattgtccacagatgattgagaggaggatataaaggtggcatcatctattataaaagagaggtggtgcgcttagttgggggagaccaaaganataattatccgcgggagataacctcgctctctattgtaggaaaacacaaacgtacagtctctatatcaattacaagcggggaccatcgtgcgtgagacgggtctatataaacaaacaaaacgctcgtggtgtggagtcttcgagaaaacatctcttattttatacataacacaacgtgtggttgtgtcgcagcacgccctcgtgggtggggggtcaatgctcccacagagggtggaccaaaaaagatagatcctctctttggttaaatacaccctcgagctgcgggggcagactttatatgatgagagagacgcccgcaatatgagtgtggtcgccctgagaagggagtgtcaaataatttagtcctccccctcagtgtgacgtgttaaacgcaccagcaaagaaaaatactcaagacaaactgcgttgggttgcggcaaaccgcccctgtgtgtcgtgttacttaggcggggcggcgcacactgggtgcggtgattacagtgtgcgtactatcaggaacgttcgactcaccacgagacgccagtcagttatgtgtctgttntgctgacanaccaccacagaggcggtgagttgactatttcgatacgatcagttagtgagaaaaaccaccagtctttctcaatcagcggtggggtgagtcaaccagtgggcggcgccacaaggcaganagatacactcgccctcagagcgaatggcagtctatgtgtgggtctggtctatcacaacccacccgtcccgtgaaatcacgacgcctagacttagatcagcgacgcccagacttgacatcacataaatagaaaccggcgggaggaaggatgcgcgcgacaagacgccagaagaagccttcgcatggattgactacaccacgcacgcacgagaggaaggagagaacgaacctacggaaaaagagagagcggacggagaacacacgtccccgggagcgtggtagacgagacaagaaacaacccctgttctacagtcgccgacgacgacaatagaccgatcaacagacacgaggcacgcgcgaaaggggagctacacatgagccacacgaacgaactccgtggcggcgagccaacgagaggaacgactatgtcgccgcgcgcccggtcctctaacaacccgaaaccgaagaagggacccgaagcactcttcgcacgaggcgacacgactggcttgttgcgaggtggactaagcgcgccaaaccaacccaacgtctagggggcccaacagtaggaggcgctagctgggggcggcggccaagacaacagtagtcgggtgcgcccaccaacgaagggtggagcgcaccaacgccgtcgccccgacaaggccgccggaaggcactagctcgct

SEQ ID NO: 414784 - DNA, 547 bp, Homo Sapiens
cattatttgtgtctttattttccataatgtgcgattcaccaataatctctcttgaataaataaggggaagctccagggagagaaaaagatttgccaacaacctggaagaaagaacgctgtagcagagacaaaaaaaaccagcaccacaatataataaagaccagccccgggagagacacgccagagggcggcaggggagggatggcagccagggccgcacagaatcggcaaccagcggctggaggagcgacccaaaagcggaacagggcgagccgctgtcaccagggcgacgcacacagtggacactatgcgaaaccgaaggcggacccgcaccctaaaacagcgggggagaaagaacttcgcgagagaaagagagggctcccccccgcccgaacaagccagccacgcccgcaaggtggggagggatcactccccgtgaagaagagggaccaaagccccacgaacacagcaggcagtctacccacggcggaggggaacgagcccggcgggcacgacccgacgctagaggcacagagggccccagaaa

SEQ ID NO: 414785 - DNA, 1212 bp, Homo Sapiens
  misc_feature (382)..(391): n is a, c, g, or t
tactttttttatggggggtcttgggggcccgggtgtcttatcccttttttttcacggggggagaacctttaatattttccacaaagtgcccggcggccttaatgggagagttgtacttactcctatattctcctgctctcaacggggagacaaaactcgtgcggcaagcagaaacgggttctatctccacaaggggagcactccgacaaggtaaacacccgcgcggagacgtagagatactccaacaaccttggtggctgggccccttgtgcaggagaaagaactctcaacagcgtgttggcaggggcttgtgcgggaaagaagaagaagtgcctaagaaagaggggcatatcccgctggataatctccctctaaagaggannnnnnnnnncataaacaacgcggaggacaccaccagaggtcctccccactctcactacgagagttccctcccccgagtggctgtcccagaggaacagttcgatccgacgcgtgggtatcacaacaccggggggacaaaaacactcaggggaacccgctcccagcgcatcggcgcgcggggtgtatacatgtaaaggacacaatctcgaggggctacacaaacgctggggtgcccacgagaaaacagcgagagcgtgcaaccagcccagagcgtctccacaacggggcgcagagcaacgcacgtcttctggtggggaacacccagcgcgcccacgtggggggcgtgaccacacgggcccggagagagggcacaaagacttgtccaccacattgtttcgaggggagcctcacccaatgggcgcgccaccagaaaaccggtggatgaataggaggagactccccagtgcgctgggagtacaccttctgcgcaagacacagttggtgggtgtagaacaaccctcccgggcggggatactccgcattatgagaactcccacgcggggtacgaactatgtacccccggaaggtggaaaacaagaggacggcctcctcgcaaggtaggtgggctctcccagcgaaaaacaacctacggggggacccccccagaaaaaattccccgtggggaagagaaaactcccttcccggaatatatgtacaacctccgagacaaaaacaccggtgttgctgtcgcactatatgcgcggcccgggtgaagtggagttggtccaccacccccgacacggaggaacacccgcgggtggcaactagtcc

SEQ ID NO: 414786 - DNA, 1610 bp, Homo Sapiens
  misc_feature (227)..(240): n is a, c, g, or t
  misc_feature (1450)..(1466): n is a, c, g, or t
gtggtctgtttgtgtttcgcacaaccagggggacgaatgcgtgcagatatttctggcggacaagagaataaccaggtggtaaaagaatgagaaaatattttgttctcgtcataaaaaaagagcgtgcagagaataagtagggagaaacatttttattgtggtggtaccacataaatataaattgtatcgtttgatatagaaatcgagagactacagttgaatttttnnnnnnnnnnnnnncatattattatatagagagataaagaacaacgcagaaaaatattaatcatctgctcgcgctggtgcaccacgcatgtctgtgtgagtgtatctgcgagcgtggatgatatgatagccagcgcagtggcggaggacagcaagatgatacactcttctctgctgatgagtgtctctctctatatctatacatactaaataaagagagtgtgtggcgtggtgtggtatacgtgtctcctccaacaataaaaaatgtgctcgcgactatactaaaacaacaaacatacgtctttgtctcgagtctacataatatatatacttttcccaagaagtatctaggtgtgttgagtagaaaaaaatatcacttatcttggcagcgcgtgtagtgtcgggtgagagaaaacaaccaaagtggggcgcgtctcccaggggagaagaatttctccacaaaaataaatttgtggtatgtgtgtggtgtgcgtcgccaccaaaaactgtatataacaaccactcccctactctaaaacagcgccgtggggtgcgactacacaaacatcctctttctctatcaaacaactgtctgtgagcgcgtagctcgcaaaacctatatataaacatacaaaccaaagaaaaatttcttcctcgcggggggagacaataaccacctacctcgttctgcgcagaagaacaaccaccctcacgggggctcgctgcggcacaaccacaacaacttgcatgcttacctaccacggatgtgtttgttatactaaaccaacgccgacctactttgtgtgtgtgcaataaaacaccacagtaaaaatacaattaagttcttcccactgtcctcgtctaagaaacaaataatctggcagcggggggtggtcgacaaaaacagccgtacttcttaaaaaaactatattctacgctcagatcggtgttgctcactacacgacaaagcggtgacgtctcactacacgcggccataccaataagtggttgggggtcgacgccaaaccacccgttcggttgtttaaacgagatgtcacgaagtcgagacgccccccaccatcaaggcggagagagagccaaccacctccacatctacgataccacaacacagcggggggggcgcatgcgatcacaaaaaaacagatccgccgcgaccatgtcggcgaaggccaaccaagcgacagtcactcgattgacgcgacgnnnnnnnnnnnnnnnnngatgggagcacacgagatgacaacacacacgcgcgccgcgtgggggacaaccacgcgtgacctgacaaccacgcacaggccgccaagccatctgtcggcaggcagaggggccgatcaaacaaacctccgcggcgggcagcacat

SEQ ID NO: 414787 - DNA, 1498 bp, Homo Sapiens
  misc_feature (526)..(526): n is a, c, g, or t
aaatttttggaggaaaaattttttttggaccaacaactctataagtgacaccagggttcgtgggaaaagccccccagaaaatccggaaaaattttgacccaacaggggcgtgggggtagcagtatgggctctaatctacatttggaggagaagaattagaaagatgtcaagtaaaaattatttttaagaaaaatcccattgagcgttggcgcccaaagaaagggtaggagaaaaactcgaaaggggaaaatgtggtgggtggggagaacaaatgtgggtcctacacatgcgtctacttcgcgtgagagaattgaagaaaattttcgtctcagaatgcgggacaaatgtgggtgtgtagaaaagcaatgtctgttgcagtcataaaaaaggagaatatgtacggagagtggcgtacaataaaaaactctcttgtgggagagaccccaaaatgtcttggtgtcattcgcagaaattgaaaagcggctcttcagcaggagtgaacacaggtgtgttgtccacacaaaanaaagttagagattctggtgacaaagtggtctcttttaataagcacaagaaaaatgagaaaagggttttgaggtgtgtattgagaacacctcctataaaaaacggcgggcagagaatgtgattattagaaggagtctatgttagaggagaacccaccacattattttcgcgcggtaactttggtgcagcgttgagagagcccaaaaaaaatttcttaagagatgtgtgccgcacggagcaaagggggggaagaaaaagatggtcccaactccacgacgagagttggtgtgcgaggcgccaaaccacggagggggggcatctcttaacaaaacaacgggtccatcatagccgccggacgcaatggaaccctcgtctcaccaaggagaaataacacaccacaggcggggtctctcgcaggcgggcttccccccaaaaaaataccaagcgggggtcctcattgcgatgaacacacccggggggaaaaccactgagcagggtccatgagagtgggatcaacaacagccaccgcccacattaagaggggtccaccactgagaggcgatcgtttacaaccccacgaggggagaatcccccattctacaatcaggagcacacagaggtgtttgcgcccacggcgacttaaaaaaattatgcgaggcggaggatcaccccacaatatagcggtgacaagcaccaaccagaggagaacagcgagcgctgcccccaccaacgaccagaacacaaaaagcgaagggacaccgaggtgtggtagcgacaccacacagagctcacacaatgagtctaacaacacgagcgcggctatcacacagaccagcggcgtgccccggtggaataattcgtgtgcgcacaaccaaccacgatacacaaaatcgcaaagcgggcacacagcgtcatctaagccgccgcgcggtagcctgtacaccgacacgccatgagcggcgcgttaaaatcc

SEQ ID NO: 414788 - DNA, 1489 bp, Homo Sapiens
  misc_feature (795)..(803): n is a, c, g, or t
  misc_feature (891)..(899): n is a, c, g, or t
  misc_feature (1434)..(1445): n is a, c, g, or t
ataacacaacaaaaacccttcttttttttccccctcacaaaacccgggggcaataaacagttttcaccccaacacaggcaccgtggggggtcacacaaaaaaccccagaacagagcgccgaacgaaggtgatgcggccgccatggtggtgcatccccacgccagggaggcggcgcccacagtaggggccatcttaccacagaaaaacactcccctcctctggggagcatgaccagcactagggggcgctcttaagcacccgggggcatcggtcgcccccccctgcggctccgggagggaagcaaacaacggggtgaggaaagatgactccaacaccctcctgtctttgctaagcacgaggccgccacccaccaaccaagaatgactttaagaagaacgggtcccgccgacctaggtgaagcgagcagaaaaaaaagctgtgcaggtggcaagccccaacaggcgaggaccacacagccgcttgggagcacaaaaaaacatcacacaggctgtctgcccctcctcctccccgacgcagaaaacccgacgggctcggcgcacacacaaataaaaaccaagaaaactacaacacctctcctccccccaaagaagggggggccgtcgtccaccccgcccatggtggggttccacccccccgcgggtggacaccaccccgtgggggggccgcccgcaaccacacaactgatgtaccacggagcaatggcgcgcggccacaccccgaacaaacccccgcagagggggccctctccaccacacccacaggagaggggaatannnnnnnnnaacaaaacaccggcgaggtgctggtgaccagctccgacgacagcacctccgaccgagagaagggggacccaacaacacgaggaagtannnnnnnnnaaaaaagagggggttgtcgcccaacaccaccaaccggcgggctcgacccacggaacgactctacagaaccaacgaccgcggcgtctcacgccacgagcgagccaaacagatggtctggtgtcgcaaccaccacgaggcgatcgacaccaccgcaaaaacaggtgtgccgccgagcgcgaggtcagccccccaaagcgaacgaaagagaacacccgaccccgacgaatcacaactgactacaagatgcggatcggcgaacacagcgcgaacgagatccgaccaccccaacagaagcaagacgagatggagaaagaacagaacccacaacgacaagcaacgcgagagttgactccgaaccaacgaaaagaacatcagcgaaagcgtgtgaatccaccccacacgacaactcattcatggaacgaccacgccactgtcctggaacgcgcggcgacaaacacacttacgggagggagacagagagaccaccgaccaccccctccgaccagagaggctgacccctcccgcggtgatggannnnnnnnnnnnacaagcatagaaggagtccatgaaagtgagaggtggatgaagaa

SEQ ID NO: 414789 - DNA, 1459 bp, Homo Sapiens
cccgcacacccaccaacactaccctccccccgtgtggcgagaacgaaaaaaaattattatttcgttatctaacaagagcaggttgagtggtttcgtacttgtttattgattacctcgtcgtcgagtcgtcgtagtaagaaagaaaaaagaagagtggtcgtgcgcaccgatataatatgagaatgctgtcgcgtggcgggggggagacaaagacaaaatacgtaggtggtggattggatatggagaggaaggtgaataaaagacaagaaggcagcggtggtattgttttctctccacgccaagacaagacacaacaacagaaggacagaggatcaacactgaagaccgtgcgagccgcattgtaaataaacagagagagaggggaatgatcgaccgctcgagagcgaggagacggcgcgcgcgagaggcgcggcaagaaaaacaaaacaacaagaccacgaccgcgcggaggggaggcggacaagggggaggagcacgcccccagcaccgagcacgcgccagcggccgccgcgcacagcatgtgaatatatagcgaccaagcgccacggaggacaaaatacaaatacacacccgggggcaacacgcgcgccgcgaggaaggggagagacgagcgggcccgaacagggtgaggggacaacccacaccagccacactgggctgcagatgcagcaccatgacgggcccacctacgacgacgaggcgagggaggcggcaagcggaaccccaccaaccaatgcgagcagaccttaacccactaacgacaacaaccaaccaccggaccgcagcgctccgaacgaaggagagagagggtgtcgagacgcaccaccgcacagaactcaaggggagcacgacgagcaaaccatgaacgtgactagctacaagaaacgagagaaggggcgaagtgagctacgacaaatgcaacgcacgccctaacagctaagcagccacacatcgcgcaggagcgaggagaagacaccgcacgaaagcgacgcgacaagtgaacaaacgtacctccaccgaagcgacgagagggcagacataggcgccacaatcctctccgctgctaggagcgtggaacacaacaaaacacatacagaggagaggcagaaacacaaccccgcaccaccgcgacgggggtactaacttcaagccacccacgagtaggaaagagaacagcacagagcagagagacggagcacaccgcaaaacacggacctagttcgggaagagacacacacaacgacaggggggacgaggagacaagcaggcctcccccatacacacaaagcaagacgagagaagaaaacaagagcaggaaggcgcacccatccaatcgagccgagggaggcgcgccaccacaccaccgcgccggagggcgcacgaggcagcagagaaaagcacgacaacagcggagagaggaacgaggcgccgcgcccgc

SEQ ID NO: 414790 - DNA, 1498 bp, Homo Sapiens
  misc_feature (1049)..(1057): n is a, c, g, or t
ggtgggggtggggaccctgggtttttaaaaaaaacccgaaggaggtgttaaaccggggggaaagaagaggtgggtcgttttatgctcgagagaacgacctagaatattatccagaagaataatatattaaccaaacagccgtggtattcttcaaaagaaatagaggtgtgtgcgtctcttctcgtgaacgcagccgccgtgttttgagaaagaaactctctgacaagagcggggcaagaagcggaaaaaaaagagtgggccgggagggtaaatggtggtggtagtctctctgacaacaacaaaaacactggtgcgcgcgcgctgggagagagagcaagagtcgggtgagagatcaacccctggtggtggggcccccctatctctcggtggagagaaaaccacccacagagagcgtgttgtttttgtgtgtgagcgtcgcccaccctgcagtgtgggtggtggagagaaaacaagagagatggtggcgcacacagtggaagagacgcgggcgagagagaggtgggcccagaaaaaaaatatctagcgagagtgagtgagacaccccccgggtgtggagggggacacacgccgcgcggtgataacaccctcacacgagcgggcagccagtgtgtgtgtcacctcgcggggtgcgacacacaaccacacgcttcgtgcgagacaaaacagcaggtgtggaacaccaagaggagcgaggagcgggctctcccgcccaggagagggggagcctcgcgcggggaaatgtggtcggacccccccacaagtgtaggagcccaaaacaccaagggtgtgagggggtagaagtacgcgacccaacatacggggcttggctcttacctgtggggtgacaagagatgagcaacgcccaacgaagactgtgtgggggacgaacgacaaaactgactagcggtcaactgggaggggtgaaacgacgacagctgccccgcagctagagtgatccgtcggtgtctgatgcccccccacacaggcgggacggctctattcccttggtggttggcaacgcccgcccnnnnnnnnngaggcgccgccgcccctactgcccccccgaacagagagggcgtacagtgaggagcgacacaaaccaacgccgggggagcaccaacaatgacatacactgaggaacgagggtgaagcaacacagacgtggggagcgcacctgtgtaggcgaacagcatggcgacacagacagacggagggtggggcgggcgcaaacaccaacacccagccagcgcgccggagaggatcgtctggagatcacgtcgacaccacccccccgccggccttaccaccagagagacgcgccgcccgcacagacaccgctgaatgagggacaaagcagcaaacacatgcgaccgcgggaggggtggggtggtcgcccccgcgaaacatgtccgtgtgaaccggggtgggacgtcacggcggtcgcacaagcagaaccaacagagcaggaggcgaacaa

SEQ ID NO: 414791 - DNA, 1608 bp, Homo Sapiens
  misc_feature (526)..(583): n is a, c, g, or t
  misc_feature (853)..(876): n is a, c, g, or t
  misc_feature (1331)..(1331): n is a, c, g, or t
ccagggcgaggggttgttaaaggcccgccaaacaaacacaaacaataggagggggagaggaacatagtcagcaaacagcgataatgaatcacccgacaagggagagataagagcagacctctctgacgccagccggaggaagtcgaaggacacaagaagcaggtagcacaaatagaaagagagagagagcgggccccgcgccacgggagggggagccagggcgaggggcaacaaagaaacagtccgcacacgcgcatgtgtgagataggagaggagtgagagcgcgaggaagcgcgcggcgtgaggcgacgcactacatacaacgaaaagaaacatccattgacacatgcagaacagagagagggatagaggacagcggagcgcagacggaagcagcggagcagcttcgtcgcagagggaagacatatgacttacacatacgcacaacaacagaagacgcggagatggagcgagaaaacaaggagcaagcacaccaagcgcgccggcacgcacatgcggacgccannnnnnnnnnnnnnnnnnnnnnnnnnnnnnnnnnnnnnnnnnnnnnnnnnnnnnnnnngtcacaaagcaaccgcagcgtagagcacggcacacaccagcgaggcgagacgaaacaacaaaagcaagcagagagcaagagctaatccgcggtcacaaaaacactcggcatcatgcgtgagagaagagtgagcgagggacacagatcgcacacagcgcgcacagggcgaaagcaaacacggcaagatgcgtcgacgcgcacaacgagcgagagacgggcgagcgcgaggcgcgacctgcaaatggagaaaccaccgccgcccagatcacnnnnnnnnnnnnnnnnnnnnnnnnaaaaccaggtatgcgagtcgacggggaagaggatcaaaagactcagcagcgtagtcggtgggggacggacgagaagacaagaaaaacaatcaagagagcgagcgcaggggagacgaggacagacgcaggggcagcaacacatccggaaggaggaggggctccagaccgcataccagtgcgaggcgagcagcccacgagaagacaacggacgacaagagttgagagagacgacaaccaacacgaaccccagacaataacccgaccgagaccaccaaaacaacgaggctaggggggtgacgaccaagccacgaaacaacagccgccagggaacgtaacccagaccacaagaaaacacatagtataggtgggtcgagcggcgagataacaacaaagacaaccaagagaacacagaacagagaaacacaaaccacgacccggaagaacgaagcaaacantcagaggcgggagaccacacacaacacccacgccgcagcacgactgatgagtagacaacacaaagaaacaacactgaaacatcagtacagtccagcgaagggagtagtgatgcagcgcacgccacaccacagcgcaggcagtgtcagaggacgtgacgcgacgacacacaaccaggagatgaggaattggagactacaacatagtaggacacgagccgcgcgccgcgcatcggcacgaagcaagcgtgtcgtatagaggacgcaagcgcaccaagag

SEQ ID NO: 414792 - DNA, 271 bp, Homo Sapiens
aatgttatgtatctaatacattcaggaggaaacataggcaattcgagaagcaaacaacgaacaacgacgcaacagcaccctgcacacggcactccacagccaccgacgaacgccacccggcacagacccaaccgagcacgccgagaccgggcacccgcccaccgcaacagaacagaccgccggaccgcctctaccgccccgcggcgctcgcgcgcccctacctccatgctcgccaacaacgacccgcacacaccccccaccgaaccccacc

SEQ ID NO: 414793 - DNA, 890 bp, Homo Sapiens
  misc_feature (364)..(409): n is a, c, g, or t
  misc_feature (440)..(454): n is a, c, g, or t
ctttttataagtagaggcgcgaccagagagagagaacaccacacgggcacctccccggtggttggggcgcgcgcgagacagacaactatgaatttgtctctacaaaaacacctacgcgccgcctttgagaagagaacgactgagggcgcagcgcctatacacactcattaaaagtacgggtaaggtaagaacacactagagtgggggccagaaaagaggcctctccaaggagagaggaaccccccgcgaggcaacaagcgggcaccgacggttgtacgccgacaacaagcgaggtggtgggggccacatcccgtcgagagagacaagccacgaaaggcagtctgtgaaaggagtgtggtggcgnnnnnnnnnnnnnnnnnnnnnnnnnnnnnnnnnnnnnnnnnnnnnncagcgaacggggaaaaatcccctaaaaacannnnnnnnnnnnnnncaaaaaaccccccgagagagagacctccagaagaatccaacgtcgccagatatagagacctcccaaccgcgccacacaacgcagagatcctacacgcggaggaagaacaaatcgccgtggcgtgtacaacaacaccgcacgcgggggcgacaccaacaagatcagaaagcaccccccacaaaaggggggtgccccacaacacaatgattagagaaatacaccgcccccgattagcggggcgaaacgcgaaacgagcgcgcgcccagcaagagagacaccaacggagtgaaggaggaacacgggcgaccagaacaccagcggagtgagaaacgaaccgaagacactgttctgctgtcgagaaaaccagctcttcgcccacgatggtgagtcgctggacggcagacaggacgggaagggacaacatgaacaccccaca

SEQ ID NO: 414794 - DNA, 870 bp, Homo Sapiens
  misc_feature (301)..(310): n is a, c, g, or t
gtttccccccaaaaaaatcaatgttctcttttattttggaggtcgaaaaacaaagaagagcacacaattttatcaaaatgttcacattagcggggcacacctcggaaaagagggggagtgaggtgctcatctacatcatctttcttgttgggaccccgatgctacccaatattacgaggggtggaatacagctgtttctactactctcctctctttcagttgttctccagcaggctggtggtgaccaccggatcatagagtgggggagaatttcgcccgccatcattgtgggcgcactccnnnnnnnnnngggtcctctctcttattcacccttacccacgagaggtttcttccccacccaaagatattgcttccgcggaggataggtgttattactcccccccacacgctcgtgtcggtggagagagacgagcgcggctactatcatgcaccattgcttctgtcgaaagaacgacactcgtgtgttggaggagggaaggccatcatctattcccactctagtatgagggggcggacctaggagagcgagaaaacgacacaccggacatgtttcacaccgagatggttgggtgtcgcgaccgatggatcggttctgtgggagtacacggtttacatctcaactatcgaacagaggggggtgtgcgtgacgcgaccggctaccgtatgtcttcactctaggaaaccgcgccgaccgcgagagcggcgagggggatggctcgtgcggtacaatcacgccgcgaggtaaatatcttattgttgggaagaacaccgctcctatagaacaagacatcagacggcgtgtgattcttctatacagaaatattactccatctaatattgtctctcccc

SEQ ID NO: 414795 - DNA, 1073 bp, Homo Sapiens
  misc_feature (927)..(990): n is a, c, g, or t
cccggttggaaaaaaatttaataaaagaggggtgggagcaaggggtgtaaaatatggacaaaaggtcatcacaacagccctattgagatacccccgtaaacccacggtgctatatggagtctcacactctacttaactgcgtgcgggtggtactcatcaggaacaaagcgccgcgaggccacagtgtgcataccagcacatccctaggtactccacgaaaacagcacctccacgcgaagccaggtgctcaacacgcagctccggctgtgatacacccgcgcgcaagaatagtctcagtgagaaccccatgtagggagaagaggctacacccgatgaccagtaacgtgaaaacgtggttcctctacgaaacaccagtttttgaaagggatatattcccaacaccatgcgcgtgtaagtgctaacgactcataggtgcgtcggtgcacgcacgacctcttgttcacaactcttggcttgtacgcataggatataactaatcgagacaccagcttagttcgggcagacctctggcgagatagagggtgaggctcatctctatagagacaaccgttgtctactgacaggagccacgaacgaacagcgcaccgacaactgcgagaggggcaacacaacaaggggccaggccagaaaccaatgagccgccactcgcaggagaaacccacaagatatacacgggggaggcccaccaccacccaaacagtgtagcccccgagacgcgcacacaacacaacgggaggtggggtgaaaacacaaggaagacggcggaacaagtcccagtgcaacaaacacgcacgagaggagcagccgtccaacaccacgcggcgtgcacagctgaagcaccaccccaaactaaaacacacaggacaagccggccaaaccaccctagtcaggaggcaaccaagacannnnnnnnnnnnnnnnnnnnnnnnnnnnnnnnnnnnnnnnnnnnnnnnnnnnnnnnnnnnnnnncctcgacaccaaccggcgagagacacactaggggaccgtagcaaaagcacaacagcacaacgctgcgctcacagacgacacaa

SEQ ID NO: 414796 - DNA, 1538 bp, Homo Sapiens
  misc_feature (513)..(521): n is a, c, g, or t
  misc_feature (672)..(672): n is a, c, g, or t
  misc_feature (1013)..(1013): n is a, c, g, or t
  misc_feature (1111)..(1111): n is a, c, g, or t
  misc_feature (1433)..(1433): n is a, c, g, or t
  misc_feature (1518)..(1518): n is a, c, g, or t
ttgaaaaaagggccctgtgtggaacaaaaacacgggggaaaattatgggaaaacccctcgtggccaaaaagaactggggagagaacaacgccggggccgggaactagggaggagtggaacaacgctacacggcaacggagtggggggcaccgaacacccagggcaggcattacacgaagcaggcacacacataacccacgcatttggagaccacacgagtctcaccacggggagggaaccacgaagcaacaccagatctgacgcaccaaacgcactgggggtgtggccgcgccaaattatgcggccagcacactaaagtgtgagagtagaccagaaagaaaatagcgaggactccccacaaagagagcccaacgccgggagacgtatcacacacaagaaccaaaggaagaagtaaagagggacacaccacaacggcgaggataaggaacgcccacagtaagtagccgcatacaacaagacaactcgcgaacacgcagggagaagacaaccgannnnnnnnncttctcactacattcgtcctccgcaggatagaatacgacaaaacaatattcaaggtcacgaaggtggatcaagcaagccgagggtgatcaggtcactaaaaacctttttttggcggttccggcagtcacaatgtaaggttacaatagaccngcgtattgtgggggacacatagcttgatcaaaacatgctgtgtggtgtgtataacaaacaatataggatgtcgtacgtgtattgtcaatacatgttattgaatctagacacagagacgtagaagcaggcagcgacccagatatgattagtcgccgccgacatgagtgtgtgatccaagatacagctgggcgagaatcaacatacatcaccgcccgggcgaccgcgagggatggagcgaagcaacacagcggtgtggtgcgacgaccacagcacttaaactaaacatacagaagtggggagagagacgagacgatgacgaacagacgaatcacagaacagcnccaactcatagagttgttgggccgacccctacaccacacagggggttacatcgcaacgagacagaaaacaaaactgtcacttctagtaacgtaggtanctatggatttgaaggagacgagacaacacgacaagaccgaggggtgcgtgaaaatatacttaccaatacggagggtgtgtagatcacgatttcgaatttggacaaaatacagccaccaacccatcctaggttggtctcgtacggcgtgaagactgttgatttgcgattcgatgttagtatgacaactagtccactgtgtagtgtacgatagtatcgtttgctaccaatacaagcggggactgtggttcactatacgatacaacagaagagcagcacgacacaataagctctgatgtcgctactgcgtagtggacagcgaccncccagacatacctcatatcataggtgaggtacgcactcgcacgagagaggtgggtatactatacatcactacgttgtcgagagtncttctcactcacagcagaca

SEQ ID NO: 414797 - DNA, 1426 bp, Homo Sapiens
atctcaccccacttttttgaacgaaaaactcacggtggggatggggtctgactttttgggaaggcgagacaaaaaaaacaacacaacccccgcgcgcgaccgatataaccacgcagacgtagggcgtgcagggggcgtgagcgacagtcgcgactgcgctgactgtagactacagtccaccaaacaagaagagtggcgccacgcagacaaagagcccccgcacacaccaccgaggagagaacgaaacacgggggggcggacgacagagagagagaggcgaccgcgagagcgcgagctcacaaagaagagacagggagggactggcaacagaggagagaagtactctcacaacaaaagaactatcgcgcacgggcgacgacagcggaggagcacggagagaggaggagacgtacaacgcaccacacaaccacagcctgcgcgcgccgcacaaccgacaccacatcttacaatcgcgagggccggcggccacaaacaagagcgagggagcacgacaaacacaacagcagcgccgcagcaacacaccaaccgacaaggaggagtcgaatcacgcaacaaacgcaacagtctcgcgccaccccgcccggcgcgccccctgcacccaccacccaacaaagaaagacaaaccgcggtgtctgctggacatgcggaccccaccaccgccccagcacgcgcgcgcctcatcatgaagacgagagggcgaggcacgcaccccgccacagcacaagcgcgagaggaggcaagaagacgaaacgacaacgcacacgcactagggagcacgagcggagcggcggtgcgactgacctcctacacagcagaaacgcagatagagcgggacggccggcgcaaccacaaacgaacagagcaggcgcgacggcctcgcacccataaacaagaacacgagcaggatggaggagacagaagcgcaacacggcagagagaccaggtcaggagttagcagcgcgaccccacctgccgagtgagagcgagggggtacgcagcctaagaactgaaagcaagacggacaacgccgccccagcagcgaggacgagctagaagcaagaaaaacacaacacacccccagacagcggaagcgacgacagcgacgcaagccctcgacacgacacaagcgcgagtgcgcgcgaggagcgagggacgagacagcgcacgccgagtctgagcaaaaccgcaagacagacgaaacagacgaaaaggaacgagcagagcaaagaaaacacggaacgcaacggaggagcagcagccggcaggccgccaccccacacaagcgcacaggacgcgacgacgtcctatcaaaacaaacgcggacgggcacctgcatacaaccgacgggggagaggaacacacacgacggaagatccaacaagagagggggtgagacacaaccgag

SEQ ID NO: 414798 - DNA, 1267 bp, Homo Sapiens
  misc_feature (148)..(158): n is a, c, g, or t
  misc_feature (725)..(733): n is a, c, g, or t
aacccataaaaacattttcccgggtaaaaaaaagggggagtaaaaggccccgggcgcacccggcctaaattggggctgggccctcggccctaccaccagcaatacttcgttttacaaaccgtacgaatctgtgggttacatctcgcgnnnnnnnnnnnggaggtatagaagcccaagcgcgaacccaggcgccttcttggtcgatctataatccgaacacctccgccggactcccgacaggggttcgcacaacaaatgcgctctgtgggcctgccctcggtgaactctgggcctgtgcctgtcgaggtgggatctcgtgtgcccaggcaggggcccgacaaaaaacaagttcgttcgtccgttacggcgcgcgcgccagaaggtttcaccccgggcgcgtgtgtttccagaagagttgtgctcattgtggaaactctccacaacgccggcccgcggtgttattgcaacacaggggggggcacaccaacaattcgatttccctataaccaacaaaaacgcgcgcggtatagcagacatccagcgcagaacaaaccgcgtgtttcacaacgcgttcccaggacaatatatcaattctccagagtgggccatccccccgtgtgattacaacctggagattcgtgcccaacacttttgtttgtgccccggtggtttccaccacaacaaaacattgtggttttgcctggggatattgcaagcaccccccnnnnnnnnnacaacagccctgagggggagatccaacccctcgcgagacgccgacccaaggggtgggtcggcacacaccaccgcggacactacgaccccgaggtggagatttagaaagcccaccccaaattcacgggcgccagaaacgccggagggttcgcccacaagtgggcatcgaggagagatgcaagccaattagggcgcaaaataagccccggcgcggaaacacaaaagcacggaggacgggctgtgctcagtgcggggaaccaaaactccaccggcggaagacaagacaccacgtggcgactggggtcgacaccgacagaggaaccccggggaaaaatccgcggagaacgggaacaacagagcgagggtatactttgtcaccaacacgtgggcgctctagagggtgcacccccaaacaataggccccaaatggtgcacaaaaaaggagataccgcgtcgtggaaacactgtagcacagccccgcggggccctagagcaaaacccagggagcgggagaatacgccccgaggggccccaa

SEQ ID NO: 414799 - DNA, 1228 bp, Homo Sapiens
cccattggtaaaatggctctttattttctttacaaatcactctggaaaggggcaaaaaacccaccctgattatttggggctccaagggcaccctttgggcagttcccaaaaagggaaataaaaatgcaccgatacctgttatataacaagttcccatcagcaaataaacataaatatgcaaattcaaaaccatctgacacctacctcagggttcgcctatagacagagtcgctattattcttcttcgagtggtcacctgcgtggcatgtctggtctgagaaaacaggggttctccctccttctgtcagcccagggctgtggcaaagtgtgacccacggtggtgtgtggtgaatctcatggggattataccgtggcaggcccaaccaacctctttggtgggggccctcaaagtgtgaactcacttccacacgcgatgaaagcgccttcccacaaaagtatagccggggggaactcacgccagggacataataccacacatataatttccccccgaggtataaacttgtggatcacactttgcgtcgcaaactatcagcacacagtggggggtcctcaccccccagtgtatcgtccccacagggaccaaaacgttctccacaacccgcactcttagaaaccaataccgcgcctcaagccctaaaaggaggtatccgaggagactgggggtgaagcgggtgcagggagcgcccctttgtgtcgcccctcatagaaagggccaccaaacaatcgggggcataacgagacccccccctagacaccctctgcctgtgtgcgaacaacaatccacgatgtaaatactgctagagaacccacatatgccgcacacacacacaaacggcgcacccatgctgcacccgcgcgttcacggcgggcacaacacacaccacaaggtacactaatcaccacaaacagggggtctatcacactaaacagcgccgcacaatccacgacgggcaaacaaatggcggcaccacaaacagtaagacaagcaccactatctactcacaccaagcagcgccaaaaccacaacggtaagaaggcagagcacaccaacctagtgtgtgcccccacaagggccccgcacccgtggtagccagtcagcgaccgatcggggaggaccaccccacgaaaaaaaccacagctgagtggtgggggtagcaccgagcaaaccaatatcagaccgccgaccgacacagaaaccaacaag

SEQ ID NO: 414800 - DNA, 1603 bp, Homo Sapiens
  misc_feature (820)..(828): n is a, c, g, or t
aaaaaccatctcttttttttaacaacaaagctcttaaacccaaaatttccacaatttcctgtcctttttagaaacctcttataaaaaaggacctcgttggtataacaaaatttggccccattgggcgcaacaatttaatttctattgacacccacagattctttcttcataaagctgctcccttattttgagaaagccctacaagactttcccgtcttaatgggggccattataaaattcgcccccaacgctacaacgcatttaaaacccgtgaggagaatattccaacatatgcaaatctaccacgagcgagagcgccaactcacctccttcctattgtactctttccaaaaccccttttaaaatcacttacaggtgggttttcgggggaccaacaagtcgtcgtgtggtggtccctatacaagagagtctcactatacaaagagtttccacacagagtgcgccctctgtgtgtgtgaaaaagcgccccacatcttattccttctccgaaccccgcggccgaaaaaatatggtggtcctctttctactacacaaaaaagtcttttctgtgcgcgccggaagatggtatactcccgatgatgtgggtagtgaggagcccctcactccacgacgagtggtgtcgtgcgaggcgcaatcataaactcttgtgttggagatcaacacaaatctccatcacatctctctccaccatgagtcattcggtaaacacacaagatagcatgcgcgcggtgtcgacacaattatcgtacatataaaactctttctaatacgtggtaggaccgccccggggggtatcatnnnnnnnnnaatgttgtgtaggaacccctcccacatattgtatcctgttctctcccagacagttgtaataaagcaactccccacggagggtgtgagataagacgtggcagcccagcgtgaattcagcccttttactctcttgtgatggcgcccaagggtctaaacaccatcctctctgcgagacttattatcgtgtgttgacttctatctataaacttttctcttgtagagaaaaggctaccccactgctcaggtgggagggacgagtggtgtgctacgcaaccctcctcctgctgcttgtttgcgtacaccccacctaaaggatgatctgtcccgcacgtgtggtatcaatataccactccctgtcgcaccgaaggggcgaatttataacaccctccccgcagtggctcggggggagcagcacgccaccatctgtattatctagccccgacaacaattatttctcttcacacaagtagttctcaaaaatcgacgaggtgatgattgaaagaatggctcgcctacactgacctggggtgcgggccccaactctaagtaaacaatgtggttcattcaacaccacccaccacttctgctgtgtgccgcccgcatccagtgctgaccgcaaacaatcagtatcgctgccgcattgtttgttgttgtggaccaccccacacaagggagaggcggcgggggtcgctgtgaataactcccgtcccacatcatcactgcggcggtcgttggtcaaccagctcgcgggcgacccacactacctcaaactatg

SEQ ID NO: 414801 - DNA, 767 bp, Homo Sapiens
aacccccccgggcggggtaataagcacaggaaaagggcaccaagtatgggtaccatcccttaaaaccctaaatcagcggggaaaaaatattcatgggaaaaatgttgtccccccaaaaatgggtttaccccaagccaaagaggacctgtgttcccgtgcacgtgggcaaagggaacccccgtgtaatctccacagctcacgtgtgataggcattccaggtatgcaccgaaaaaatgtccgttgtggagcacaggaggcgttgcataaaaaccgcaaactttgaaaataccgcagctcgcggacagaggtcatttgtctaccaaagaggtgtcttctccctctccagtgtgtgaaacccaagtgaaaactctcggggggtgtgacacaacatctctactcatgagaggggggccctgacaagagggagtggcttaccacatcgcagaaatattcccaactcaccccactaataaagcttgtggccaaaccttcgtgacagtccaagaaggggggtcatccctctatcaacacacacagggggggcgccgagggaccaaaactatgtgggtgggcgcaccaaacgccagcaatatcgaagcacgcctaacagcggggccctcacccacccgctgtgggcacataaacgacgcagatccccccacaagtggaccaaccacaacaccggcgacgacggccagtaaaacaagggcaacgcggggagcaccccccaccggggggtgaaaaacccccccgtgggaagcaccccc

SEQ ID NO: 414802 - DNA, 1052 bp, Homo Sapiens
  misc_feature (277)..(407): n is a, c, g, or t
  misc_feature (755)..(817): n is a, c, g, or t
gaacagggagtgtgcgggaagacaaaaaaaactgaaaacagccgcgctccttcctctgcgcgcaggaatccccactgtcgttcctgcgcacgagccgccttctgcctctctcgaccacgggccgcgtctgcgccatccccgcacccgacgtgaacacacacaacacccactcctgtgtccttctcgacacaactaacaacaacaatgttctgttgtcagtgggccccattcttacgccgccccccgccccgcacggaacgggcgagcgagcgtcgannnnnnnnnnnnnnnnnnnnnnnnnnnnnnnnnnnnnnnnnnnnnnnnnnnnnnnnnnnnnnnnnnnnnnnnnnnnnnnnnnnnnnnnnnnnnnnnnnnnnnnnnnnnnnnnnnnnnnnnnnnnnnnnnnnccccctcgttgtctccgtgagcgggaggacgagacgccaaccccgcacacaacacgacaagcagcagaccgcactaccaagccgcgtaatcttcatgtgcgtcggggccgagagcaagacacctactctctctctacccgagagaccaacaccaacgactccggcaccgagcacgcactgtcgctgcgcgagacagacagcacgcgcgtcagcgcctctcaacatgagaccacacgcgacaccacacatctccccaagccactgaactcccgctcgcgtcgtcgccctcgctccccgccgaccccacacgaccagcaggcatgctgccgccatcggcctcgcactctnnnnnnnnnnnnnnnnnnnnnnnnnnnnnnnnnnnnnnnnnnnnnnnnnnnnnnnnnnnnnnngtgctcggcgtcgcacacgatctgccagacccacagttgcacgccagacgcatccagaccacccgatccggaaacccagcacgcccgcccatcctcggaacagatatcacaaccccaacacctcgcgcgccctgccgagtcatcggccacgctacccacgccacaccgctgagatacggaccctactccacgccgcaccccaacaggacagctcctccctcccccatcacgcccc

SEQ ID NO: 414803 - DNA, 1394 bp, Homo Sapiens
  misc_feature (60)..(146): n is a, c, g, or t
  misc_feature (176)..(205): n is a, c, g, or t
  misc_feature (237)..(250): n is a, c, g, or t
gtagcaaaaagtacatgcttgtttctctgtattcctagtacaatatacccgcagactcannnnnnnnnnnnnnnnnnnnnnnnnnnnnnnnnnnnnnnnnnnnnnnnnnnnnnnnnnnnnnnnnnnnnnnnnnnnnnnnnnnnnnncaggtacgcgtgaccaccggcgaactcccnnnnnnnnnnnnnnnnnnnnnnnnnnnnnnatacgaacacactccaattacgagaactgacnnnnnnnnnnnnnngagaacgaacgcagcgagcgacgacaatcacgactgcggactacgcgcacacgaacaggcgcagcacagcacgcgcgaggagtgagacgagaggagaacatagccctctgcctacctatgagcagaggagcgacaaagcagctctgagacaccgagaacagcaccaacgccaccaccgactaggcgacgccagcagagagagccgcggaccagcacctgtacgcgacccaaccacaactctctaacaccagccggatcagacaccaacaaagggcaacagccgcccgcactcacttctcacatcactatcaacatctccaccgcccccacggactggccacgccgaatcagcaaacaaccagagctaacgaacgcacaagaaggaagcaccaatgaccacagcgggaatgaagaaacaacagaacgccgcgctagccggtccgccacccccaaccacacacgcaccgagagacgcgctacccacgtacatcatccccacacacaacaaaactccacatctctgtacgctctacatctcaatcctccttgaccaaactaccgatcactcccatctgagtagaacgctcacccatactaaactttcacactactccatccccattctccctctctcaaactcgataacataatctcaaattacgattagagcaacattctctctactacatttctacactaaaaaccctaacatcaatcatctaccccacacccactcctcactaccctccgtctccaacactcctatcacacccgctccaatcacaattagacatactctcaactaatagttccatcaaaccgacacactatccatcatcacatccaagttcatacccacacactcacaccaaccaacacccattagcaccatcaacactctcatccaacaaactctatccctcaaatcaatcatttcattctctccactcattcctccaaacatcttgatataatcaaccgccgatacaaaacataaagacacacacactcaacaacatggataccataccatcacccacccacatcaatcacaccaacaaaacatataaacgctcatacacatcgagctctcatcacactcctcatacattattcatcactcacactacttaccctatctgta

SEQ ID NO: 414804 - DNA, 1192 bp, Homo Sapiens
cccgcgagagaagcatcgcgaccgccccagtcggtcatcctcgcgccaccaagaaaaagagagacatgctctgcgatcgaactcgcgtcggcgtccggcgccccactctcctccccccctctctgccccgtcaaaaggctcgcgtccgggcggtccgcgagcccccaacagacaccgcgcttatctccgctccggcgaaggcgcgctggcgagaatcgcacagctaaccacctcctcccacacccctcactcctctccctccacacgatcacactacatctccagctctcctccgtctcctcccgtcgcgccgtcaccaccacctccacaccctctcctcaccaacctctaatcaagacatcactaatacaagctcactattatcctctcctcattcatcctccctccgcccaaacctctctcatcacacgacgacaaacccatcttctctaaaaaacaatcacacaccaatgagttttcgctcctcgtccactacaccacaacgtctcaaacttatgctctctctcaaaccccaccgcaaactacaagataataatcacaacttaacgctcacacactccccacccaaacacatcaaccacaaaaacgaacaacatcaacaatcattcacaaatcgtgctcagcgatcagaagactgaaagcaagacacagccagaccaacgatcgaacccacaacattacataagcactatgcgaccacccacggatcactcgccgcaggaggcagaagcacggacgcaggcaagcggtagacgctagactggccgtgaggtaggactcacagcaactgcgtgctccacgagcaccgcccgagccgcaaccatggatgacacgacgcgtacgaggagcgtggtatggctaaggtttagccagctcatgtatacgtaaacatgctaggcatatcacgcacctaacgtccgtcctaagtgcagtgcatgcgcagtcggcgcatgaccgtcgcgttagatccagccttccgacagcgccgcccgtccgtcgagagacgacactccacatccgtcgaccggcgtcaggccatcggaagaccctcgacccgtaagcctcgaggcaaacagtccgacctcctcctccgctctagatcaacgaccaccgtctcacatgttttgctcgcacttacgatacccacggactctttgcgcgcggcctcgct

SEQ ID NO: 414805 - DNA, 1119 bp, Homo Sapiens
  misc_feature (89)..(97): n is a, c, g, or t
  misc_feature (288)..(288): n is a, c, g, or t
  misc_feature (326)..(348): n is a, c, g, or t
ttatgttgtttgcgggaccaaagggggcgaaaaaactactgtcgtctcgcctcccctcctcgcgagacgagagagagaggcgggcggcnnnnnnnnnagaggcaaaccagcaggggaacaaacaccacgcgacggaggggcggggggaggccccacccacccccccgcacgaaagagcggcggcgcgccgagctagagagagacgggtcgtgtgcgcatatgaaagacgacgatgagtggacgaacacacaaacacctgtggttcgtgcggtgagcagaccaaaaaanacgaacggagcgtgtgtgttgttctctctgcgcgcgcnnnnnnnnnnnnnnnnnnnnnnnagtgagacaattacataaatcaacaaatcttgtgtgtggtgtagtaaatgtgctatgcgcgcgccgcgcagaagacataacacatgacgacgagagaggcgaaataacatacatctcacgtcgtcgcgggggcgccgcgcgcgagtgaggagaaaaaacgagcagctgccgctcccccgtcgtcgccgtgcagcgccggcgaggagaagaggatagagagagatgcgacgagacgcgccgcgccgccgcgtcgcgcgacgagagaccgaagacacaacctagatcagatgcccagagaataagccataacccaacgaagaacgaagaagtaggtgtcagttgttagccacaaacacaaccacacccaccaccagccccgcagcaccccacaaacacaacccactgagcggacgacgactgagacaagaacgatgattattgatgaatcatgcatgataaaacccccagagcgacgaacgaccacactacaccatcatccttcttcttcatacctcacgcctgatcaatcgacaactacgacgcacgcacgttgcgcgtggacgtagccactcacactcataacaccgcagacgccgccggcggtcgtccccgcccccccgccgccacagcggccccggacgacgaacgagatcgttgcacgacgtccacacaaccacaggacgccgacgacgcgcatgcggaagaccgcgatgagacatcaataacaacatccaaaacatcctcctaccgctgcataattcactgtacacc

SEQ ID NO: 414806 - DNA, 1506 bp, Homo Sapiens
  misc_feature (909)..(948): n is a, c, g, or t
  misc_feature (1205)..(1205): n is a, c, g, or t
  misc_feature (1249)..(1312): n is a, c, g, or t
ccccgtgagtaacaaactataatcttttttggggaagcggctggtgtgtccctatgggggataaaaacccgaaataaagggcccaaaagcccccgcgctgtgtaaccctgtgtccctcctctctttgattttgcctccgcctttttcctcccacataaaacgcctgcctcctgcctcctctttgtggtgaggcgcggtgcgttcatgggaactaatcgtggtgctacaataatgtctcctgctgagcgatacagacaggcgacatctgcgtattgtggagacaccgcgggtccacccctcgctcgcgtgttggtgtgggccccacctctgtgttctccccccgtgtggtttgccctctgtacctgtcggtcccccaagctgcgcacaacgagtgggtttgtattcttctctcaccagccctgctcggcgctcgttccggggagtcccatctctttctgccgagtcgaccccacctctgtggcgcgatccctcttctgttacacactatctgtcacacaacagacgctcggctgccgcttccttctgcaacaccacctcgtctcctgatcttgaccttgctccctacctctccctcgtgcgactctctctctcgagccgctcttctctcgtccccacactccccctgcggctacccatcgtctgactcaccccccgcaccgcctccgcctctccctcaccacgctctctcgcgcccctattctctccttctctactcgttgcctcctatttcctcactcacacccactctcactcctcctccctcctacaacatcatttcccttcctcactactaactctgtctccccttcaacgacaaccctaccccccactcctcgtctctactcacccccccctcgctacccacgtactacttctctgaccgttcannnnnnnnnnnnnnnnnnnnnnnnnnnnnnnnnnnnnnnngacttctctctacatccgccccgccgcacctcccctaccttcccccactacaaactcctccactccaccccacatacgtcacatatcacacaccgcacctactctacacaccactaccttcgctcactactctacaccacacactcccactaaccctcttacacgctacttctacactcctcttaccctcacacaccacttctctactaccactcatcctcactaactctacaactactcacctccctacaccccanctcactacaacaacactccccattctcttcctccacttttcctnnnnnnnnnnnnnnnnnnnnnnnnnnnnnnnnnnnnnnnnnnnnnnnnnnnnnnnnnnnnnnnntccacactacaactccctacttcactccacgacacctctctctaacaccacaacgacctcctcctctcccattactacctacaactccatctcccccactctccacaacccctcaaccttatacaactcctctactacactctacacaacaccactacatcctcccttctcctgcctagctctctgcctccctc

SEQ ID NO: 414807 - DNA, 978 bp, Homo Sapiens
  misc_feature (41)..(90): n is a, c, g, or t
  misc_feature (136)..(193): n is a, c, g, or t
  misc_feature (296)..(354): n is a, c, g, or t
  misc_feature (360)..(426): n is a, c, g, or t
  misc_feature (506)..(561): n is a, c, g, or t
  misc_feature (613)..(633): n is a, c, g, or t
attgtggtgtttaggagagttgatattttatttgttttctnnnnnnnnnnnnnnnnnnnnnnnnnnnnnnnnnnnnnnnnnnnnnnnnnngaggaggagaaggcaacaagcggggaacaacaaagaagcaaggaannnnnnnnnnnnnnnnnnnnnnnnnnnnnnnnnnnnnnnnnnnnnnnnnnnnnnnnnngcagcaagaaccaaacagaaaaggaggaaaaacaagggagtaacacaaaccgagcagaacaattaacgtgagagtgtgtgactaataaagacacaacaaagannnnnnnnnnnnnnnnnnnnnnnnnnnnnnnnnnnnnnnnnnnnnnnnnnnnnnnnnnnaggacnnnnnnnnnnnnnnnnnnnnnnnnnnnnnnnnnnnnnnnnnnnnnnnnnnnnnnnnnnnnnnnnnnnaagaaacagcagcgcagagacgaatgtcatgtcgaccaggcgacgagaagggagagagacgcgaaaccccagtgatgcgnnnnnnnnnnnnnnnnnnnnnnnnnnnnnnnnnnnnnnnnnnnnnnnnnnnnnnnncaaattatacgagaacacgtggcacgagacaagaggaagcagacccgacgcnnnnnnnnnnnnnnnnnnnnnacaaaaaagcgaagctgacccgcggcgcgggagcggggagccgcagagagcaaaactggaaaaacagcctcaggtgaagatgtcgcagaccagatagagaaaacaagactgctgtaacgcctgtgcggatggaagaaatacaagatgatactccacgctatctcacctactactgccaatcacccgaggttggtgtaatgaactactaccgatgctcgacccggacgacgacacaacgagaagaagacgaccgcgtaagatgatgttagatagaaaacactagcagcatgggggtagcaagacggatgacagactccagacgcagcacccccccaacgcccaaat

SEQ ID NO: 414808 - DNA, 1061 bp, Homo Sapiens
  misc_feature (227)..(281): n is a, c, g, or t
  misc_feature (438)..(461): n is a, c, g, or t
  misc_feature (783)..(797): n is a, c, g, or t
ggggcccaaagagtggcagggtgtgtgttccccccctctttttcaccaattataggaaaccacggggaggcttgccaaaaaaataaggtcgttgctcatatataagcatctcctccactccgcggcagagtctcttgatatgtctgcgcgagcatattatacataaacacgagcggccctacggtgtgtgtttctctcataaatcatttatagacagatcccatatnnnnnnnnnnnnnnnnnnnnnnnnnnnnnnnnnnnnnnnnnnnnnnnnnnnnnnntatatcaaaattatattttctccacgacgcgcgcacaccacaacaacgacggtgttgtagccaacacgataggacacgagcattctgcatgtgtgtagagacacgagtctctcctttgcgcgcgcgacacacacagaaggggcgtgtggagacaacnnnnnnnnnnnnnnnnnnnnnnnncgcaccagagatgcgcacacagagaggtgatgagagatgacaagagagtccttactacacacaaagacgacaagacagcgcgcgaccagagtgtgtgaaagagagtggaaaacccatcgccacacagacagagagagggggggtgtactatctcctctcctctctcctttatacagatatgaagattgctccacacacacaacaaatatctactaagagagagagagtgttgtgctataatgtctctcaccgacgagagaaagagaaggtgctcacacacatcttctacgataatatagcgcgcgggcgcagcaaacagtgnnnnnnnnnnnnnnnccgcgacccgaagagagtgcactctaccaaagacaggcatgggcgcgagaatagacaccaacacgaaaacaaacgcacacaaacgatactcttatctaatatgtcgcgcagcgcagagaacaaaaaaggctgtgtgcaaaaacaataagaagaaaccgccgcgctgctgccccaccacaacaacacaacgcggtgccgacccaactcaacacacactctcagcggagagagcgcagagggcggggggaaaaaccaaacaaagag

SEQ ID NO: 414809 - DNA, 744 bp, Homo Sapiens
ggccacctcggttctcaccatggccttatttggggcgaaccccatgggaccaaaaaacaaacccgggagtattcaaaaaccccaacccacaaaaccggaggggtcgccacggacagggccctaaaaaggggccacgtgggcaccatctcaccgctccacaggcgcacaagaatatccagttcttacccccaggagcacatgttctcccacaaatgtggtgcagagagtgccgctctgtgctcacaggtgtggatatgtgtgtgtgtgggatctcatttgtctccctctgcgagaagtgtgtgtgtgcagacacgcaccgcgcgtgccgcgcgaacaggggggccccctcacacacatagtattctctcgcgcacacacatgatggaaagaggcgccgtgtgtaagagagaaacacatatagcgccggtggagcaatctcccacgcgcgcggagagaaccacacgagtgcgtgccccccacagaggtgagcggaagacccacactgggggggaggaaatctgagagcgacacacaggaagactgtagtcgagacgagagtgtgcgcccaaaaagagagcgtcccacagcgccgcacaaaaagagtgtactactacacccacaggcaggggccccacaatatatcgcactaaacaggtggcgagggtgtgacgaccataacacaaaaaagagaccctcgccccccaaacagggggacaactaaaaataaaggtgtgaaaacacata

SEQ ID NO: 414810 - DNA, 1090 bp, Homo Sapiens
  misc_feature (722)..(766): n is a, c, g, or t
gtgtggctctaaggggtttataagatggatttactttgggggccccctccccccaaaccgcgaggaaaggtgcgccacaaaaaaagaacagaaaaaagcccgccccggaagatgtaagggaggggccgccgtggaaaagcgacacaagtgtatgtaataaaagatacgggcgcaacacactctcctcacctttataaacaccctgtgggcggcctagcgaaggtggacacacctgcgaaacaaaagggcgtccccacagtgcgcacggacgccactgaggggggccacaacacaactcaatccacagaccgcgagaggcggcctcgaggcgaacacatagaaatagagagagtgtgacaagacaatacacagagagagacacacgcacagcgaggaccaagcgagagagagagccaagagagtgccagcagcgtgagcgagaagcgagcaacagtgcgggagcgcgagagtggacacgcgtcggagtgacataaaacaccacacaaaaaagatagatgtgcgatgtcgcaaaaacaaacaagtaggtgtactcaacaaatatctctcgcgcgcgcgacgaccaccaactcatctactagagtgcgaggagtgtgttagcaaaaataagagtacacatataacagacacgcgagcgcgacgcggcgaagacggcgaagatcatcacaacatccgaagaagaagaacgaagaagcagatgaacnnnnnnnnnnnnnnnnnnnnnnnnnnnnnnnnnnnnnnnnnnnnnccagcagaagtggtgttcatcccacccaaaaaacgacgcggagcgacgccaaaaaaccgaccatccgccgctgctgataacaactaacagagcaccacaaacgacgaagtttgcacgtttgtcgcccaccctccacggcgacgacgaccacccaacaacaacgccgcacgtgtgtcggcccccgatcgttccacgtctctacaaagtaataattaacctccccgcagtaggttgaagtatgtctataacgtagtgtagggcagcgtgctggaaatcaaaaaacaacaagaatcgcagactcctctctgtccaacaaaacaacac

SEQ ID NO: 414811 - DNA, 909 bp, Homo Sapiens
  misc_feature (56)..(66): n is a, c, g, or t
  misc_feature (128)..(142): n is a, c, g, or t
  misc_feature (254)..(254): n is a, c, g, or t
  misc_feature (374)..(374): n is a, c, g, or t
  misc_feature (787)..(796): n is a, c, g, or t
gtgggggggaaattttcttcacaaagagaaaaaaaattctctcccccttttacaannnnnnnnnnncgcccccctccacacacaaacaaacccccccttcctacaaggggaaattgggggtgtgcggnnnnnnnnnnnnnnntcggggttttctgtgtgtgcgcccccagtggtgtgcacacaccctcccgggcggggggttcttcttgtgacgagctccccctctgttggtggatgctcttccggggtgcctncccccccctcacaaacctttttttggcgcacaaagagcgcccgccacaaacatctttagagagagagggatctcacggcgggatagggggggcggcgagcggaaaatacctctccggtgngggggaacaaataaagagagcgtgcctaccctccgcgagagagagacactggggagaatccccccctctagatggggcggaggggcgccccccccaacatacaaaaatgagtgtctccctccgacggcacaaaagagtgtgctccctcctcaacgctatatctccctcccgcgtcgcctaatatctgacatgaccaacaaacactggtcttcgagcttgcctcactcctcactacgagaacagacgcctagacgagacgggtgttgagcgccgcccacacaacatctctggtggtcggtggctccgcccaccctcctctgagtgcggggggccccttacgcggcggctcttgtgtcgcggagccgcacatcatccctctatgtggtgtggggcgccccccaaaggtggggcgnnnnnnnnnntctgctctctgttatagacaacggcgcgatcctctccaccctatatgaccgtgcgcgcaccaccctcgcgtgtcggtgttctcctctttctgccgcggggccatctacccctc

SEQ ID NO: 414812 - DNA, 1260 bp, Homo Sapiens
  misc_feature (236)..(236): n is a, c, g, or t
  misc_feature (535)..(551): n is a, c, g, or t
ggccaaaaaagggtttaaggattatataaggtgcccaaaaatttccgggcaaaaaataaggggatctgagcgttctttttacaaccctagaatatccggggaggaaaccatgtgtgcgaggggcttggtgtggcgccccgagtggtttgcctctcgagagggccggctcctctccaggggaagatagcataagcgatgagaaaaccgccctcgaggaagatatgcacccttagagnggaagtggatgtgtgctcttctctctcagaggagccgtgaaccgcgggtccttcctatctcctctcacaaacgcagtataagagtgtctggttacagaggaccccgcgtgtgtgtctccgaggagagggactacacccgcggtgtgtggcgcgagagagcgcttcctctcacaccgacagtgtgtgcacgaggaaagtggccgcgtggtgtttccccccactcgagttgcgccacgtgtgtgtgttgttgctgtcgagagtcgctaccacaagttctctccacacggcggagacgagcnnnnnnnnnnnnnnnnncgccccccaactagagggggtgtggtgcggtggaagaaaagcaggtcgtgctagttgcaacccgtgttgtgtgtcgtccacccctctccgcaccattactggcaagagatgcgaggcgcccacacaactccaggatagagagaccccccggggtagaccaacaacagagatacgcccccgctgtcgggttgttgttgccccaccaaagaggcctcctcgtggtgcacaccagagtggtcttctccgccgtagaaagaacgccgcgccgtgatttttgctcctctcgccacagcgcggccgttgtgtgtcgtgttgacgctctactaatttgctgttgtgaggcaactgctctcccggaggggagagacaaacacaccgcgtgttgtcttgcggtggggggcccaccagcccatgttgatgtcgaagcgtcgctgataccaagtgttgatggcgataaccaaccacacgaacgaaggaggcaggtgagtattgtggttatataaacaagctcgcctgctgctgcgcgagtgaattaatcatctttcatcccgccccacaacaagcagtggcagcaggaaccacctaccacaagagctggctgtcggcggccaagcccgcagtcgttgtagtcttccccccccagagcacaagagggggtgcctctctcctccccaacccacacagaagagcgacaatggtggtcgggggg

SEQ ID NO: 414813 - DNA, 1177 bp, Homo Sapiens
  misc_feature (370)..(370): n is a, c, g, or t
  misc_feature (905)..(913): n is a, c, g, or t
  misc_feature (1074)..(1082): n is a, c, g, or t
catcgtgacttttttggtctttataaaacacaacaacatgtttaaacaccgtccaagaaaaaagttttttataaaacaaaaccccccttttataaccacaaacaccacagggtgaaattctcttggtgtgtgtttaaaaaattcttgtgtgtagttgtcctcgaataaaacaagcaataagaagtgcatttcctagaaagaaagaagtgtgcgtctagacatgttctctcacagtttggctatgcagacgggaggggacagtgctagccagtgtgtgtaaaagacacgccactcgcctgtttacagaaggtacagaacagcagtctccattttctctgcgcgcgtataatctcgccctattctctgcatntgttctatatctctataccagatcgcgcctggggagtctaaacccagcgctggtgtggacacaccaacgtgtgagtgtatactccctctgctttgtgtgcgaagagagaagactgttctactctcgcacatatacagagagcctctaaataagagagttattactagagggacccccactgtgagaaaaaatagtgacgtctcacgagggggcgctgtgcgacacccgagtgagtggtgtgtgtcgtctctctctaagagcagccgcgggacagagagagagaagagcaccgcgccgtgcgaggtgagaaaacaaacagagcccacgcggggagacaccacttccctccacggggcccccccgcgagaatgtggcgcgcaccaacacccccctcctcacacacaacacaaaaattagacactctgctgtgtgggtgagacacgacccaccctctctctctcctatcataagagagaagagaagcctctcctcccccaccacacaacgagcagagtggtgtttgtatcttatgttnnnnnnnnnaatattaaaaaaatactcccgcgcgtgtgtctatcatttaacagagcgggcgtggacccaccaaaagtagagaggggagaacacaactttcctcacacacagcgagaggggaggggacaaacacaaacagctggacacacacaagggcctcccccacgcannnnnnnnncgacacacaccagccatactccatcacacgcccagccgaggagcgccgtgccaccgaccccaagggaggaccagtccggagggagagacagcacc

SEQ ID NO: 414814 - DNA, 1067 bp, Homo Sapiens
ctagcagggcggcagcgcccaccaccacgatggacgacaaatatacatagaggagggagcccgcgtgctagatgcgagagggccagcaccagacacagtagagagcagaccaaaatacagatgcgggtgggactgacactacattactgctcgtcgtgctgtcaagcacgaagacaagagagaagaacatcatcttagagtgagtgatagtgtgttatccaacaaaaagagagagaacacaggcacaaaatatattttttatattagataagagagtaattggttgattgattttcttcataagagaggcgctcacgagtgtggggtatggatgtcaaccgatcgcgaccaatcccacaagtactaccctgtgtaactaacacatgccgtgtgagtgagtatgaatcgtcgccacccgccaccctcacgcgatactaaatacagaagaggataggtctgtaatcatcacaacacaagacacacaaaaaaagagggaagcgcgaaaacagaagcttcattaattcacacttctcacgtctagagagacacacattataaaactcaacccccgcgtggctgatctgcaatctcacacaacacacatccacaagacgcggcggcgacggacgtatcgtggtatgttattattagactatacaaaccacacaacaagcccatggaagtggttatctatacatcgccctcaacccgcagcacattcagataatactatattagacaacagacaacaccacccactacctctcccttcttgctatacaacactaataaaaataataacctctcaaccacctgtcaatacaacactttatttcatcttatctatccccgagtaccaagtctacactcaacaaaaatacaaaataacaatcaaaatcatcgacttagagctgtgatgaatgaagattcacatacactcacccaccaaacacaaacacaataatgattagaggagacgaccacacaccacatacacatgaataccacagttcactacttccaccctttataatatataccataacgaaagatacacacaacacaac

SEQ ID NO: 414815 - DNA, 1190 bp, Homo Sapiens
tatatttccccctcttttaataacaaaaaagaagggagggggaagggaattcattctccgccccccagcgaggttgtattactcattcttcttgttgtcctcgccacacataatagttggcgatataatataaacaatcactacgagtagaggagtgcgtggtgaacatatctactaccgaacgatagatagtgagtctgactgcgcaccttggtggtaggaaaaaaacacaacagatatggtgggggggagaagaggggagggcgcgacagcagcgtggtgcgcccgcaaacaaacaccgcatctagcgctcctaataaaaaacgccgacggcgagaaaaaagagcggggacgaaccaccacaagcgcggacaaaacaagggaggcgagaaaaaagagatattctatcgccgcggcgcacactagatggaaaaacaagagtcggccgaagaggaacagcacccaccccgcgtcgtcgacataacaccccaccccccgagagagaccgagccgccacagtgagtgcggcccacacacaagaacgagggaagaaaccctcgagtgcccgtgtaccacccccataaacaagagggcgtcgataccccacacacatcatggcagctggaagcgcgcgacacaacatagcaaccacaacgacaaacaacccaccctccacctctagagtgcacccaccaccgcgcgcgagaaaccacaacaccaaccccgccgtgcgccctccctgccgcgcgcgaggaaaaccaccccccgccgcgccgagaaatcatcatcaccagcaagcaacaacaacgaacaagacgcggcgggccgaaccctccagcacgctgacccgccatcacacaccacaaacgccgaccagagacaactatacttagcaccggcgcccccccgcccaccaccacacacagaccgacaagatccagcggcgcacagccctataatccaatcatgcaccgccgggtacgctcatatcaacatataaagctgaccacaaaacaaacgaaacaccccagggagtcgcgaccgaagggaggtccacaacccatgcgcgcgaaaccaatacccttccctcacaagacgtactaacagactacgcagtcgcgacacaaaccaactccgttcttctgctcgcgcgcccgtcccacccccccaccagctaacctcccgtgata

SEQ ID NO: 414816 - DNA, 1375 bp, Homo Sapiens
  misc_feature (414)..(423): n is a, c, g, or t
  misc_feature (543)..(552): n is a, c, g, or t
  misc_feature (1337)..(1337): n is a, c, g, or t
ttcccccccctctccatcaaaaaagggatatcttttataaattcttccctccccatgctcaaccctcggcgggggttccccaaataatacccatttctttaatagctccaagatcaccccacggggtgggtaaagatcgtctttaatccccgcgcgggaccacaacttgatggcggacgggggtgtcatctactcaacacaatcgatctgtttcgtggcgccacccttgtggaaaaagagaggtggtaacaagacaaacttactgacgcgacctcctcgtagagacccaccacaggtgtgtgtgaacgagcgtggcaaaaagacgacaactatcacatgctctcgatcaaaaaaaacaaactacggtcgtgaccaacaactacacagagcgcggggggacacaaaaagaggggnnnnnnnnnntactcctcgccgttgtgtaaaaaacacacgcgactgtctgtttgagcaaacaagtgttctctccctcccaactgaacggacgcagcattcatacgtgcgtcatctcgacactatttgttnnnnnnnnnnagcacctgtggtgtgcgacgaggcgggacgtcactaagttgtgcgtcgatactacaaacgcgtgtgctgtatgacaagatgtttatctagcagggcacccactaccgaagaggagaacgacacctctcctaaacaaaagcgcgccggcgggagaacaacaccccgtcactagcaagaaaaatcgctcccgtcaaaacaaagaggagggaggcaacacaaagaagacgagccacactcgacgcgacgcgcgaccatacccgtgcggccacgacccccagaaccctctcctcgagtcaaaccaacacggaggaggcagtcagctaccacaacagacgagtggggggcccacaccaaacaccctaatgagagcacgagaaagattagccaccacccgggccaaacgagacgcgagagaggcaacaccaaaacaccacatctactcactagcgcagcgcggggagtagcgaaggaagaaacgcgtgcactaatccacagccggtggcggcagccccgaaaacaagaagagagcgctcttctatcaaagaacaccccgcccgcgccgggcggaaagaccacaccactactactcctcgtgtatgactaccacacacaacgcgacggctcgattacaacctaacgctgtgcgtgctgaagcgaccggaacagaaagtgagagagccgccctcaggtgcagtagacgtaactatcgacgaaccgcacgacagccgccgctctcaccgcagcacgcgggggtgggcgcgactctataaacacaagcgcagcgngggtgtgagattacacttacccaacgcagcaagacgcc

SEQ ID NO: 414817 - DNA, 1263 bp, Homo Sapiens
gaggaagtcacccacagcgacaagaagagaggaaggaacgacagcgtcctcgaaacacacaacaaacaagaaatcacaaaataaaacaacaagcagcgggcagcacaacacaagaaacgaaagacgagagaatgatagagtagtcacaacacaacacgacagcgacacacacataccatcccacctcctctatcactctctctctcacatcctaccgcaacaaaaacacaacacacgacgcctgcaagcgagaacatatcgaacaagacagaggagtggacgagccccaacacgacttatatacaatcatactattcgtatacttcaacagcaagggcgagtgcccggaacaaaaaagaaaatcaagaaatctccgcaccaaacacccatacatatacagcccgcgcgtgcggagacacaaaacacaacaaaaatacgtaaacaacacaaaacgcgagcgtgtgcgcgctgcccgcctcgaccataagcacaacaccagacaacgacacgcgcggggagaagcgcaaccagaagaaccgcgccgtccgcgcgccgagccaagaacaatctcatttccaaactacaaaaaagagaaaagaagcaacgtacagaccaatataaaaatatactaaccaaacactctctctttatacaactctaatcactaccacctcaccaccacacaacacaacacaaattaagacgaagcaccatcctctaattttctcattcatatctatcacaacacacaatattatctcatatcacaaaccacaagcattacccacaatctagactacctcttcttacatagataacaacaacaacacacaaccatcacctcacctacacctcccccacactcaaaaatacatcaaactaactcctcaaacatcaatagacagatccaacaacatcatatcattctcccaacaccatcgaaacatcaatacaattacaaaactcacacctatatctacaaactacttagggtatgactacacaacacaatataagacaactcatagctcaacacaaccatcgggcataccagcaacaacctctcagcactcgctcactacgcaccagctgcgtaccacagcacacacatcttgagttatataaactaatcctacgaagaacgagaccggcagaccaccacgcaaaatcaataacaaacacagaaataagtgagacagttcgactggcgccacgccgcctgcacccagagccacgaccgaccccacaccagcaacacccagg

SEQ ID NO: 414818 - DNA, 1097 bp, Homo Sapiens
  misc_feature (883)..(891): n is a, c, g, or t
  misc_feature (1018)..(1026): n is a, c, g, or t
aaaaattaaatcacaaaaaatttaacactcttcatcccatcccccacgggggagatagctttgagaaggcacaaacccccgcgcgggggatgccgagatggagagtcgcattgggagaagacgcccagcctctggccctctgtggccaagggtgtgccacaaaaaagagagggtgtcgcctcacagctcaacctcttgcacaatgattggcgccctgaaatgagaaacgctctcgggcctattgttcctctgtgagcacagttatgagaagacgcacagtgtggtgacaacgggaactgataggtgtcccccacgattgaataatcacagaaatattgcgaacacaggtgatattggtgagcaccccacgagtgggagtgtggggggctctccacaaaatctccatggtgggagacacacacgcgcggcccacaacgggggtctacatctggccccacacagataagtctgtgcctctgttagacctctgtgtggccgctatctctcccccccttctggtgggggaggactttcttctgggggcgtccctgtgtgtgcgagcgctcctctttctctctgaggagcctcttgttgtcgctcatccccaacgacggcgtccctctgggggatagtgttgcgcgcccaccagggccctttttgagagcggggggcatcttaccactacacaaggcatagtcgcacaccagcatgagagagatcttagtgtaagtgcgctcgcagctgacaacataaacactgtcgtcgcgccccaacaagatgttgttgggcgcacaaggagaggagacacccttgttgatgagcaccgccgagaatggtcgtccactctccaccacctagagaagtagtagtggcggcgaccaannnnnnnnnggccgttcagtggaccagaagcactggtcgcgacaaacccaaagtctgtaggggcgtagctgcatcactcaaagaaaccaatctcacggccggtcgagcgacacgccaactagtagcaagaggcggnnnnnnnnnaaagagagagaacgccccctcccctttgtgttgaggcgtccctccccaaaaaagaggggccgcgcactacg

SEQ ID NO: 414819 - DNA, 493 bp, Homo Sapiens
  misc_feature (170)..(182): n is a, c, g, or t
attgaggggttattaaaaaaaccttctatagggggacaaatagggaacaaaacaccgggggagggggaggacccccaagtgcaccgttgtcttcaccacccccccgcgtggtggtcgatacgtgacacatacataaaaacaatagaaacacccaaagaatgcccggcgannnnnnnnnnnnncgcgcggagactacacacaaagaagcgagggggtaagtggcaaacacacaccccctgttgagactgatttgctctctcctaacagtgtgctcgccccacacacagaaaatgtgagtcagaaaacaattcgcagagtgtgtgagaagaatatcttctcaaatctcccgctccaagtcttctcccctctcaacagaaaaatgaaaataaattggttgtgttgtctcgcaccaaagagaaacactccacaagagtgtctacacacagacacgacggcgtggagagccatgcgctgggccagagagagcaaaccc

SEQ ID NO: 414820 - DNA, 744 bp, Homo Sapiens
  misc_feature (77)..(86): n is a, c, g, or t
  misc_feature (128)..(137): n is a, c, g, or t
gtcccaccccttggtggctctataaaaaaaggggggacattgggagggttcccaaaggaaaaaaagttggaaaatannnnnnnnnntactgcccctttttgcccaaaaaatctttctttttgactcgnnnnnnnnnngccttgcggcccagataagggggtggtggtgccttgcagcggcaatctgcgtgctggtgtgctattcaatcctctggtgtgggtggcaccagccgtcctaacatcactcgtgattgtaggcgggtgcagaaacaatggggtgtgcggaaaacacaaaagagaggtgcgtgtaccctgtgggggagatttctctccccgacgtgtgtgtcgtgtcgtatcacaagcccgcgcgaggacacaccacgatgacacgcccacaggagagcgagccaccgcggggaccccccacgtgggggctgtcgtgacatgccgcccgccgcgcctcatcccgcaggaagaacgtgctgtgagggagagggtgcgtcgcctcccgagatgagcgctgggggagacacaacaagtgcggaggtgcggtgtgtgtatgtgcacccgccccgctcccgggcacccccgcgggttagaaacatcggtggggtggggaatcccgaaggagacactgtgagtgccccccacgctcctggcgtggtaaaaaacagaattgaaatggaaggcgtcccactcaagaagggtactgtcctgaaaccacaccgagcacgcgcccactaaa

SEQ ID NO: 414821 - DNA, 1241 bp, Homo Sapiens
gccggggagtgatcatgagcagacctccaacaagaagtcgattctgctcgaaggaggtgttcattgtatggagcggggggagtacagcagctttttttggcggagaaaaatcatctcctcgtccaacaggcccgtcgtgttgagtggtcaggagagaatatttcatgggtatatccttatcttttacccccgcggagagaagataatagtaacacaaaaatattggtggcgcgtgcgtgcgtctccatatctatatgggtggtatatgtgaggtggtcgtcctacccccagggcgagcgtgtgcagcgcgcgcatatgtatgtgggcgcgcccgatactattccctccgcgtgtgggtgaacatacagctgggggacgatctcattcaaaggcatatctagataccagcccatgcgcgccatatgtgtgccgacatctcggtagtgaatacacatccggggggggaatactacaccctggtccgcaagatcactgtttcttctaatctaccaggatacactctctctagtgtctatggtaatagaaaccacctctgccgcgttgggcgcggcgctaagagagaagatgtcgcctgtgactatgatatgtgcgtgggtacaccacgaagaagagatgtgtgtgtgtagcataggcagacgtcagctcatcgatgggagcgccaccacagacagaacactatctcgctgcgagagatgaggtggtgtgtgacactacactatatacactcgcccgccaagcaggggctatctttctgtgcgaactcgcactcctctatgtctagagaggacgcagctgggacagagggagaccctactttgtgtgagaggagacccaaacacgagagagtcgggagcccgagaagtacgtaaatcgctgcgcggggtggacacaccccagcagtgtggcgtcatcaaacacccccgcgcagcgcacgtgagctgtgtactagatcggagcgcaatgctacagacgacacgcggtcggagcgacgtgtggagcggagagcaccacccacacacgtcgagtgacgtctggtgcgcacagaacacgagcagaaacaaacacatttagtgatggcggggggaagccgaccagtgatcgtacccccacagatcgcagcagaagggaggacaaataaacaacgggggggctacacaccggggcggacaacaactaccaggggtgcgggggccccccacactaggttggggaggacaaaa

SEQ ID NO: 414822 - DNA, 1564 bp, Homo Sapiens
  misc_feature (43)..(54): n is a, c, g, or t
  misc_feature (157)..(157): n is a, c, g, or t
  misc_feature (246)..(327): n is a, c, g, or t
  misc_feature (633)..(696): n is a, c, g, or t
  misc_feature (1182)..(1182): n is a, c, g, or t
cgacaccatccctctcaaccacaaaagtcatgactaaacaacnnnnnnnnnnnntaatgcaggtgctcggtggggggaggagagagaagaaatatattgtaacatacaaaaaacgaccggggagggggatacaaacacaatgacgacgccgcctccnctccctctctcctctcttttattctttgtcttcttgagcgagagaccgctcagagagagaggagaggggtgtctttttctttctctctnnnnnnnnnnnnnnnnnnnnnnnnnnnnnnnnnnnnnnnnnnnnnnnnnnnnnnnnnnnnnnnnnnnnnnnnnnnnnnnnnnatgatggagatgctatctataatatcatctgagcagcagagcgggtctagatctacgcttgcaacgagatagaaacgagagagagacgcgatgcagtgtacgatgaagtaagaatacaatggatggagtcgtagcgtacgtctctctgactgatgatataatgctgatactgacggcatagacgtagtagtcctatagaagtctagacgtctggcagtgcgggcgagcgaagagagcgcgcgagacgcgcgcagagacgagggtgagagtgagagagagataatcaatgataagttgtaacagcannnnnnnnnnnnnnnnnnnnnnnnnnnnnnnnnnnnnnnnnnnnnnnnnnnnnnnnnnnnnnnntttgtgtgttagcagcgcaaggacacgcatcactactctcctctctcctctgtcattaatactttctggttactctcacgtctgctcctgctctgtatagtggtgccgttccatatcgtacaacaatcacacacgatgtagaggctgccgtgtcgttgtcgtgcgagcgagcagaagacagcaccagccacacatgagccgcgtgccggtgcgaccccgggtcagtgtcgctgagtgaagacgtgggagcgcacacgtatatatctcctatcatcatctcatatctcgtgtatggagaagtgagaggcgagtaggcaaatctcttctcatatgatcaacaacacagacaacgggacacaggccctcgcgcgcctgcttcgggtacaacgacaagcctccgtagtagtgatgtagtggcagagcgacgggaccacgccacacacgcgaaccacctccgccactgtgtgctccgtccgcgcccatganacgatgacattcgtgataagacatagcacgatacaacgcaatctacccgcacagcgacaacgaggaggaggcggtgtcgccctcacctctccaacacacgacacacaccaagcgacggcccgtgggggcacacgtctctacttacttgctcttcgatagacacaactgcacgcgcacgaaaacaatccatccaacccatcgccagcccgaccggattgaatgacgaaacgacagagcaccctcatcatattactgagcgtacatccttccaaccaacgatgccttcacacgccgaccgcagagaaacatactcttattcttattcactgagcggtcgcccgacgcgacaattgggctgtgtggtgccacacaacacacacag

SEQ ID NO: 414823 - DNA, 1198 bp, Homo Sapiens
  misc_feature (241)..(277): n is a, c, g, or t
  misc_feature (420)..(474): n is a, c, g, or t
  misc_feature (787)..(806): n is a, c, g, or t
gtttatataatattattaattgttgtaaataggaggggaattgttatatctcgactgcacacagacgtcgtggttagaactaagaatgcatggccggaggacacggacagactcctgatatgatggcgaacaaaaatactggaacgcgcgggatctgaggaaaatgcatgatgcagtcataccacaccaacaatgaaggcgcagcaacacacactcgaattaacgaccaccacgatttgtnnnnnnnnnnnnnnnnnnnnnnnnnnnnnnnnnnnnntagaacagcacatacgggagctcgtccaaaaacgacagataccacacaaaccccatagtgactgcaaacacatgcgcgcgacaccacagagaaagattatggaacaacaaacatatgccccgcgacataaagcaagggagagnnnnnnnnnnnnnnnnnnnnnnnnnnnnnnnnnnnnnnnnnnnnnnnnnnnnnnnaccacagcgcaactctcccccccacagagaaacaccaatggagcagcgacacaaacacacacaatcactgcgcgccgccaacagagaataaaacagacgcggtcagagcaccacataagagaacacgccccgccacctaacaattccactaactacacaccatgcgacaagaccgaaataagacacaccaaaacaaaatgggctgcatgccaaccaacaacgcaaccacaaacaaataggactcagcgcaacacacaccacacaacgacgcaacagaatgccgcaaccgcgcacaagaggaccactccaagtnnnnnnnnnnnnnnnnnnnngagaatactagcacgccaatgcgcatgaggacgaggcaaccaccacaaccacgatgcattaacaacaccaagacgccacaagcaacatcacaaacatgaagatgacgaaaaaacacacgacaaaaactcagagacgacaacatgcacacgtcaccccacacacagtccaacacgtggacacaaaacaaaaaagctcaacaacaacaccataaatggagcaaaagcaacagcacatgtcatgtcgcacccacatcatatcacaatgaagaacatcccaccacaaaacacaccatcattgatccaccacaacacacagaacaaacaacaatatctccatcatccacaacactacatcacacgacacgcatccaaccaatcacactttacatccc

SEQ ID NO: 414824 - DNA, 1178 bp, Homo Sapiens
  misc_feature (209)..(217): n is a, c, g, or t
  misc_feature (254)..(270): n is a, c, g, or t
attccacacacatataatcaggagaggatgatatgatataatatatgcaataaaaatattgtgtgctctgcaccgagcgcgcgagggggagtgggagtgagtggcggggagagaaaacgggggggtgaggtcctctacgctagcggggcgcccggcaggtggaaagagacgtggtgtcttatcatcaccgctcgccccaaactagcgannnnnnnnncgcacaccctgcccgcgtggtgcgtgcgttcaccacnnnnnnnnnnnnnnnnngctccgtcgagagaaaaaatagacgatgagtggccgccgcacccacacagagagagatagaggtgagtgggtcgcaccccgattggatacagagagagagaagcgcgcggtcgcgcgagcaacgcacaggggagagagcgcccaccacgcgcctatgtagtatgggcgcgccgccagccaaaaaaagagagagagaacagcacccacccacacgcacagacgggaagggcgtacacaccagagagcgtgcagagcgtagatagctgaggcgccgacccaagtccgcgacgcgtagacaaggagcgcggccggggtgggcgtgccatccccacaaccaggccggcccgctgagggaccctacacacgaggtgggagagcagagccaaaacaggcgcccggcccgcgggaagagcggaccagcagggcacccacccatcgcagcgagcgcgctgcacgaagaccaccccatcgggccagcgctaccacgacagggcaagcagacacagatccgaggttatgaccgctgtcgccacagcacaccccacgacatgcaggcgattcacgacagatgacaccgaaagaagaaagggggcgcgacacgagcagacccacggctatctatccgaagacgacggagaccgacagaagctgtatcctacgcacgccaaccagacaaggcagggcggacacaccaaaccaccacaaccacgccacgaacgcggcgtagcggacgacactaactccaccaagcgaccgaagagacgaagcgacgcagcactctcggccaccagcgagatagcggtgggaggccccaacgacggaccgccgcccgccgcaaccccgacagccgcggacggcaccacttagctccgcgtggtggctggcgccccgacacacaaaacacagcg

SEQ ID NO: 414825 - DNA, 807 bp, Homo Sapiens
ccccctgcacgcagaggggacgaagcgaggggtgcaggggacgagagtgtgcatgccccagcaacaaagaggacgggagaggaatctaaaacaaaaaacacgggagagaggaggggtggagggcgcccccgcccaactgataaaatgatcatcgtcaggccgacactgacaaacacaataaaagagaagagagtagggaggtcaccgccgcgtgagtgtgagtgtcctcgtctcaccccaggtcaagtaaaacgaatgagaatagaacaagcgcacggcgggcgcacgcagcgagagagcgagcaactaacatgagaaggaagaaacaaaggagtgagacgggacggagaggtggcgagggacggtagaggacgcagcacaaaggaagaggattacataagaaagacaaacagaacaaaaaagaagacaactcacgagcgtggggcgcaaccaattagcatgagaacaatatgtcgttgcccaaccaccaccggaaagagagataggaaaaaagaccgccacaccgcatattacgcagcgggaggaaaggaagcggcaaaagaaaaccaaaaagaaatcttccctacccccgccaccgccacaaccaaattcgagaagacgagacctcccacgcagcacacgaatgaggcgaggcgctcgcccaaccgtaacgacgctacgaaccaggcagaaaacatcacctccgtcgcaaacaccaggagggaaccaactccagcgggacagcaacacagaaacaaaaagaaggaccctctccgaggagcgagcgtcttcacccaagcaaccacg

SEQ ID NO: 414826 - DNA, 527 bp, Homo Sapiens
  misc_feature (49)..(59): n is a, c, g, or t
  misc_feature (356)..(409): n is a, c, g, or t
catttgtttttttaacaaaacagccaccggttttattttcccccccacnnnnnnnnnnncatgtcgtgttggacccacaagatcattaaagagaggtgattcgacacaaagaaacacgccctccgggctaggtagagaaaaaaccaacaaaaaagacgtcgaggagaggtacacaacagcatgagctgcgcagcacagacagaaacagatgcgaggcggatgagctggaaaccgacaacctcttttcaacataacaagcagggttgtatgtcaacaaacacagaaagacaagtatacaacaaacaggaaatgcgcgcgtgggtgtcgctaactgcgtgcgagccccaccacaaaannnnnnnnnnnnnnnnnnnnnnnnnnnnnnnnnnnnnnnnnnnnnnnnnnnnnnactctacccccgcataaaactagagaggcgggagcggcgagagagacagaaaatctgtacgcacaccgcaggagcgggaggcaaacacacaacaacatctgcggcgaaggactattca

SEQ ID NO: 414827 - DNA, 924 bp, Homo Sapiens
  misc_feature (388)..(396): n is a, c, g, or t
  misc_feature (547)..(558): n is a, c, g, or t
  misc_feature (758)..(768): n is a, c, g, or t
agaaaaagtgtgttttttttacctagccccgccctgttgttgtcgcggacccctccttaataatgtgttgttgtacagaccggccgccggcgcaaagaacacccccgcgggggcgacccgcatgcgtatgtattttattctcccccggaggttcgttgcccgcccaataacaatatttttgtcccccggtcagtggtggttacccccaccgttatttatcacccaacctacctccgtacacaatgtgtctctcttttttcaaaatattctctcccagagagagggtggcgggcgcttggtagcagcaaacagatggacccctttgtcgtgttgtgtcgccgcgtgtgggtgtactcatctctcttctaagagagcgtgtgtttctttnnnnnnnnngcgagtggttttctcccccccctctttctataaaagagaggaggtgtggcggccccacaaagtattttcaccacccacctgccggcgattattgtctcctgctcttcttctgtgtgggggggcaccaactattctctccctcctcctgtannnnnnnnnnnncgcccccccaaaacacaaatgacgcccccgcctttaagatgcggccccccccgctggtaaatttggcgacggcgggcaccaccacgccttgcctctgttggccgccacacggcggcccctcaacctgtggtgcccccccacactagtgccccacctctgtggcacacacagcgcctcgcggtgtgctacacaatgtcctnnnnnnnnnnngcggcactcttgattaacaactccctcggatgctcttctctcccgccggggagtctctccatcctgggcggctccaacccaggcgttatgtgctctcccccccaaggcacatctatactgtacccaacacaacgcacctcgttttattttaccggg

SEQ ID NO: 414828 - DNA, 1304 bp, Homo Sapiens
  misc_feature (753)..(766): n is a, c, g, or t
  misc_feature (854)..(864): n is a, c, g, or t
ataaggggggagaaaaagctattattagccccccccacaaaccccacaagaaaaattttattggtgtttccaaccccccatttttttgttgttttactgcggccaacagccgcttcaattcctgtgaggaggatatgttctaccaaaaaaacaaatccggtggggtgactcgctcacgatctcgttacaacgcacgatattattttaaaaacaccctcgtagttttgtacaatcttatggcggtgctcgagaggaggacacacctgtatatacacgcccgccccccgactttatgtagagaggcggctaggctgacgggagagagtcggctggttgtgtacacccgcgagagtgaaattaacacaacacacgcgcgcgtggcggtgcaacaaaagaaagaacaccgccccactctctccgaagacaaacaaaactacaacattcaaagtcaagagtggtgcggcaccacacagagagaggtgttgtgtgtccgccaagctgagtgacgaccctctaccaccaacctcgccgagcgagcaaaagcgagagcgtgggggggcgaggcggcgcaccaccatctatgccccccacgccagaaagtatacacagagaggcgtgcagcgaacacgaacagccacgccaagcaaccacccacgaacccacatgagagggggaaagtaaaaaacacaaacacaaccctctttttcttttattcacactagaacaagcacgtaacacacaccaaacgcaagnnnnnnnnnnnnnntctttctcgtctgtgggagaaagagagagctgtttgctctccctgtcgtccaaacaacacgactcgtcgccccccccgtgtattttgnnnnnnnnnnnctatgtactttgttttataggcgcgcgccagcatctaattattctcttccttcccaccacggcagagagtgtgtaccccagaaagaacagcttcgacaaccacatccgctctcgcaccacaaaatgacgccgtccccccccactagacgaagacgtgcccccacaccaccacaaaactgttgtctaccgatccaccagagccggacacaaaacaacatacttacactagcaccaagcgaaagaggcacacaccacaaacacatcgtccatcccgacagcgttggggctgcgacagaccacccaatcacagactcacacgacatctttgggtccgagaaccaacacagcaaactctatcacaaaacgacaccaccactccacatcgaagagacgcacaccccgcgtgaggagagcgcgccgccgcgatacaaacatccacc

SEQ ID NO: 414829 - DNA, 756 bp, Homo Sapiens
cgggagaaggaggttggggagaacaagggtggggggggtgataaaaaaaccgcccacccctcggtcggtgtggtgggggtgcgtgggaaggagagtggcacttgttaacatctgatgccactgtcgcgagtctttatgagaaagacctgttgtgtagctttctcacaaactcttgtgtgacgggaaacagagtggggcggtggttcacacgcgcggcagcgccacaaatttcccacctctctcgtctggaagacaagatgggtggaatattaacagcgcccggagaaaaaatctctatgatgggggcggggcaccaaatagtattttcacacacagataccacctcccctcccagaagaggagggcctcctgtgtggcagaaatggacacaagcggggaaaaacagatacaacatcccctctctgggggggcgggcggccccggaagagggggaaacactcatcatagagcgaggcccaccgccgcctcgcgggcagccaaaccagggggccggaaaccgccgagatggctcgccgggaccgaggtgagggcgcccaatattcaacctctagagactataagacattgtgtggtcatcacatactacccaccccagtgtgtgatttcgcaccagccctccaaggagaatcccctctttaagaaccccgccttgggcgcgccccttttgggagcacaacactaaacattctagtgggggagaaaaagggaccttcaccctccggggctttcgcaaag

SEQ ID NO: 414830 - DNA, 717 bp, Homo Sapiens
ggggcccacaaaaataggggggagaagttgccccttagggcggaaaaaaagggacccggagagttactggggagggagaagggggaaccccgcatggcggggtgggtgcgtgggggagaacaacccccctactctctgtggggtgtgtgtataaaggtggtcgccggggacctgcggggctcactggcagtctacacactacttagcatccctgctggtgttccacaaagaacaacacacgtgtgcgcatcaaagagctttacagaactctcttccagagagaggggccctccctcactaccagcagggggcatcttagcaaaaagaagagggaggtctctaaaaggaggagttttacaaaaacatcacgtagatgtcctctgtgggtgcgaaaaataaactctgtgtgagcttctctcccacaaacaaaaaagactgcccagtgcgtcatacaaaagagcgtggcgaaatatggctgcgcggacaaaagggtcttatatcgggtgttcaccagacaatatattttcttgtggacaacacccggtggtacacactgtgggttatacaacaaaactctctcccacccctgcgtggacacccataggggtgtcccctcacatattctatatatgtaggagagggctgagcatgggatagctacaagaagaatgtcctaagagtgtgcgcgcactataacgagttataatacatttcccg

SEQ ID NO: 414831 - DNA, 636 bp, Homo Sapiens
  misc_feature (46)..(54): n is a, c, g, or t
tgttgtgttgtaccaccccccacgcggggaccacgccccgcgtgcnnnnnnnnnagcgacacagaacaaaacagaacacaaaccacccgcagcacgaatagaaacactggtagggggacaaaaaagagatgcgctgtttcagaaagagggggcggacggcagcacagaacaacgcggcggggcgcttgccgacacagcgcgagcatggccctggcggtggaggcgcgggggggtgtggaccccccgcccagcgcggaggcaggcggggcggggcgtcgcccccactacggggcggggttggtaccgccaggagtaagcaagcgtggttgcataagagaaggcgaggagatagaacatagagcgactcagatggtctctgcccgaaggaagaaaacaactgcggagaggggcgcaaccaacgtcgttgaggaagccaacacaaacatattccaccaaacggccgcttctgggaagaagaaggtgtcgaccgactccccccccacggtgggggagaaaaggcaacgggtcaccccgcccaaacacacaaaacatgtggggggcgcacgtgaccctgacgccgtggcgggacgtacttcccccccgcacgcgcgccgacggggcttaacagtgtcccgc

SEQ ID NO: 414832 - DNA, 934 bp, Homo Sapiens
gaattggcccaaaaacttttttacaatattaagaccaatatcaaggaaaaaaccccgggggaactacccttggggaaaaaggattaacccaattgttggaaaatctttaacaatggaactttaaaacgcaggggaacaccgtaggagcattatttaatatcctttcccgccatattgacaacagtggctggacttctctaacgacgatattattcctattaaagaagaagatgggaggcctatatccaccgtgggtgacccgaagcgcgcgagcaactgctactggttgacgacacacctatgagatgcgggagtagatagctctcggatatctaacgtgtgtgcctcacaaaataatatggcgcgcgcaaaccttcgggcgctacacaaatagagcgatgaagtgtgatcatcccactagagtttattggccacacctctgtgtctcggcccaataacagcgggtgcttccaccacatttctgagagacatacatggacccaagtttctcccaagtggttgctggcacccccctcgtacaatgagacccttcacattggtgtgttatggcccctatgagggaggaaaaaaagtcccttggggcttaaaaacacacgctcctattgaggcaggagggcatgaatccacacgacggtgtttgtacgcgcgcccttttacggaaccgccccgcgtgtcacaaccccccctatttgctttgttataggggtccacacagaacagcgcgcctaactttatgagcaacgagacacatgccaatcacctgggttgggggcccccccgactgtcacatttctttaaaactcttggacgtggcacatacgtgtgtgaaacaaatcttctatacgtgcgaacaacacactaaactggggggtaccacaattgtgggtaccagaagaagtgaggcgcgtaaaaa

SEQ ID NO: 414833 - DNA, 936 bp, Homo Sapiens
ccacttcccacaaatctcttttttgggacattcttcccgctccggggccagggccccgggggagaggggggtcccccccaggatgtttcagacaggaacccccagggtgcgaaattctcttacgtagcggttatcaaatacggctggggaacaacagaagggccgttcccgaaaacgccagaaacgggccaatatctttttataattaaagttcccagtaaagaaaaattgacattttctaaatactagccgcgattacaccagaagcaccttctagggggtggggcgccgccaggggcccttagaaagggtgcgcaaataataatgggggcgcccatatatgtgttccaccagagataacggcgagacagtacgagaggggaacaaaaggcgcgggagaaaaccacacagaccatatgggtgaccttaaaagacaacatctgcgtgctcttttgttacaaaacccatctatcggggcgggcggcggataagctcccccccgttgtgctaatatatttattttgtcacaaggggcctgtgaatacagactctctgtagacaatattaaaagagagagggcggggagagctctatataaccaatataatatatctcccgtaggagaggcaagggagatggcgcctcaaagaaaaaaagcgagctcacacacacccttgtgtgtgcgcaaccaaagcacataattaaggcgcgacaaaaacaatattataaaaaacacacccagtataataaaggcgcccgagagcaaccacccttctgtgcgagagagacaacatatgttgaaaacaacatctccgcaggagcaaactttaatgtcgcccccccaagaaaaaatatatgtctcggggggagcgtaattgctatgagtgatggagatgtccgcccccccgagaatagaacacccacaaggagtcgttt

SEQ ID NO: 414834 - DNA, 1103 bp, Homo Sapiens
  misc_feature (433)..(433): n is a, c, g, or t
tatcaatctggagcaggaagttgtctttggcgctaatattcctacaacatagaagcatccctgttttctttgttggcagcgctgacccgaaaatagctagccagtacgtgggggggatagaaaatagatatctgcaggcggtgggttgtcactgctggaaagatgctatactatagacagaggagcggtaggtaggtgtgctgcaggagcaggcgacaccagccgtggggtgggctttgtataagtaagtggagagcccgcagtgaagtgtcgaccctcagttcagctgacgcgtaggtaaggacacttagcgctccggtattccgtacatttcgtagtggatgccatataaaaatgatttgctcacggaacgcaccaataccagctgcgacgatcacaccatgacatgatacagctccctcctactgtctanccataagctgatgtgtcgagtccggtggtctaccgaccatatttgacctctcttgtgctcgcactcgctgccggcattgcccttcactggagcagagaacgagaaagagtaataatagccaccagcaatcagaccaacaataataatcagacgtagagcagtcggctggagcacagccaacaacacgcgcagcgcgcgcacgggagccgcgacactaacaaaaacatcacacaccaggcgcgctgcgcctagcccagcagtgaacagaccacagaagaagcagagcacccggcgggaacggaagacgcgctacgtcgactaaaacaacaaagcactcggcgagtgcggagcgcctctcggcacacacacataacgcacggcgcggtgctggggacgacccaacagaccaccggactaccccaaccccacctcctgtagcgctcggccaacaccgaacgctacactactgacacacaagagcgagtccgggtagactaaaacagcgacgagggggagagtaaggcacagcgagaaacggtacactccacccccgctggcgtgccgtcacgaaactcaaaccactgaatgcagaggtaggatggactcgaggtgcacgcccagccccggccgcaaccacacaccctacactctcaaataataaacaagacca

SEQ ID NO: 414835 - DNA, 550 bp, Homo Sapiens
  misc_feature (65)..(76): n is a, c, g, or t
  misc_feature (109)..(118): n is a, c, g, or t
atatatataagaagggagaaggagagggaggccaatcatattttttaaatgaacgatggcgcggnnnnnnnnnnnncaagatgttctagaagaaccacccacaacgccnnnnnnnnnncggaaacgacaccagcacaggaagtggagcgatagaggaggcggcgcacggcacgccaacacgacgagggagcacaaacagaaaacgaacaccattgtcatggcagggaggaggcgagggacaagaaacactctgcggtcagccgacgaacggaggagtgaggaaggcagccaccacccgcacgcatcataagacgagtagggaggaaagaacgagaacacgacagtaggggtaccacgaaggcgtgaggcgcacaccaacacacacacatagagaagaatagacgcagaacgacgaccacatgtgcatcacaacaagacaagctctcatctaccccaatcagggtgagccaatatgaatcacgcaagcaaaggagagagaaaggtccaagcaccaagcaaccacacagatgcgcaaccgagcgagcgaagg

SEQ ID NO: 414836 - DNA, 476 bp, Homo Sapiens
aacaccgcgaacgcaggagtgaaggatgcagagaagcaacaagaaagagtagacgcgagagaaagaaggagagagggtgggtcggcgtgtggggagcagcaagcgccgacgcagagaccaatggtaggatcagcagagcagcagcgacacagacgcgaatgctaacgtgcgaaggagagagggaaagaacaaaaaagtcgaagaacgcagacgcagggagaggcaagagcaaaagagaaacgaaagaacggacaagggaccgcaagtagactcatttcaacacacaagcaagaggaagagaaacctaacaagacgacgcaacggggcacgaacaaaagaacacaactgttatcggagacacactagcaacgaggatacattcagtggagggagagaaaaaacgcaccaccgtgtctcgaggcggaggccgaagtaaaaacaaagctgaaaaatgacaaccagagaggacaaaacag

SEQ ID NO: 414837 - DNA, 758 bp, Homo Sapiens
  misc_feature (176)..(187): n is a, c, g, or t
gggaggggaaggaagcaccacatccaaacagacaagaactacaagataccattatctcagttctctaagttaatgagtgaagctaccagcataaagcggattggagctgcggctgaaaacaacacaacgacgaaaggcagagcaggtagcatacaactaaagaagcataaagcagnnnnnnnnnnnngagaaaacaccagacgtcgagtacgagagcaccagaaccagcagaggcgactcgaacgagattagagagcgaacgagaaaagagaagagcgagtcaaatcagcgcagagagacgacaggagacggagaaatgacaactatgagtagtatagacgcgtatactatcatcagtccagcaccgatgcctcggcagaccatcctcttagtctctaatccgcaagcgtgagtcggcggcaagaaacacagcgtatggcgactccaaaggagagaggaacaagcaagagcaagcaacggagaggtgaagtagaggagaacaaggagcgagcgcacgcccggcgaaagataaaagagcaagagagagacgagacgacacagagacgacaagcgaccagcgagtgactaaacgagactcaaagatgagcggcgagagacacataccaagcccgacacacttgctaactgatgaccgtcacgaccgaactatagaacatgagagagagacgagaaacaaagaaccagacgaaagatagtaggaagcacagccaacaccgagaaacaggaacataacgaag

SEQ ID NO: 414838 - DNA, 867 bp, Homo Sapiens
  misc_feature (53)..(97): n is a, c, g, or t
attattttatactcaaacacagagatggttgatttacccccccgacaaagatnnnnnnnnnnnnnnnnnnnnnnnnnnnnnnnnnnnnnnnnnnnnntatatgagaggtgcccccccctaatcataaaatagaggggggacaatacaaaatagattatctgcgggcgagaagaatatattataactcgtctgttggggagcacgcgactacaacctattttataaaatactacgagggcggcgccaaaagaaactacttgcttctgtacacgcgccctttttattggatgtttcccacccaagataaatgaatcagatcctctcttcatctagtcaatcgccgcgcgcggggagggcacaagacactattgttaattcataaaaaattgtctttctgccggcaccatcatttaaaagattcaacttgatgaacgggggcggggggagatgtccacctactgttgcatatatataccaaccacaactagtggttggcggtgccaactaaagaataaacccgcccctcgtaaagaaaaagaggtaactcagcacacacataattctgtgtggggggaggcaaccaccaaacatgtgttgtcccacacgcaaatacaagtattttgtgcacccggcggcggagaagaaacaaaccaataaaactacaacgctctgtgcttgtaccgccgcggaaccagcacagtcaataattgaccgcgccgggacaacctatgtagtgggccgaaaaagaaaggtgacgtgatccctcaaccaactgaacaaaaagacggtggtgccatcccgccacctgttgttgcgtaaaaataatcaatcatagcaacctcacaccctgcctggtaagaaaactaa

SEQ ID NO: 414839 - DNA, 899 bp, Homo Sapiens
  misc_feature (115)..(123): n is a, c, g, or t
cccccggcggagtgtggggggggaggccgaggcggacgcgagggcggcggcaggaaaagtgactagcccgcggaccgaggacatcataaaaagaatggagggcgcggagcgggtnnnnnnnnnttgttgaaccacccaccaccacgacagaaattggcggggggagggcctgcacagcgtgcgaggtgattgattgctagcgttggtggagtggggtgtgtgttgtcttgctgaggtgagatggagacggttgttctagcttaccgtgaacacctagtcggggggggcgcgcaacaacgcaggcggagctatggagtgttgtgtgttcactcgcaagcacacagaggcgatgattagaagactatgcatcacctgtagaggaggaggcgcgcgcccacctccctacaaagaagaagaagaccgacgacgggcggtgaggagtgggcacaggggcgtgccaacaaaagagcggggagcacgcgcgacgagcgtggaggcagggaaagcacgaaaggctggagcgatcggcacaggcaaggggcgggccagcgcgagaagaaatgtcgcgctaccgccgcagcgaggcccacaccaagacaatgccacacaccagcgaggagcggggggggagaggaatagacgctcgggctgcacgaaacacggaagaggacaaatatcgaacaatgcgcaagaaagagagatcaagaacaaagacaggcgaacgccccaagaagcagacagcgatggctacagcaaatgaaccaacagggtgtctaacaccgcggagacacacgccaggcccgctcccggtgccacgcccccgcaccgagacaaatacagggacaaacatggcagagtaccactcgaaacgaggaaacgcgagagagaaaaagcgaggg

SEQ ID NO: 414840 - DNA, 1372 bp, Homo Sapiens
  misc_feature (58)..(104): n is a, c, g, or t
ctagtaggcgggagacgagccaagatcaccaacaccacgcagcgttgggaagcgcggnnnnnnnnnnnnnnnnnnnnnnnnnnnnnnnnnnnnnnnnnnnnnnntaccaccgccactgttatatgctcctctctagcggggcgtgcgtgtggagtgcgaacccttgagtggaggtggtggtcttcttcatctcgccgatgaggagcatgcgatccgtgaggtgagtgcgcaaacaaacgggctgggtcattcgctatggtgatcgactatcgacctagaacagaggcgcgcgatcccctcgcatagaataaattatctcgaggctgggagaggaagacataaatatagacactcaaacagagagagaagactatgcaatctgtgatatatatagagggtgctgcgcactgtctattatttatatatacacagtgttaccaaagagagagagtagagcatactattcttatgtctcgacatgagacgtgagagataacatagaacaaatatataggaagggttgccttcactcctatacgagagagcgagattgataagatgtcgagcgggagggggcgcgacgagagaagacgagagagattcgatctgagatcagacgcgacgagtagatgatcctctcccctgcgcgcgcgcgagcgcgtgacgtgcggagcgtgtgctgtagtatctctaatacgcctaatagacgagaggggtggagcgcgagtgagtggggcgttcgagccagaatcaccaccacaccagctcgtcgcagcccccaacaaccaatctctcgtcataagactgttggtcgtgtctcctatcactcgatacgatgagacgtggtcgtcgtgttgtagctatcaccacgacgcttgtaggtggagtgttgatgatcatctagtcccaccatcccaccctctcataccgcagacgcagacggatgccgatgtcttcttgtcactactacgcgcagccgacgagccgacgtcccacaccataccacacaacaccctatccgacacacaggacgcagacggaggctgcgcgatgcagtgaagacgacgttggtgccgcgtggtgtactaacaccaacaccaccagaccgtgctcgctggcgtttagtataccatccctatcgcttgcttctcttctattacgacagagcacagcccaacacacgccaacatatatactcatctatatcctacactccgccgccgacgaagactctaatattcatacggggcgcccggcaacgtccagcgacgcggcggagttcctcctatacaccaaagaaacacacagcacacgctaccttacgtacggcgagcggcgtgggagcaccacaccaaaacaacactatacctgg

SEQ ID NO: 414841 - DNA, 1338 bp, Homo Sapiens
  misc_feature (629)..(642): n is a, c, g, or t
  misc_feature (772)..(772): n is a, c, g, or t
ttcccccccctcttaaaaaaagggaatttttatgagatttccccccacatgttatccccccgcgggtggctcccgcaaaaaatccactattgtttaactagccatcagatcaccccacggcgggtggtgcaagcaggtttataaccccccgcgcggggaacaagactcgcgtggcgagacggcggcggtggctatgaataaaccacaacagctgttgttgtgttggtggcactctcgtgggaaaaagagagtgcgcacgcaagaaagaaaatatgcgacgcgtgccgccgctgagcgaaccgccagagcgtgctgtgtgtcactgctgtgtggcaaacgagcgaccctctactcaacgaatgctggagcctgtcacacaacagaccagacgtgttgtgcctcgaccactcactcgcagcgggggggagcaagaaggggcggccgcgcccactcaccacggctctggtacgaaagaaccagccgctttgtgtgggaagaggagagtgttgtgtctctccagcgcagcgagaggagtgtcatcaaaagaagtgcgctcacgcgcgagtgttgctctccacgcgacgtgtgtggggagaggagaggcggtcgcccaagtagtgtgtcgagtnnnnnnnnnnnnnncgtatgagcgagttgcatatttatgctgtgcgtgcctatctctcggatgagagacagagcacctcttataaaaagaagagcggcgcgggaggaagagtctctctgttacgaaaagatctgccgctgccgnatgaagaccacgccagggggggccacgaaacgacaacaggcgccaacatgacgtggggacgggggagcagatgagtgaaccaccccacacactgctctgttggatgacacgacacgcggcgcgagagatgcgtgtcctccatacaacaaggagggccgcgcccccacaacctcatacgccgtcgagccaagagcgcactcacaccgctgcacaacgcggcgcggcgggcgcaaacacacccaacacatcctcagcgccagcgcacggggtaagggagaagggcctataccactgcctgcggcccccgacaaagacgagggactcttccagaaaaacgcccggcggggggggaacaccaaaccgacgcggcgcggtagacacagcagcgacgcgccgtcatcacacaacaaggacggagcgcataaagtgaaggccgccgggggctagtgcaatcattgagcggcgcacgccccgaccgccgcggcgagggggcagccaactaacaacggagaggggcggtcaacactcgacaacaaaaagaagagcgcggctcagcacaacacacc

SEQ ID NO: 414842 - DNA, 1399 bp, Homo Sapiens
  misc_feature (464)..(472): n is a, c, g, or t
gtgtgttcttccaaatcattttaattggtggggcccagggggaagggaacccccgggtaaaagggttgtgtttggccggggaaatttgtccctgaactttgctggggggaaaccatcccgttgtgtggtgcggtaatgagggtggggacattttttgtggtccccagtggttgcaaccggcatccccgggcagttgtctacaggggtgtggacaaaaagtggcggtcgttgtacaggaccctcgtgggggcccgcgggtttcctccaaagtgtctttttacaacagcgcacaaaagtgctccccccagaacgtcccttatgggggggtggcactgttacaaagcgccacaatttttttgtggtgctcggcgtgcgacactgtgtgagagatgtgtctgtgccggctgtgtgtgtttgctacatctcccttgagtagagatctctgccggggtctactctctcgnnnnnnnnnctctgtgtgccccaagaagagattacctctacaaaacatgatctgggtgggtgtccccacgatcttcgggggggtgtagttcattctcgtgttgcgccgtttgtgcgcttctctcttcttaaaaagaatctcgcagtgaggagcaccccttgtgaggtgtggtgcccgcaatgtactattactatgaaaaaaccaacccgggggggttggcgccccgagagtgggtctataaaacacatccccacctggtgtcgagtgatgggtacaccactatggtgtgacggctgtgttgggaaacaccaaacaccttcttgtgtgggtctttatgaaaaaagaggtgagcgcagaaagtgcgtgtcaccccaacacagaggtgggtgggtggccacgcgctgaaataacaaccaaaaaggcgtcgtctgtcgtcaacagaccaaaaccttctgtgtctccctctatatatgaagcagagccgctcattattgtggaggtgagatcactccatcctccgtattcacggacggggcgtccccaaagagatcaccggcgtggatatcactacaaaccaattcttgtaacggagtggagtgggaggcgcccccaacaaataaatagtctgctgctccaaaatccaatcatattttgttttgccggccctcataagtggaatatcacttggccgccgtcctgttatgagtatagagagttatcccttctataaacaggccttattcattgttatgatagaccgtctatatattgtgggcgctgcccacggagccgcgccctcagtgtgcattacttataagagaaatgattagctcgcgcggcgtcaactcacacataaaaaattaattatttggcgtccacaatgcctcccgatcgggagagccaacaatacgtctcttttgagacgccgcgaccgcg

SEQ ID NO: 414843 - DNA, 758 bp, Homo Sapiens
  misc_feature (129)..(169): n is a, c, g, or t
atgaagaaaacaagagaccgattgcccgaggatcacgcgggcaccagcgcgaaaaaaaagccagacgaaatggagcacgatacgctgactccccgcccgcagcgcccgcacagaaagaagcacgacgcnnnnnnnnnnnnnnnnnnnnnnnnnnnnnnnnnnnnnnnnnagagcgaggactagagcaatcaacagagaatatagaacagaagaaacagagcagcacaccagaacagaccgggagcgagggcgcccaagagcaccactgttaaaaacaagaacacacacgagagagccgaggagagagcggcacggaggagcgggagaagcaagaacaacagacaacacacaacaatgggcgtgacacacaaaagaagacgggagcaatgagaaggagaaccgaagcaagtcgactcacagaaaagaaacaaacgcgtgacgcgcacagaacgagcgggcgcggagaaagcactgccgccggcgaccaacacaaacaacaaaaagagaagacaccaacgccgcgcgagggcggcgaggaacgccagcacagcagaagagccacagccccaccggcggcggggcggagacaaacagaagaggccggggccgcataccacgccgacgcagtcgagggacaaagaaaaaaaggaggcccgcaccggcgcaccaaaagaaaacaaaagcacggcccctccccctcaccagaagaggggggagtcagcaaagcaaacacaccacgatgccgacgcaccaaacac

SEQ ID NO: 414844 - DNA, 416 bp, Homo Sapiens
ttccttcccgtgggagtgcgacactgttccgcccacaaaaagacaggcggcacagaagaaatgatgcgcagccggcgggcggctcgcccatcaaaaataaaggaccaccactagcgacgcttgagcggtggggatcagcttctcaggcctctgccggggaggtacttgtgaggggggagggaaaaacaacaaacgtggtcgaccccaccgggagggggtcgtttgcgtgaatcaaacaagaaagagaatgctcccgatagcacgcgggggggtgcccccacagaatcgcgagggggggaggcggggtacccccaaccagaggaagtgcggaaaaatacagccggccgaccacagaaagagcggcgtgcgaggaggatctatgggaggagaggaatgaaccacaccaccaacaaaag

SEQ ID NO: 414845 - DNA, 1034 bp, Homo Sapiens
  misc_feature (71)..(79): n is a, c, g, or t
ccttatggggttgtcggtctgatttaaataaggtcttattttccttagaaaggttcaaaacctctttattnnnnnnnnnggggcccaaaaccgggcttcacccaaaaatatgttttgggccccaaaaacgccactcatccaaaaggggcatcaaattgggcgaacaataagctaattcgaagtgtaatcccctgaagaaatagtccctgttggacgtgtcgccaaattcctagtgggttataactcccacgacttgttttcgtccttagaagttattaaagggttattcccgagacaaaggaaactccgtttcccacatttctcgcgcgggcaacagtgttacaatagcacgtctccctccacagagaggtatcttctctcaattaaagtatgtgtgtgcgcaatgtgtgtgacccatatactcttatgtagaaaccatatcgtgggccgctcagtatggtggagagtattaaaactttcgggaaaatgttttccccatggtgggaacacaagagagtttacatttggggggagcgaacgaagacttacacgcccaattctgtgtgaaacagtgtggcggacttggacaataatggggtgcaccaacgttgtgggaatctttttggagacatatagaaagtgtgtatagctccttatatgtggggaacagtggcacacatgtaaaaaagagcggatgtgtgttacaaatacacgacatgtgtgtggaaaaagtggttttgcgaggaggggagttggggaaaaaggtgggggacaatagtgacctacaagggggtgtacacaacataaatatcgaaatatttagaaaacgtgtatgcatgtataccccctagttatattttgagcaaacagcccctatttcgaaaggattaataacggagcacgacaacaaaagatgtgcggatatctattaagaagagtataaactataaacaaaaattctactcggggggatatgttttttgttacaacgataagagggcacacaaattgtcattaggtgggtaaaggacaat

SEQ ID NO: 414846 - DNA, 1223 bp, Homo Sapiens
  misc_feature (59)..(69): n is a, c, g, or t
aaaaaaaacacaccacttctccttctaccaccctttttttataaaagggggtcggggcnnnnnnnnnnncggggggatgtcaccaaaaaattttccacaacccccctccctgtggcgcgcaagaagtgcgcccagcggagcgaaaagagaggggccggggagacaacaagatggtgggggggacaccacaccaattttgcgccgaccatccaaaaaacgtaggggaccccccaaccacaccgccgcggatactcgactgggaggtagtggcacaccactctatcctctacaaaggggggtgtgacacccctccgcagaggagaggacatcgggaggggggcggacactcccctcgcgacagaaacaaacctcccctgtgtgggcaacgctccagcacaccacacagccgcgcgtggaagatgtgtgtccacaaagcacagcccccacccagaggtgggaccgcggctgcacggtgcaccaccagaaccacctcctcaaaaagaaaatagtggtctggcgagtcctctcgggggcgcggcgaagaaaaattatttcccccgcggagagaaggggctcccaccgctgatctattatctcgggggggcgcccaaccaaaggagaacacatacagtgcgaggaagtgttgtgttagacacccccctcgtgagtgggggtaccccccgcggagaataattattatctccccgcgcaagacgttccacccaaacacatgtggggaggaggcgcgacgcgccacaacaagtgagtgtctcgcacaacgggtggaaaaccacccctggggcggcccgcgacccccccgtaggtaaggggccccccagcgggagaagaacaaacccccccaacggaagggagccacttcgggcacagcagacactaaagagggggttcccacacgcccacatataaaaagagagggggccgacccgggacaccccccgagagaaacgcgcacacaggaaccaccgaccggcgttgttggtgggccacaacagcttgctccatcatgtgtgcgccccccataaggggccgcggtgggaccacaccggggcccgcgtggcaaaatgtgtactcgccccccggggcctcagtaatctcggcggatgatgtagtagccgccgcgagtgtataatggagggcgaacacagggggtatgggctcccgggagaaactgagaggccaaaacagagcgcgtttatataaac

SEQ ID NO: 414847 - DNA, 1388 bp, Homo Sapiens
aaatattttttaatttttatattattactttcaaaataacggggtctctcactatttggcccaggtgggactggggggctcaagggatcctccccgcctacagcctcctgaggggcggggatatacagggctgtcaccacgcccagtggctacaatttttttgtttaaaaaaacgcccgggaaaccacaatggggcttgcatccgtgttggcgaacgcaaggtggcctctccagctgggtgctggacaaaagggggttctgcacgtatttggcacctggaatccaaaccgggtacatggtgcatgttgggttttctctcgggttacacctggacagtggggggagatcccaccccaggtgtttctgagaatccttttccacaggtcacagacatgtgggtgagaaaaccggtgtgtccatgttctctctctggtgtgtggacaaagaatgtaaaatctttcggggtgtcccatacactcttctccagtgtagaaatattttcccagaataaagcacctcctgtgcactcttttttataaaaccgagaaatgtctggagcgccctatgtgtgcataaagcggggcgcgggaaattctcgggagaaagaagctattctatccccggcccaggggtgtctcaaaaacgctctggtgtccacgcctgtgtggagataacgctctcttctggcgatactttgtgttcgtggggaaaccaaactgggcgtggaaagaggacaaccaatcttttcttcagccacattttgctgtgatactctttccaagagacatgggcgcctttgggtgagccaccaggggttgtaaaacctcctttccctctttgcactaccaaccaaccaggcgtcctcgtcgacacccacatgcgcgcacgaaaacacctcgggaaggaaggggacgtccacaatttctcctgggcaattttgtgtcctggggacccacgtttccttaataaacgttgcgggcgcaaccaaaaacaaacttcgcgcgggcaattcaaacacaaagagatgttctggtgggggtcacaattgggctcccggtgtgtggtgcactacacttcgcggcacaacagacttgtgggttgtttcctccccacaaccacccaaaaagggcgcacactctctccaagtatatccggcaagtgggggcggcagaagagactgcctgagaaaaccttctcttgtcgggcgcaaaatttcccagcggcacaaaaagttgcctgagaggtaaaatttctcccctcaagggaggggtgtgcggtggtatgtgtccagggtgctcttgaaaaccctctgttgggggtctttcaatattaaccagggcccacccattgtgtttaacaataagggacgcaccttttgttcccaaacc

SEQ ID NO: 414848 - DNA, 864 bp, Homo Sapiens
  misc_feature (80)..(127): n is a, c, g, or t
  misc_feature (599)..(599): n is a, c, g, or t
aaatatttttatattttaattattactttacaaaatacaagggtctctcactatttggcccaggtgggactggtgggccnnnnnnnnnnnnnnnnnnnnnnnnnnnnnnnnnnnnnnnnnnnnnnnntgtgcaccacgcccaggtgctacaatttttctttttaaaaaaagcccggaaacacaaggggcttgcatcggtgtgtggcacgcagggtgcctcatcagcggggtgctggacaaaaggggcttgcagatattgtgcacgtgaatccaaaccggggtacattggtcgagtgggttatccctcgggttcaccttggaagtcgggagagatccaccaagggttctgagaacttttctccagtccacgcatgtggtgtagaagaacgcgtgttgtccaagttccctctggtggtggacaagaatgtaacactctgggttccatacacctctcacgtagaaaaattttcgcaaataaagacatctggactctttcttaaaacccgagaattctgtgagcccatgtgtcataagcgggcgcgaaaatctcgcgcaaaagctattaatacccgcgcacagggtttcaaaaaaagctctgngttcacgcctggtgtagaagacgccttctggaatactttggtgctggggacccatattgggtggaaagaaaaaccaatgttttggaaaaattggatgaatttttccaaaagaagtcgctctttgtggggcactgggggtaaacttcctttcttgttcatccaacacgatgttgtgttgaccacaagtgggagaaaaaccggaagaaaggggatccatattctggggaatttggtttcggaccagttttaaataagcctggctggg

SEQ ID NO: 414849 - DNA, 894 bp, Homo Sapiens
tatgaacaacccgcaggagggaaaggaaaaggaggagcaacaacttaaacgcccaaaaagttaaaaaacgcccacgcaacaaaaaaggcgtcggctgggcgagaaaaaatggttcgacgtcggtcgttcgtgcggagcgcccttgtatttagagagaatactgtatgctcatccacacacacattatgtgttccctccgagaagtaaaacatcacgcagtcatccattcttgttcgacgggcggtagctcatgctgtcaccatcggttttcactcatacggcgacccgctccacacttatccgttgtggagacaaaacgcatgtgagtgggtgtgtatgttgtacgccgcgatgagacgctcggtgaatgtgcaaccgccacgaaacgaaaccacatcgctctgcgtaggtcgagcaaacatagacacgaaccagtctggtctaaatcaattgtgagagtggacaaacaaactatctgtagtctcactctctctctcgtctcgtcaaagaacataataattgtcgtagcgagcgcacctcctctccgctcacctatggacgtgaaccaccatacacataagtgatatgtagtattacctgcaccgcacaagctctctttcctttctgtgctcatcacacaacaatgatataagttttgtctttatccgccccaccaaagaaaatatggtttgccctcgcatgatattaataataacgagcgacgcgagggagcgaagcgcgctggctcttcatatcatatatatcggcggggcaagacagataaagacataaagcactcagctagcgaggcaagtactctggtatgagaaacaacacgcctgcccttctgcgagaagacacaccacagacgctgctgtgtgtgtaggcagagaa

SEQ ID NO: 414850 - DNA, 1069 bp, Homo Sapiens
aatatttcactatggaggaggtgttaaggaccccttctcggagagaatggcgagcgggggccatttttaaaaaacacaaagggaggaagaaaagaaaaaagtgggctccggagggggcggagcgccgtagggggggaaaatatacagcaggagagagagtactcgccccaccgggggtacgcggcgacaccacagcaagaaaaacccccgttgttaggggggcccacataaaaaacgttaggcgctcatacacggtagcgggggaccaggacaacacgggttgtgggacactaagtcaccaggaggctagaaaattgggcggacaacccgtgggaaagatgtcgacaacagggaaacaacccgggggcacaactaagagtgaacaacaatcacgaggcgggggggaaaaaagctctccgttaacggggcagaaacaccactctgccaaccagcgccgcgtgcggggaataaattgcgccgacacatacgaccacagacaaataaaccgcccagaaaagatatgtgcggctgccacacacacacaccccctgctcagcggggcgcaagaacagcgggggcacacaaagacggagagaagagtcgtgctcgcgcgcagagccactctctctcagaacgtctgcgcaagcgcgcacgcgagcagctagagggagcatccacccgtgtggggaaatcccccccatggcgagagccattatctgcataacatagcgagggagggggcacagaacgccgagtactgtgtcgcggcttacgaggagggccgacaagaaacaaaaccatggcgggcgggcccatgtgcgaggggggacaggactcacacagcgcgggaaacaagatacacgaacgcgcagggcctctcttgctctgtcgtggagagcgccaccatgccaggacagagccccgcccaggatacacagcgcgagtccgccctaattcgtggcaagaaaacacacgcgtgttcggaggaacaacaatccctcacctcttgtcgccaaccccacacccggctgccgccccccacccggggcgtcatcccgtcggacacgga

SEQ ID NO: 414851 - DNA, 983 bp, Homo Sapiens
gaggtagaaaccaatttaaaaaagtgcccccagaacagacaaagaggggggggcacatcacaaacaaccagtagtagggagcccaactgacgcgcggtggtggaggccagccagaaagaaaagacaagcgttattaactagtgacgcggagacagatgtcgtgggggagagcatcgtcacaaccagagggtagcagcacaattgagagcagtgggcagaccactgatcacagcccgcgcggtggcgcaagcacccaacaaaaaagtcgttcgccaagaacctccccaacaaacacagcaaaagcgagcggggcgataacgcaggaggacgtactcttgtactatgaacaatgctctctctattaagagagcagcgggggggcggcagccggccctaccatcgtgtggctggcatacaaacgacagcatagtacttgcaccgctaggcacacatcaccgagcaacgaagaatgactatcgataaagaacacaaaaccgaacatggctggcttaccccagcaacgaagcgagcgcgagcgggcggagcgacacatccccaagacaccccactgcacctataacctgtgcgtgcgcgcgggctaccctatgaaccttgcccggtaactgaaaccgccacacgcaccatcaagcgagtgggtgtcgtgttgggctgcgcgcagccactggcagaaaagacacaagcaggaacggccagcaacaccccgaccacacgcgccaccaggtcacaccaacctgcgcaaacatccatgcgagccccccagacgaacagcacgtgccgtcacaagacagacaacaacaccaccatggctgcataaccacacatgtcataacaagagtaaaaacaacagtaacggagcacactaggaaacacacgcatacttcaaacttcagacgtacgaacagaattggagtagctgcaggaacaaaccagccgtgccacaccaccaacaccaacaacacacc

SEQ ID NO: 414852 - DNA, 1515 bp, Homo Sapiens
  misc_feature (770)..(778): n is a, c, g, or t
  misc_feature (1450)..(1450): n is a, c, g, or t
cccgggttcccaaaactcttttttgggcaaatttggttctccctataaaaaatatgtgatcaccctctgtgggccttctaattccaagggaataagaaaactctgtgttgtgtccggggacaccccaccccgggtctgagaaggagaaaatctggctgttgtggtgtgccccactcttcttatattcctataaagacccatgtcatggagcacaacaatcttttgtcttccaaccacatgttctcttccagggtcttaaacacctatagggctgagatttctcttcttcacaacgccatctttgtaatctgagaactcagtggcccatgagaatagattttccctctggccacctctgagattgtgggcagaaaattgtccccacaacagatagtgggggtgtcgctctggggcttaaaagaaagtcctggtctggagattgtggtgtctctcccccacaagagatataacatcttggcgggctctggtttttcaccccacagtgtgtatacagcgcccctctccccacagagacccatgtgtgcgcacacacaaacgggggctccctgaggagtgttcactttgtgttgctctctcacacccacaggccccccaggggagacaaacaactggtgcccgggcgctctatccacaggggtacacaaatggggagagcgggcgcccgcgcctccacagggggtggtgctcctacacaaaaagggcggcccccgagagaaagagaacacttttccagtggggcccacagagannnnnnnnnaaaacaccccctatttttgggcgctacagacagccgcgcgcttttaaggaatgacgacttcctcccgggcccacaacaaaagggggccgcgggcgcatgatgacaacacgacgcagccacccggcagctgtgagatgtggcgcgcaaccaaaaaaggggcgttgcccccaccacactgagtgtgtgcgacccaatgtgggttcacgagggaaaaacctcgttgtaagagggcgcccgagtgaagggaagaaccacaccttagctccttggtggcagaaaacacccaccaacaagcaccctggtgttctgtgcaaccaccaacacacacacccggggtagaaacccagataccccgggggaaataaaattccgcgggagacgcggggatacccccagcgccgaggcttcttctcgggtgctacacacacacacgttggtttccatattcaaggttgtcgccacccataaaaatatagcggccataagaggagcccaacaagccggtgtcgccccgtggttgtatacaacaacagtggttttcacatcgcggcccgcgggcggacctactaggggctaaaaaactaccggggaagacggatgaaaactggcgaccgccgcggaggtgatcactcctaagagggagagggccccagcacacacaggcggtgatanatgagggctacacccagagcgccaaatcgacggggtccaaaaaccagcagagctggtgtattact

SEQ ID NO: 414853 - DNA, 1073 bp, Homo Sapiens
  misc_feature (41)..(51): n is a, c, g, or t
  misc_feature (501)..(501): n is a, c, g, or t
  misc_feature (685)..(685): n is a, c, g, or t
  misc_feature (941)..(950): n is a, c, g, or t
ttcaccacgcacccttaaggggggtcacaaaggccaccaannnnnnnnnnncgcccagggagggcactaagtttgggctgcccgccagccccagtttgcgctcgcctcccaggggttgccctgggaacactgaggtgtcaggaagtcttgggtcatcctcgcttggttcctctccaggggcgggacactcccttgtgtgctagggaggggtggtggtttccaagggcacgaaggaaggcgctctgacggtcttcacaccgcctggctctgtagcccttctgatgttttgcccccagttgtgtgggggccctctcttgtggcacgaattgccctgtctattactcctctgtgtggagatgtcctacaaccctctcctcggttgtggggggggcacaacaagtggctctcacaaggatcactcccctgtggtcgcacacacgccgccgggtggttgaaacccgccaagagttttccctccgggactctcacactcaacaaagnaggcttctgtgtggggccccaccacaagctggtgtttagcacgctccgtgtctcttccacaacgaacaaggagctgctgcgctaaccaaacgggagcagtttagaggaccaggtgacacacccctgtgtgggagtcatattcctgctgggagacccaacaatatgtgggcggaggagccaccanatggtggggcgggaggcgcgctacaccacaccacaatgtaccccaaggacccaacaaaagagggaaatagggacaaatgagtgtggtacaccacgctctcagtggtgaacacacacatatcgtccatccctactggagagggtcatgtggtgtgatcgccccacaaagtaataacatttgttagaaccccgccgcttcaccctttgggtggatcctctactcctaaccaaagagatggtgctttcgacgagggaannnnnnnnnntctgttggttttgtggttggtctgcttatctacaccaacgcgaggcagaacacccaacaaaacaaacggccgccttctcttttggatgcaaatctagggaaacaaaaactccgttttttttgt

SEQ ID NO: 414854 - DNA, 957 bp, Homo Sapiens
  misc_feature (43)..(54): n is a, c, g, or t
gtgtatgtggatggggggtggatatattttttttctccccacnnnnnnnnnnnntcccccgctggggagagggaaagtgaggtggaatggggtgtgaaatggcggcgggcgcgacgaagagaggggcgcctgtccgtcagacgagggaccatcacaaaaatctcggggaggaagcactcgtgacgcgactcggagtaaaacacaccaggagtggggtgcacagacaaagacgagtggtgcgagaaacagggtggtgaagaagaaacaaactgtatgccggagaacgccgcccccccttaaataatctattataagaaagaatacagcaaaaggagttgagaagaaaacacttgcaggactcaccaggcgtgggggagaggagaaccaaagaagtgcgggggtgggtggaggcgagagtggtcacaacaagaaacactctcctgaggagaaatcggtggtgggagacagccatggagtgactcccacctaggtgaggccgactcgacgaagggggaggaggaaccgcacgacacagattgggctggacacaaacaacagggctcgtctccacacagggcgtgcgagaggaagacaatcccatgcaatcggagaaagccaacaaagcgctccacgccggtggagagccccccgaccaaaagagtctgaacccacacatcttgtgtgaggacgagagagggcacgccgtctagaaaaaaagccatgcaacaaagcagtgcggtcggtggcgtcggagaatacaacaagaccatcttccacagccgccccaacggacacctaccacgaaagcgagtagcacaaccagccgccccccctctgtgtggggagattacgacacacccacgaacaaaaaaagaaagtctgactgcgacgaaaagcacaccagacaaaacggggttggatagagaccaacacccgcgcacatggaggggtgagtgt

SEQ ID NO: 414855 - DNA, 1111 bp, Homo Sapiens
tttttgggagaacttcggggtgatcaaggttggggaagaagaaggagagggaggaaacagcggagcctaggtctccgaggcctctccgagaaaaagatcctcacgccgtgaaagaaccctctggggggcacacgaaaagccgaggtaaagccccccccaaagcccagacttcgcgttgtgaggaaaaagtggcaaagcatccagggtggttgcagagggcgcccaacaaagggttttgtgacggcggcgacagtggcgccaggaggggggtggctccaaccagaggaaggtatatatctgggcgcaccggggccttatcttgagggcgggggattgtcccccgtggttttctctgtgtggggagacaacacgcctcctacaaaaatgatgtatttgaaaacatcttcttccgtgggaaaatatttctctccgttccccacagatgtctcacacatagagtgggttgcgttgggcaccaactattttccccagagcagggtgtttgaaccccacattgtatcttgcgtggtgttgcgcctcgaaaccacacacagcaggtgttgtgagacacaccccggttctacactatatgaaaaggttgcgccccatgtgtggtttttaaccctctctctcacaatcacaaccccagtcgtggtgtgtgtggcccagcgggacaaatataactctgttccaacaatgtagtcaactatgggcgcaatcacgggtagagaaaccgtgggcggccccaccaccacgctgtacgtcctgcgcccacaaatattagtgtaaccgccggcgggatccaccctcgagagggggagccctaacaaccgcgccacacaacgcgctgggtgtggtgtggctacttctgtggcgggatacaaacaaaccccacaataaggagggcggctccacaacaattttgtggcggggcccacatacatattgaagggcgcgccccctcctactggacatattcagcgggacagcagaaattagtgccgccagagaaaaattatataaacacaccaaagggcggttcctaggaataattaggacggcggtgagaaaaatgcgccccccccgtggtggccacgccaagaaaaacaat

SEQ ID NO: 414856 - DNA, 1116 bp, Homo Sapiens
  misc_feature (89)..(97): n is a, c, g, or t
  misc_feature (600)..(611): n is a, c, g, or t
attaaaaataaccaacaagagaaatttttataacacaaatttttgggcctcaaacctgcccccaataaataaatcggaaaaagtggagnnnnnnnnnccggggtgctcataacaaaaagaggacaaaaaccaacgcgctggtaggcgtcagcagaataataccaacagacactctccgaggggacgcatttcccccacactatgcaagagggcgcacaacagcgaggcgcgcggggggaactccacagggggaggcgtccaacacgagacataattgtgggaggggggaacactccccaaaatcgggggggcccaacataaaagggggtgcacgcgccctctataagccaccacggggtgcgcacagaatattgccccagcgcccatcttatgtggaggacaactccacaaagagacagaaaatctagacagagttcgggcgcaaagagagagacacaccacaccagctcgagaagagagggcatctcctctaaaagcgggaacaaacaacagcggggactccaacggaagagcgagaaaccatcactgccgcggagaaagaaactgtccagcacaaaaaaactgtctgtggggggacgnnnnnnnnnnnntaacttcttagtcaacaccagaagtgaggcgacacgaagagaactccctcgcgctaaacagacaccccaccaacaaagtgtgtgaagcaccccgcaggagggcaagagagagtcgtaaggggtgcaagaaccaggcgacgcaccacacgtcaagcaagaggaggtagcatgcggacacccccacgaatcttcacacccaaccagaccagcgagagcactactccacccgcgtgtacgaagagaagacaaaacaaaaacaccgggcggcgagacaaaacccgccgtctgcgaggtcaaaaaacaacgctacgactgcagtggcacacaccatgtggagcggggcgcccaccgcatacaacaaacgcgcctcagcatccatcagaaaaaaacagaatcgacaggagcgcgcagcggccgcgcgccacaccactctcaacaaatatgggaaccaccgccgggagactaaataaaacgagaaggtgatgacacacagacaaaaaacacg

SEQ ID NO: 414857 - DNA, 1105 bp, Homo Sapiens
  misc_feature (57)..(67): n is a, c, g, or t
gggggggaagttttatctacaacaggagaaaaaaatatttttctccccaatttaaannnnnnnnnnnagcccaccctctcaccaaccaaaactccccccctaaaagggacattgtggtggctcccccgccccccgccctcgtgcgttttttggtggtggcccccgggttggccaacacccctcctcggtggtggagattatttttgtgaggaatctccctcttttgtttgtgatgtctctgcaggggtgtgtccacctcctctcgcaacttatttgtgacagagatgtgttgccgtctttgctggggccgttatcaagcgtgttgttggtggggggcggacaacaaatctcgcgcgggggggcaaacataaggagcttgttcaactacccgggaaataccttgggggagacacacctctctatgggtggaggaggtgtcccaccctacaaacaacatgatttgttccaccgaccaggacaatgatgtgtgttcctctctttataagtataaagctcctcgccggattttttgagaaacaaccgtgtgttggtgggggctcctatcacagaaaccacgaataagaggggggtggtgcggcccaacctatttgtggttgggtgtgacacacaaccacactgccgggggtgtataaaccgaacgtactggtggaaaaccaaccttttctcattgtgttgtggcaccccaatcagttgctcactcccctctcattataaaaaagaggagggggggactcacataaagagtggggcacaccacagcgggcgatacttcctagatagagggccagtcaacacaacatacttctactgtagtggggaggacaggtgaggcaggggctatcgccgggcaataaaactcacccgcgcgggtgaataatcagctcggacagatcgtgagccaccccaccagcagcacttgattctttcttgagtgagcaccaaacacaggtatggtcttcacaatagggtctggcgcccccccaactaaaaggggcggcccgatcaggtggaccacaaacaacgcagataccacccagtgtgtgaccacaattgttatctaccgtccccccccgcgggactctaa

SEQ ID NO: 414858 - DNA, 612 bp, Homo Sapiens
  misc_feature (179)..(188): n is a, c, g, or t
ttttatgggggaacccgcggcccctttaaaaccccttgttaccagggcccaaggggggtggtgaaaaaaactctcaaaaaacatctgcggagaagttgtttcctcccattaagtaagacggggggtaaacaggggggtagtattactcttagggggtgccacccacagattccattgannnnnnnnnnttccaaccactgctttaacgtcctgtgtgtatcgactgcgtaaaccagtgggagcaatatgtaggtacatccatacaacatcagaaaattataatttgggcccaaaagatgagggtggtcttttctttatatgtaggaagaaacttctctttaagatggggggaaatcttttttagaaaaaatctttttgtttagaggcgaaaatataaattttgcttattagggggggcttttaaataaaaatgtgtaccaaccacgggtgtgggcggacatcttgaaaaaaacaactctctagaaaaatcctcttcggggcaaagttttccccaacagggggacaaccgcgggaacaagagtgttgttccaccggggggtatagtggtccacacagaagaggacccaccagggtgtaagggaacaacctacg

SEQ ID NO: 414859 - DNA, 1173 bp, Homo Sapiens
  misc_feature (431)..(503): n is a, c, g, or t
  misc_feature (550)..(550): n is a, c, g, or t
  misc_feature (952)..(1013): n is a, c, g, or t
attctctatcaataatgatatatgtaccaaaaataaaagtgcactgacccgtcattctaagagaaaaaaaggatacaggcacgcaacgtcttcatgaccgcatcacgtcagacggccgacgactgccacacgcagcacagcacaccaaaagagaaagaacgaacaggaaaccagcccacgagagcaaccacaccacattaggactgcaacaccacgcgacacctcgacgacgacgtcatgcagaatccccacacgcaacccacaagaagaacaccgcgagccaaacagaggcgtgggaagctcacgaacaacgcacgccagtcacaacaggcgccgcctcacctgcgtacggaccacgcccgcgtgaggcacacaccaacaacaagccgagaaaccaccaacgtaacagcgcacccaggcacgactcctgnnnnnnnnnnnnnnnnnnnnnnnnnnnnnnnnnnnnnnnnnnnnnnnnnnnnnnnnnnnnnnnnnnnnnnnnncaaaccagaccgcaccgcccccacagagcccgacagcgaccacaganacaacaacacacggaccgagccacacaacaaacacccaggagagacaacatctgaccgaccgcacgcaacacaaacaacaggcaacacaaggaacgcaagaaacccacacaatatagtgggaacaagcacgacccacccacccagcaacacagcaaagagcccgaccaaccaaacaaaggcagacagaggccaccccagagaggaaacgaacaggaagatacaacaatcagaggcaatcgagtccacacccaacacctctaccagacagagagcagcccccaccacaacaacacgcgcgcgcccaaaccccgccgaacatgcacagagaacactaaccacaacgatacactacacatgaaagcaggaacgagaccaccatctcacccccacgaggagacatnnnnnnnnnnnnnnnnnnnnnnnnnnnnnnnnnnnnnnnnnnnnnnnnnnnnnnnnnnnnnngccacagcgagacgacagacaaaggccccatccaccaccacaaacataccggcacacacaccccacccacgagacgaccacgaacgacccccctcaacgcgacaacatacaacaccacccccacaccatagaaaacacaaagagagaccaaacaaccaac

SEQ ID NO: 414860 - DNA, 768 bp, Homo Sapiens
caccaaagaaaaaaacttttaaaggggaaaactttgggcccaggaagagaggattccccaaattctttcagaacggtttgttaacccccaaaaattggggggggaatcattggggcgccctttgggactccattccccctgggtgtataacaagtggttgggggaagtcgtggtgctcagcggtgctgtggcgcccattctatgacatcttcccagtaagaataggtgcttcatcaagttgtgggaagaaggtgtttttttgggccgaaaagaaaatctcggaggagcggctcgtgggattcacccgttgagacccccccatgataatatctgcaagatccggggtgagtaaaaaggcgcctgcgcccagggggaagggcagaatagaggggcccaaaatcgtgtggaaacgaagggccagaaagaaacccttcttaacgcacgaagagacaacacttcctgtataaacacgagggggtgccaacggggcgcaggtgggtgctcaaccacagcgggaagaatccacggcagaaaaacgactgtggggacagatgcgccatccggagggagggcgcacctctttctagatgaagagcgccctcaccgaggagagaagaaaaggggagtacaccccccgggggagtgcaacaatggaggcgcgagacgcgagggccacgaaagaacaagaaaacaccggcgaggagcgttggaagaagaaggggaagagggaagaaaaagcacaaggcagcagagcggcagaaccaaaaa

SEQ ID NO: 414861 - DNA, 722 bp, Homo Sapiens
  misc_feature (397)..(405): n is a, c, g, or t
taagagggtgggaactaaccctcgggtgtagaaaatacctctgggaaaaaaagccaggtgggacttccctcaccgaggtatgttttactctgcagggcaatcttacgaaccgctctctctagaagacaccctgagagaggaagcgtgcgtgaaacgacgcgctgtacctcatgttcaccgtggggagtacccaccactttgttggtgttcacccccgtgcacataaggtccaaacattcgtgctattaacaaccgcacgccggtgcccccacaaggctaccataccacgaaaacaaatcacacaaagaaggggacccagactggtcaacaccccttataaacaacacagcgggggagagcacaccacaagcgggccaatttcacaggcggaaggcgnnnnnnnnntgaaccgcgagtctacgggcaccacaacgggggcgcggtccttgggggcacagtacaacacacgcaggggtgaaaaaaacccgcaccacacgcggcgcgcaaacataagggtacggtgaaaaaatcacccaaaaaaccatgtaccaacaaccaaacgccccgccgatacggggacactcctacacccgaggggggtcgctgccaacaggggggccccacccaagttcttctgacaaggcccagacacgtcggtgcggggagcccccgccccccagctccaccccgccgggtccaaccagaaagcgcgaaacaaccag

SEQ ID NO: 414862 - DNA, 1202 bp, Homo Sapiens
  misc_feature (854)..(863): n is a, c, g, or t
  misc_feature (1086)..(1094): n is a, c, g, or t
aaaaaactatcttttttttaaaaccaaagttctcttaaaccaaaaattccacaatttccggtacttttgagaaagccttataaaaaagggatcctgggttacaaaatttgggcgccacaaggggctgaaaattatttctagtgacagcaagtatttttcaaaagtcgactcctttatttggaaagcctaaagaatttccgttattaggggctataaaaaataccaccaagcgtaacacttttaaatccgggggaagatatcacataatgagaattaccacgaggagcctacaccttcttattgaattgttctaaaaccactctttaaaccatctcagaggggtcgtggggggaaaacaatgccggggttggtccttcacacacgaggttacactatacaagagttttccaaagtggcccttttgtggtgacaaggccccaaatcttttgtcctttcctaccccgtggcctaaaaagtggggtcttttccagaagagttttctgggcgcggagtggtatctcccatgtgggagtgaggcgcctctctacaatgttgtggccggggattacactgtgtgagacaacatatttccatattgtctctataccgccttgaaacaaaatacgttcgcgggtacaatctctctcaattaattgtctttatcggtgacgccgggggatatcccccacatttttggagcctcccaattttctgtcctcaaatttataaacatccccgctgtggtgaagtttggcgagtgtgcttcatatattctccgggccagccgttcaaacactctgtggaaaaatatgtgctgtgtccttataaaccctgctgtagaaagatcccccttnnnnnnnnnntgtttcaaccccctttgttgacccctcaagattcttccactgggggtaatccctttccgcgggagattaacactcccaggggggtgggaaccataaggttcgccgaatttcctcaagtcctcaccgggcgtaggaagccatcataaaggtgggccaaaaaaattgttcttcacccacattcttcgtccactgcagaaagtgctctattttctggcacccacannnnnnnnnctgggaagccacatttcgctcactagcggggagacataccattgggtctttcaacaccagcccgctctcacaatacttttccatgttgtcggttccaagagcaaaatc

SEQ ID NO: 414863 - DNA, 667 bp, Homo Sapiens
gaggctgaaaaaagatggggcacctcgagaaagtgtttcccctttttcgatcctacttatgaagaagataagcccacccccccacccttagtggtgagtacgggccaataatcgttgcagcagcaaataatactagtgtgaccgccggtggcgggtaataatatagtgatctaaattggttaagcacatcggcggggaacttcttgtgctgcacaacaacctcctggctggtgataacatcacctaaaaaaacacatggggcggcatcccaccacagccaacaaacaacaccaaactggtgattaatacactggcacgcgggcctctcgcccatcaaaacctcctgcgtgtagaagcgtacgacagatatcctccaacacccacgccgcggcgaagcacttacgcgacgctcggtggcaacacatacagtggacgaaaaataccacacgcccgccaacaaatgtctgtgcccgatcagtgtgtattacatacaagaaagggtgtataatgtttacgataagatgtatactactctgggggcctcgctctctcttaatgatggtgtatttctacctctccgacgcgcccccacaacctaaacaacacaaaccccgaccacccgaaaacgcacgaaaaaactacctacaaacacaacaacactaacaac

SEQ ID NO: 414864 - DNA, 1197 bp, Homo Sapiens
  misc_feature (45)..(57): n is a, c, g, or t
  misc_feature (390)..(390): n is a, c, g, or t
  misc_feature (783)..(783): n is a, c, g, or t
  misc_feature (1140)..(1148): n is a, c, g, or t
attatggggggggctttgatttgtccacaaaacaaagctcgatannnnnnnnnnnnngaggaatggggccacagaaaaagtgtgcccaaaacaagggcaaacaagtccaacacattagaaaatttaaaatacaaacaataaagtatctctccatccctgatatcaaattcctctagcgtggcgcaatattcacagttgaggaaaagatacccctgtttcatcactcgaaactacgtgttaaaaactaaactgtggtgtcgaacgagaccgcacgcagtgtgtgtgggtgaggcatgagtggcctgtgagcagcccccaggttcttacgagaggaacaccatgagaggtgtggcgagacagagatgcgagactctctctttttagaacacncccgagagagtagtgtctgtgagacacacccccagcgtcgtggcgtgcgacacacaaggaagaaaaaactctctcgtgtgtgctttttgaaaaacacccaaccacgcgttcatctttgtgtgagggagactcccctcgtgtgtgtacgacaccacagctatcatgtgatttcacacggggggtgtggagtgaccccccctaaaaatttgtgtgtgctcggcgtgggaaaatctccccacaaaatttatttctctctaatatagtggagaacagaggagaccacaactctcgttgtggaaacagacagagtcctcctctcgtggggggtatataaagcacccccctctgtctctctaaaaacaagaagcacccctctgtgtatgttagcacccncagaggagtggttctccccacacaataattcgccgctcttctatgacaccaaaactatactgtgaagggaggactcccctgtgggtgtggtgccacaaaagagcaggtcgtcctaacaaacacaacctctcgtgggtcgtgcgtggcaaacaagacccatcagaaaatatcacacgccaacgtggggggtcgataacactccccaccagaagagggcgccccccgaagagacgccacatccacaaaagaacgcaccacccaccttgcatgacggcggacttacaacacccgcaggggggagaatacccccctccccggggggggaagaacatacacgtgcgcgcaaccaacttagannnnnnnnnacaccactcaccagggcgaccaacaaagagacgcagacaaacacacttc

SEQ ID NO: 414865 - DNA, 783 bp, Homo Sapiens
aaaatataacatagacattcccccccctttggagttaataaatatatctggctttttataacatttccacacattgaatttctcagtcttctttaaaacacattaaaatctatatgtagccctaaggatgcagagttctagaccaataagcgcatttaatttacttaagtctgagccctatagatgtttagaacgaaacactttcatctctattctattcatttatagcgtagtgcaaggaagagagcaaaatggctttactgaacagcctgggccaagatctcagctggataaaggaagagtgcttgtccacggacagtacaaaagtcacaagtgctgggaatggtacatcaagacacaaacaagaccttaggttaaaagcagaagtagacaaagtccctcgtgaacagccaacgatcaagcccgagagcagagagatacagagcaggtaagattgagatgacgaaaaacgtagacactaggccactgtctcgtccacgtaagacgcttccttggacaggaacaaggacgcttacagtcggcaggcgaggagaaagtattaacaacgcgtgcttaaagatgagcacattggtcctaagtcaaggcaagactggcgcgagtctcagtcgagtatctagacagcaaggagggagacaataacgagttctagcagacgcgtcgcgcagcatatcggtctaggaaaagctgtggtccatccggggggtagatccggatggatagggaatggcgagagtgtttcagtgtcgttgacgttgtcgtgtg

SEQ ID NO: 414866 - DNA, 973 bp, Homo Sapiens
tagtgtctttaagactttgaactaagtgtttttaaactaatattaactttaatcttccatacacctttcagaaatttactatttgtattgttgttttgtagtattttgtaacacacaagtttgtacatgatatatagtattttctgttcaattccatctcttcatattttatgctctaaaaatgtcttcttagctcatatatgcccgtctacatttactgtctagttcttttatgtagatactatactagatattaattgcgctcacccatttgatacatggtaattgtttattcatgatgtggacatgaagtaaatcattctgattttctaaactgtttaccatttataacttggctaccatagtacaatttactgtataataggttctgatacgtatatacggctttacgttagataatgtcccagggtaagtaattgtatctgacaagtcaggcgatagagctgtgaatggaatcttggtctgtttaacagtagttgcaaggtatgtgacgcaatttgtccctataggttttggcttatacaagtgtggagtaaacgtttcccaggataacgaaatggtcaagcgaaacgaggcggaaaagaaaaagagagagtgcaaaaggagcaacccaagatgcacgtgtcctcgtaaggatgggattgcaggtgcgtgttatactatattcccctgtgaggaacacattagcagggaaagtggcggtttcgtgaacggagtagaaaaaccgtgtgacgtgggaagagggaaggtacaaggttggcgggcaaagcgttgttagcggtgaagtgagaacaattaaagcgtggtcggtatgtagagtactgtgtagcaagaaggatttatgaacgacggcggtagtacaggtgcgtgtggttgtaccgcagttggtaggcagggaattggggttgaaagcacacttggaaggaggtatcggggggaaggggttaagcgg

SEQ ID NO: 414867 - DNA, 426 bp, Homo Sapiens
gcaaagctcctacctcagcattaaggcagccacaaactggccttacctcaagatagttattggcccctaaacctcatccacaagcattcattttgctactaattatttgcacttttatcctctagactatgcctttgcatgtactattcacatgtttagatcacactttatttttcttaagtatttaagtattccagtgaaaggaatccttgtcccacctttcccggccatagttaatagcttcctccattgtactctcatagtatgttgactgtgacataattatagaacatactcgcctctattgtgattttacattctgatttttaccattggacccacagagttcctttggggcagtaacttactcatatttgtcactgatgccttagcttatggctgagcaactttggattttggtgaatg

SEQ ID NO: 414868 - DNA, 265 bp, Homo Sapiens
ctgaagggaatcacggaagttctttatgtattcgataggaaattatccaccaaagatatactgttcaatgacaaacaatgcaaggaacagaacactatatatagtatgttagtcatttatgtacacacaaggggtaaaaccttatataggtatttgcctgtaaatgcatacactgtatctggaaggatgcctaagaattaagtgacaatagttggttgtcaaaacgaggaactagggtggaatggaacaattaccacaggtacat

SEQ ID NO: 414869 - DNA, 659 bp, Homo Sapiens
ggatggccttgtccagtgtgatcatgtccccccagctgcgctgtcaaacgccgaggacttcggctgggtcctgacctctttatgcacagatcgccgcttatgagcctggctgggtgttgaattttacaacgaacattccattcccgtgcctggatctctaaggaggcgaacatgctgtgcgatgcgggcgtcacgggacagcgagagaggaactgggctgagaacttgagcatggtggtctcagaggacaaacagacgagctcaattgcttgacattatcgtcgaacagaacactagggcacggccaataggcctcaggttattccgtcattttgctaagcgacggacggacgaaacagtgccccggcgtgtttgacacaagatttgtcttcgatgcaccagactggcctaatcctggacaactaggaggttaagccgtgcaaaaacggcacggggttggggcttttgatgccagacatcccaggaatgttcccaagccccttgattcatgggtggcacattggggggccccgccgattcgattggcgcccctgaaatggtggcgtgccagttcaagtgggtaagcaccctaaatatcgggaggcaaacccagcgaactttcgtgttgcccacaacttgcgaaacatctcttgagaact

SEQ ID NO: 414870 - DNA, 1257 bp, Homo Sapiens
aaaatgccttctccagtgcctgcgaagggcctcgtagagaattggtgcccacctgtctacatcctctcctcagtggagggtccagggctgaaaccagcttccacattatacgcccaaacgaagagtggggtgtcgtttctggaatggagagacgctgacttcgatgcattcttcaagattgactctcgtaccccagctgcatgcttctagtggctgagcgtgggttgtgcgacaaagccacaggggcacttgcatagcagggcgaggtagaatggagatccgggcatatggtgaggacaggagagaaggggacagggcatcacaagctgcaggtgcaatgggggcctccaaaaggcagactcgctcttcccctctcatccgcgctcaaattgctgctgaagttgaggagtcacgactgaggcattataactgacacatcgccacatccattaactctagaaccccggatttggtggggaggagcgtgggaagctgctgccgagctactggaagggcctcagattagccgagtcaatgctgtgatgtgtgtgtctgaacacacactggctcgcttggtataccgggggctcctctaccagatgggtgtgagtgcaatggtcctactgtacacacagtgtctcagtagtctatattgtgtctcatttgttcccagtgggtctctgtgtttggataccatcagcatggagatcccgtgctgcatacagcaggaactccgggatcctgcatggtgtatgtcccgtgatgtgtaaccgatgggcatcccagcagatgtgagaatatgttgcgaggcccttgcgcggcatccctggtaccataccagcaaggtactgacacattcgagggcctggcttgatccaaggggtcacgtgtccaagaaggtaggtgtgctgagccctccagcgcggaaggccccacaagattaggaagccggaacacatgtaagcaaacacggggtgatgaaggtaacaggggtgcctcgaagaccagagtatcggggaaagcgcaaggtagcacagggtgagtatggggagaagccccccagcaggagacacaccggacaaacacattgttgtgtgtgacgcccaccactacagagtgtgatgtaccaacacagagcgacccagtgtgcaaacgcgactgacccccaggagagaaaaccacactatatggtggagtagccgccaccaccaagagtggagagtgcagcgcacaagaaggtgaccacgaagccaaccg

SEQ ID NO: 414871 - DNA, 1230 bp, Homo Sapiens
cttagcgcatttacactcccgccgtgggcgtatcaccactgttagctgctaaggcaaggttctaccccgtctaagagctagtcacaaaacgatgaagagcccactcaaagggctgggtaactgtgctgcatagaacgcagatgcccctaatctctggatctcccaagaatctggtcttgcctattcttcgaacatcagaagaggggattagggcttttaagtatccctctcccacgattccgtctcattcttgactcagaaaactgtacgagtggcaatacgctatgtcctcttcaaggagagtttaactgcacatagacaatgggaacattgaccagggaggaggaaaggacttggatgtgctaagacgtgactctcacagagatccatcaaaccaggagttagtctatatcaagaccgtgtagactgaaggttcatatggaggctgtgtacctctgtactgaaccaggccacccaaaagcggagaggagatggtggaggatcctgcctgaggaggaagtgccccacacggtgggtccccatctgggatttcacggacaagctctgctggctgtctggctcgtgcgtacggaaaggtgaaggtgcttccttgtccttgggcatgctgaaaagccatgagacacgactcagcaaccatggagacattctctgagactgctccacgggccgaagcgatggagaagaagccctacgtcaactagcgcagattgttaaccgcaggtaattccacaaagaagctgttggcacgcactaaacggataaatcagcacggaagcacggcgacaatgcaagtaggagatgggttgagagtaataatgctcgcatggtgctaaaaagatgtcacagcaaacacgcgtaaggggctggttactggaggggaaaccccacaatgatatcaaagcaccacagggagagacagtaaaagatggaaaggaaaacacggaagggggatacagaaaacgcggaaaaagcaacgcacaaaaaggactggagcggacagaagcggagagaccgggggagaacagcagcgcccgcaaaggggagcgcgacacagacgagaggaggaaagggaaccaggagcggcccaccagagaaaaacagggctgaacggcgccaccgtggacacaaagggagcgccaccgggggacgaagagacaccctcaaaaagcacagaaaacgggagcacgaaaaagaacaagggcaacagaa

SEQ ID NO: 414872 - DNA, 1091 bp, Homo Sapiens
  misc_feature (575)..(575): n is a, c, g, or t
aagttgattgtgtgcataaacaatggctgaaaatattggacgtttcttggcataagaagaacggggagtgactttatatttactgacagtaatattcatcatttgtctttggatttgtgtattatgtgtatgaatgttgaaaaaaatgcatcaaatgatataactttctggtgtttgctttgatagttatccttggctaccagaacaagcttcggcacatgttgtctcgtataacacacctggtcaaatttgtgcctaggaactgatctgtacattcgtactattcactttgacatcgatactgtacagagttctcacattacatagctaacggcatcagcatacgatgtggacttattatactcgtattcaagaggtggtagtgacggtttaggagagttaatagtgcccattgtatccatgaataaccataatctcaatggacaagccatttgattagtaaagaaccgcgagtatttctaggtaattcacattcgagtgactgtgccggtctgcttgaatagagttccgggtcgctaggcttaagatgaccatattcactagtcagtaacctntgccagtgtaacgataatacgccagggttgataacctcgtatgatattagtgatgtaagaactcatcataagaaagaactctattactctggcgacatcaagctacctatgttgaactgaaatgtacattgcaaggtctttggacaatagtgggaaaattcttccaaccttttaagcactgatagtgagttcccccttaggtaaagacgtttgcgaatgagtaggcatgaagaagagtaacctctatgaacctgataggttaagcaaaattataacgagaataacttcggatcaatatctggccgtattgaaggaacctaagaagcttcaggtattcaccggtctggcgagcccattcatagtgaggacaaattaataaggttcgtcaaccacatgtggattccttcggtgagtggcccatttaaatcttaaatgcatcgtttaaaccacggaaagtttggtagtgggtacacatcgaaccttaggtggtaagaacgactacttttgagaaaaatg

SEQ ID NO: 414873 - DNA, 755 bp, Homo Sapiens
aaaagtagtaattccaccttagggtttaatcattggatcaaatgcttgtaaacatgtgcaagggaaggaggtcagagcccgatgcaatctttcaactaaagctgtcacaacaactttttttgcttcacgtaatttgcgcatgtgctactaatagaggttacacacataggactatttatatactcagaaaaattctgaatgatgtcttctaacctaatgtgagaactggcagcaatagggaaagtacaaagctatgggacacggacactttgatccatcaattacagaacattcatttaaacactccaaggattaagagaggtagcaatttaacatcaccttcataatcaagggccaggtaactgtctatgatttaaagcctttcaaggtacatgtgaagaaatgaaaacagcctaagcacgagaaaggcagatacccaaatttggacatgcccatcattgctattatacaaaagtgaatggtttctatgtttcccttaatacagtagcaatttaacatgaccttcataatcaagagcattctattttatactattattacaaatgataatactattaccagttgctttcaatttccccctagttcataaaatacatggatttgtaacaagctttcatcaaatgcctttgtcttggcatctgaattccagtatagcagataacatgggcccccatctcaaaccgacccaaaactcttaccaagtattctagagtgctatataacaaactatgatc

SEQ ID NO: 414874 - DNA, 798 bp, Homo Sapiens
aatgcaggcataaccatggagttaaatcatcgaacttcgtagttcctcagcttcaaatccaaagctgcaagggagaggagagacccagacgcctcaggggaccaggcagataatagcaatataaatgaagacaggccgaggtgaacagagtacaagtcttgccaagatagaagaagaggcccatacttacgtttcaattgatatagtcctacttctgaaaaggcagatcagaattgccacacattctgaccaagtcgagatgaggccagaacattctaattttcatgctgagagagccgtcttgaatgttgcgttagaacgggtgagcatcaagtgtttctatgaagagacactagagtgcagcataaattacaagcctgaacagggtgccacccagatgtaatgtcaactacctcacagtcatatggcaaggagaagttgcacactgggcaaatcgtcgcgcacataaagcgtggtaagctacttaaggagcggtgccgaacatcgagcgcgaagaccaacgaggatgtgtgtcaaaactttgtcgacacgagatggaagtggccacctaaagacgctttggaaacaggggagcgacatccgatcccaatgggcgtgtactcacccttaatatagagccaatcgacacgaacccaaggggcgggtgggaccacgcggtccggttcgctaagaaacagcgaagtggtggaagggaaaacccggagggcgtaaaaagccctccgttaaggtgaaggtggtaacacacaaaaaggttaagcaagacggtggcagataaca

SEQ ID NO: 414875 - DNA, 546 bp, Homo Sapiens
caccgttccgatctctctctcctctccatctcgttcctcccccacctgcgcagccaagaagttcaaaccctagtccagcctgcgagcgccgacacgccgcgccgtgcggcttcccgcaagcaggtgctccggcggaccgcgggggatgagcggagcggcctacagggaccggggattcggcggcgccgcggagatggaccggaagcgcatcaaggaggcgctcgagaagcacacggagaggccgtccccgtccacctccaggggggcgtccagggagaaggagctgctcgccgccggcaagataaccactcagatcggcaaggtccccaaggtctccgacgtcgaggaattcgaaactgacagtgaagattctgatgttagtggttctgaaggagaggatacatcttggatttcatggttctgtagcttgcgaggcaatgaattcttctgtgagattgatgatgattatatacaggatgatttcaatctctgtggcctaagcagtcaggtgccatattatgattatgcacttgatctcatcctaga

SEQ ID NO: 414876 - DNA, 535 bp, Homo Sapiens
attccgatccccctcccggcgccgctccagcctagggtttcctcccgccgcccgtcgccccacccgccgccatggcccgccgcagcggaggaggaaggtcttcccgccctgctccacgtgctgctccagtgagaaacccaccagcgccagcccgtccagctcctccacctgctaccacccagagcagcggtggtggtatcatgagcgggattgggtccaccattgctcagggcatggctttcggtactggaagtgccatggcgcacagggctgttgatgctgtgatgggtccccgtaccattcagcatgagactgttgtcggtgaggctgctgcatctatgactccaatggacaatgctgctgatgacaagtgtggcaacccttccaaggccttccaagattgcatcaaccactacggaagcgatatcagcaagtgccagttctaccttgacatgctgaacgagtgccgccgtggaggagcaactctttaagctactatctttgcttgacttggggcttaattgggcagaacctg

SEQ ID NO: 414877 - DNA, 1648 bp, Homo Sapiens
  misc_feature (1177)..(1177): n is a, c, g, or t
ataccacgtttcatttcacaggtagtcggctaaggacatgatctactcccccgtgcagctcggttccctctaccctaataaggtttatggtgcctctcccagaactcgtggtcctggggtaaatgctcgtattgccctggtccagtccccgacaatacgtggtctgagaacatcggagacgcgtgaataaccgcggagcatgattcctccgaacgtcgtgcggagcgtctgctgtcgcgcgttcgctgctttcgtgcttgcgtgtgtggttgctctcctcttgcggctgctcggatggaggagagggtgcggcatagcaacgtggcggtagccggtcccctgtgtcctctggtggctcctcgggtcgcttcctcagtcccgacgcatggactgcagtgcgatcgtggcaggcgatccgtggtgccctgtccccgtgaggcctgcgagagcgggagcaggcggatgccttggtgcgtgcgtctgcgaggagccctggaacggggcggtgcgccactcaggttgctcgccttactcggcgggggcaaatccttggatgcgcgctgcggcaggacttatcggccgaggtacgcgccggcaccgccaactttcttggcaaaagtcgccggttgcgtgccagtatggggcttggggcatttgactgccgggtgcgtcgccatgtattggacgatccccccgtgcgccgtcttcccaatggccccgttttatgtggcgctgtgggcgcgatgcatgggtgggtcctcgcgtacgtcacggagccttgccggacttaggctgccccctcgtttgtggttcactctagataccgcggatgggcccaccgatgccgttgcgccgggaaatttcagggcaggcggagatagatccaaaagtccgccgggggcgtgcacgggaatgcgcgggggggagacgtgtaccccccgtgtgaacacgcatgcgttgccggaacccaattcacagcgttggggaacaccctgcggatcacgacagagtagcaggccatcctgcgtcgagaagaaaaagttccccttgatagagggggacacaatcgaacaagtgggcacacgcacggaaatgggggcgctataaggttccccagacaaaacggcaggcgaaaccccgtcgggtgaacccggggacccggccccaagcgattgtnggctccgcaacaaggaacactgacggagcagcacaggagaacccccatatagcgcagacagacaaaggagtggaaccccccaatatgagagctccattatggaaaaactatggacagggcagaagaataagcttccgccggatagcacagaagatgaaaggcgcgggagacgcacggcaaccacggagccccacaaccggcgtaagcgacaaaaacgaagagagagaagacaaccatcaaacgagagcgagagcagcgacaaaagaaaagcaagagacagcacaagcacagcagacacaatgctataccgcacagacgcaccgcagcacgacgaacgagagaacgacggagaacaaggactgcacgcgactaaacacgagcaacaacgatgccacagcccaagcgagtatcataggatgcaacaatcagcaacgcaaggccagcacatacagcacagaaagagatgacaca

SEQ ID NO: 414878 - DNA, 724 bp, Homo Sapiens
ctctcgactccggccagtcagtctcttcttcttctctagcgagcgagcaagctaggcttggaggtgaccgaaaatgccggtcagcaggatcgccgtggggagccaccgtgaggtgtacgaggtgggcgccctcaaggcggcgctcgccgagttcatctccacgctcatcttcgtcttcgccggccagggctccggcatggccttcagcaagctgagccccgacggcgcggcgaccccggccggcctgatctcggcggcgatagcgcacgccttcgcgctgttcgtggcggtgtccgtgggcgccaacatctccggcgggcacgtgaacccggccgtgaccttcggcgccttcgtgggcggcaacatcaccctcttccgcggactgctctactgggtcgcccagctcctgggactccaccgccgactgcttcctcctccgcttctccaccggcgggccgcccaccggcaccttcgggctgaccggcatcggcgcgtgggaggcggtggtgctggagatcgtgatgaccttcgggctggtgtacacggtgtacgcacacggccgaggaccccaagaagggcagccatgggcaccatcgcgcacatcagccatcaggcattcatcgtgggcgccaacatccatggtcggcaggcgccttctccggagcgtccatgaaaccagccgacatccttcgaacccgaactcgtcagctgggagatgggggga

SEQ ID NO: 414879 - DNA, 1136 bp, Homo Sapiens
  misc_feature (631)..(631): n is a, c, g, or t
ctgatcaccagcacagccgcgcctgtccaccgtgtgctagctatggtctgagcaaggagcacagagtatggctgctgccgttcgtccatcgcaccgtcgcgtgccccgggcttctacgccgaccaacttcctcgggaggaagctcaacgcaatgcagggttgatcccttcggacgtgaatctgacctatgagcattagagctccaatggtcccacacatggttactaccggtgcattgcgcagttctgtgcaaccacacattcgcactgaagcaatgagtgaagcaccgacgaaagttgcgaacgggtctgtgctgttacgcatatcctctcgagcagaccatggcaggatcatcactcaacgagggaaggggcagtctgttggacttccgctctcgttccacgcgcgtcccgacttggacgtatcaggtccctcgcatcgagggccagatccattcaacatcaataccgtagtagcgatcgagcctatggtgaactcaatgaaggtacggacgtgtcggaacataactcacagtgcggagggcattcggtacactctgcttccactgcattctcaagtgagacgaagcatatgctttgatccaattcttcgtccatatgacacgtatcanttgacaccttagccacaacaattcgaaggactcgccaatatcacatctatgagcgtattcatgccgggacgggcaacggtgtcaaagagataaatttctctatctcacgtgtgtgaagccgttgttcctttcgccctacagatggggggcgaatcaagggccaaatctagtgactggagtgccctggaagacgtctttggtcagaaggtgaggcagatcgccctggaggtagcccatggccttgtgctcgagtcaggggcatgcgagtaccccggtgaagggcctggcagtaccgtgattccgggcagggggttcagaattgtggctggcccttcttttcgattcacccggagtccttttgacagcccgagtgacggcgataaggggatggggcggggataccaaccagaaggttaaaaccgtttaaaaaacccagcattggtgaaacgggcaccggtccatgtaactgttgggcgcatgcccggcaccagaggggtttgccccc

SEQ ID NO: 414880 - DNA, 630 bp, Homo Sapiens
ctcgcaagtcacagcatcccccgtctgctatctcttgggagagtgggagcggaggagcgacgcaggccgacgcagcgggcaggcgagactctttgagtttctgtaaaccatggggcagaggctcctattactggtgaccacttgtctgtgggctctttcatgcgccgtgccgcacgatgcgttcctcgcctgagtggactgctaaggatcagacctgaacaagaagagcttgaccctatgaatctctggctgcagcaaaggccgcgaggcagcaaggcgccctccggctgaagagcagcgattcagacagcgacatcgtgcctcttgtcgactatctcaacacccagtactatggggtcatcggcctcggcacgccgccgcagaatttcacggtgatattcgacaccgggagctccaacctgtgggttccctcgtcgaaatgctatttctcgatagcatgctacctccaccccaaatacaagtcgagcaagtcaagcacttacaaagcagatggtgagatttgcaaaatcacatatggttctggtgcaatctctggatttttcagcaatgataatgtgtggctggggaccttgttgtgaaaaatcagaaattcattgagacaacacgtga

SEQ ID NO: 414881 - DNA, 483 bp, Homo Sapiens
gggggggccgccccaaaactctctctcccgaagggcgccaaacgcccccccactttataaacaagggggcccccctcgaataaggagatcgcttcttattaataacaacgacggacgaccgaggggagcagacttgattaaaacatgatgagaggatggatgaacacaaatcgagcatagcatgctgggctctcttgaatagaagaagaccccttcatcttcggatgaagaggaacacacacatagtgagtaaaacaacaatactcctccaaaacagatactattaatatacaaccactcaattcaagtgtgttatactttactaattatctattctaggagaggatgcaatatcgacggtgtgtagataaaccacgtagagatgcaaaataactatgattggcgaggagagagaagaagaaaagtagtatgtagcgtccaggtgagagtatgtatatctatgttatataaagacataatatt

SEQ ID NO: 414882 - DNA, 482 bp, Homo Sapiens
ctagctcatgcctcccctcctgccgcagcccttccctacatctcctctccccatggccaagctgcgccacagacgcggcggggatggttaccgacaccgtgagccacagaagaacgattgagtcctgcagcgccggcttagcgccttcccggccgccggcgtcctcttccacttccaagccatcgaggaggactgatgtggctcttcccatggcggccttgaggttttgattgggtccttgcatcggttttgacggagcctgataggaacgccgggagagaagtagccttggattggagcatcgtgggcatttcatcctgtttgtggtggccacggggcaggccatcgtcgagatccatccctgtgagccgcagttcatctgcgatggggcattggggagaattcgtgctcgatccggctgccaccacacgccatctggtggggaagtagagggggtagccgagcggaggagcgggcgcggg

SEQ ID NO: 414883 - DNA, 786 bp, Homo Sapiens
cactcacactacactcatccactcacaagctaatctagcggcgtgctcacttcagtccagtcggcattgcggctccgaggggcgcggcactggtgctggcgatggtgctcgcggcgatgctggtggcgccgccggcgacggtgcacgccatatcctgctccacggtgtacagcacgctgatgccgtgcctgcagtacgtgcagcagggcgggtcgccggcccggggctgctgcaccggcatccagaacctgctggccgaggccaacaacagccccgaccgccgcaccatctgcggctgcctgaagaacgtcgccaacggcgcctccggcgggccctacatcacccgcgccgccgcgctcccctccaagtgcaacgtcgccctcccctacaagatcagccccagcgtcgactgcaactcgatccactgaacgaactgaagcgccctggcccgtgtgtctgtcgacgtacgtctgccgtgtgaggagtcccatgtctggagaataaattgctgctactagtactgaagcttaggctaggccttggcggccagatccgtgtcgttctacctagtcgttgtgtgtggttaagggtcgatcgagttaattatccgcatgcagttcatggtgttgtggccctgggttgccggtaggttccacgagcagagcagagtggtgaactgatattgtgtgcgtcgtactacgtacgtgtctagtgtaactgtgcgtgctttagtctattaaattatcctcgttaaaacagaatataaccaaactaaacatcaaatta

SEQ ID NO: 414884 - DNA, 506 bp, Homo Sapiens
gcacgaacatacacaaacccaagcacatcagtagatcggcatggcgcacttccaggaggtggactactgctcggaggaggtgagggcggtgggctacccggtccgccgcggctgcggcggcgtgcaggagcacatcgtcaaggagacgttcgtgcaggagttcgacaccgccggccgccgccatggtcaccacggccgtggctccggccacttcgaggtgcgcgagagtaggctggaggaggacatcaacacccgcaccggcgagttccacgagcgcaaggagaacttcgtcgtcagggccgatgactaagcttacacgttacggagcacactacgatgtgtgtatatgtcggcatcatatatatgtatgtgtgatgttgcgcacagtcgtatagcgtatgcaggcgtgcgtgtttggcggctatcagccccgatcgtgcgcgcgtgcagcgcttaaataagcgctgatcgtgaacaagaataaagcttctcgtgataaatattcc

SEQ ID NO: 414885 - DNA, 686 bp, Homo Sapiens
ggtttctcgccaccggcggcgggatgggccgcaactcaccggagcaccgccgtcggtgccctccccgtccccctccgcggcggcatggcccccaggatatggcctcgctgccgatccccgacgagctgctcgctgaaatcttcgttcgcctgcccaccccaaccgacctcgtccgcgcctccgccgcctgcgtctccttccgccgcgtcgtcgccgaccgctccttcctcaggcagttccgcaagctccacgccccgcccctcctcggcttcctcggtccgcataccggcttcgaccccgcggagcggcctcacccctccgcatctgcggccaccgccgtcgccctcgccgccgacttctccttctcgttccttccggcccccgaccccgctcaccgctgggttgtctgggacgtccgcgacggccgggtcctcctccgcggaatgcccctggaaaattctcatggagtcgttttcacagagacggtggtgtgcgaccctttgcaccggaggtacctcatgcttccctcaatccctgacgaccttgcagctagcgtggaggggctacgcccacgttcatgcgagattttccttgttcccgaaggcggcgatgagtcaacaactgctgaagagacgtcattcagagtgatctgggtggggcactatgaagataagctcatcaccgta

SEQ ID NO: 414886 - DNA, 763 bp, Homo Sapiens
cctccatatatccattgatcagctcattcaacttcctcaagtctttactgaaacttcacattctcgatgaggcctattcagtatttcaaactgcctcccagctgcagcattccaaaaccccttactcttctgtgtatttttgaaaggatttattgagatataatttacatagtgtagagtgcacacattaatgtctacaagtcagtggcttttagtatatgcacagataagtggagccatcatcacaatgaattttagagcattttcatcacttcaaaaagaaaccccaccttccctagctgttaacctcctatgcacccatcccctactcaatcctaagcaaccacaaatctgttttctgtctctatagattttcctagtctgttttcatctaaatagaatcatacaataggtggccttttctgcctggcttctttcagttggcataatgctatcaaggttcatgtacgtatggtactttatttctttttataactgtataacattcaatttcttggatataacatttgtttatccaataatatttttattgacatttgagttgtgttcagcctttggctattttaaatactgctgctaaaaatacttgtgtacaatttgtgtttgaacacctctttccaataatctgggtgtatacctaggaataaaatttctgggtcatatgacaattctatgtttcatatatttagaagccatcaaattattttccaaggtggcagttctacccatagagtatctaacg

SEQ ID NO: 414887 - DNA, 691 bp, Homo Sapiens
cttcgcagcgtcggcgtctgtgcgtgggccaaacatcagggcctcgaccagggatacaagggcaaccgctaactagattcctgattcctgatggctggcggcggctgacaccaaaggtaaaaggccttttagggaaagaaaccatttgtgaaaagctcttgggctaaactcgctctgcaaactgggggcgcacgctcgtggccaaactctggcagtgggactatcccggagcacccgatccctggaatcatgttctggaaaccaccgcgacgtgcgcagttctcgggcgtggccctggtatcatcccactgaatcctaggaacgcggtgcggtaggtatcactgtccgcatttcacagaccgaagtccagaatggggaagcgacttgtcttaggcttcctggccacactggggaccgtggtcatggtagcgtccttggacacctgtctccaaggctctgcagaagggggaggtgccgggccctgacggctgatgtccaaggaccagccgggatggaccagacccaggaggccccagtggaggaaaacaggacgaggtttacagtaagatgatcttatactaattcaagggctataatttgttctccacatcgtgtgcctccaactttttcggggaaagggtgttaaaattccgttacagtgtatatacttgtcaaattagaagcagcaacc

SEQ ID NO: 414888 - DNA, 282 bp, Homo Sapiens
cagccacctaccccgtggacgccaaccaagccctcgtggggaccaagccctggggacttcgtccccaactccaggccagtcaagccaccccacaggggccctgcctgtccacccgcagcgtgctggggtggtccatgcttgcggtgatcacggagggtggcacggccctgagggttacatgccgtgctggagtgggcttcccaaaagaatcctcagcctctcccgcctgcggcggcgcagcccaggcggggctcggcccgcagaatcccctcgtggcctcgc

SEQ ID NO: 414889 - DNA, 543 bp, Homo Sapiens
ctccaggaagccaagccgctgcggtgcgctttggctacctgggagggaaaggggaaggaaattctctctaccccccggctttctcttcccttccccccatttgggaaacgagtagaggtattgaaatttaaaggagattttcaaaggccgctgtcgaaggatgctaataggagttggaagacagacgcattaggaagagggaatttcccacggaaagctttgtaatgagctaacgagacgcgttcccccacctcacctttggaggggaggggaaaacagagcttgaattacgcatttaatttcccctgcgctcgttcccaaatgggaaaagctgatgggtctcgataggatcgggatttctggtttcaaggtttaacgttgtgcgcgctcccctgcttgcagaccccgcagctactcccaccgcacatcctctcgccggtcttcgcgtctgcgtctccctcccgctgttggcgcgttgcttcggctgcttttgcaccacaattgtgaagttcagaagttaccacagaatctatgtgatctgca

SEQ ID NO: 414890 - DNA, 192 bp, Homo Sapiens
cagcagtggcgccggacgcggcggcagtgaggggccggtgaggcgctgggtggggcgggggttcccggatttcgcaaatggaaatgcaggactcctggttaagtttccagcgcggagaaacacgcatactttctgagtggtgtcctctgcaatatccgggcagcggagcgcggcaggacgcaccggcgggca

SEQ ID NO: 414891 - DNA, 669 bp, Homo Sapiens
  misc_feature (232)..(280): n is a, c, g, or t
  misc_feature (461)..(500): n is a, c, g, or t
ggacaggttgaggaatgtatttggacactgcctgggtggtactcctgccctttggccaacgcccccacccatgcactagcactcctgttgcagccagcctgctctcctctgcgctccctcctgccctataccaccttctttccttcttattcttctctcctgacccctttcctacacctctctaaaaacaatcattgttttaaaatgtacatacccaatacatgggtttgcnnnnnnnnnnnnnnnnnnnnnnnnnnnnnnnnnnnnnnnnnnnnnnnnntcccgctctacctcccatcctgtaaatcctgctgtcagtaattgggggttctcattccttccctatgttggattctatacatttacaacccccctcaacatagtttttaagtgttctttaaacatcttcaaattgggatcacactatatatgaatagtcatataactattcatacctactnnnnnnnnnnnnnnnnnnnnnnnnnnnnnnnnnnnnnnnnggagaacagagtctggctccatcacccaggctggaggtgcaggggtgcgatctgggctcactgcagccttggcctccggagttcaagcgattctcctggcctcagcctccccagtagctgggaatcctaggcatgcccaccaaggccgggcaaattgaggatcacccgg

SEQ ID NO: 414892 - DNA, 665 bp, Homo Sapiens
cttccaggtcataagtaggtaagagacaaactgttgcattctttcgagaccttgatcggcctcccactgaaacacaatttagtctggctcagggaatctgtatttttatatcaacaatagggcagaggaagccatcagatatggatttgtctcaggggagcagagggatggctttgggtcctgtctgtcatttgtctacgaggaatttccttctgggcaaattttgagggaggtggtggctttttagtctctgtagccatcttattcaggagtggactgggaggcaggtttgcctgagcagtacccagcttgactcttcccttggcttggtaattttggggcctgagatggattttcctttcacagggtgtagcaggcttagtgccagggcccagaagacttttaggcatcaggaaagtggtttaatgccttctaaaatcagaataaacacagtgcagcctgggctatagtcatctttctaccaacgcagttatgaaacatcattcgtaatactttagcccagaggaggggcccacagaggctgtaatgccaggctgcccgctattcccaatggaggctggtcggaggacgtggctcagagtgaaggccaagggggccttccctgaaccccagagtggaggggccacctgcccaaaggcgcagcc

SEQ ID NO: 414893 - DNA, 387 bp, Homo Sapiens
ttactccacccacgcgagggcgcgcccactcctcaatcctacgcgcgacgcccactgccccctcttgtgtttggagagccacgacaggaggcgcacgccccccatgatagtgtagcgtgtcgcgcgcgtctacatcaatcagactaaacagacgaccgaccctgatcagcgctcagcgcgcatctctcatccaccacaaccctagacgactcctacgcctgggttgagtgtctactacgcaagagtcgggcagcccacccgagcgacgcgctctcctcggtcgggagtgaggagggcgcccacccttctactgattcctctcggcggtgtgtcgcctcctccaccaaatcagggtggccgcaccacaccctcccttccctcggcgct

SEQ ID NO: 414894 - DNA, 987 bp, Homo Sapiens
gcctctccctgcatcctgtgaatttgggccttttgtctaatgcaaaaagctatgagcacagacaagagactcatttcaataccagtaaaagcaaacagcacaaagaaggtggcagatgcacagaaccctattcaaatccaaattaaaatggctgtgaattaacaagttggctttatccgcccttctccaaatagggcttataatgagccattaacaggctgaatagtatgagatccattggtgttcctgtctgcatagggtggatcacagcagatacccagaacgtcataggatcaaaatctttccataatcaaagtggaaatgtgaagaattgttcagtcaatcttattcatcctacctttgtaactgtcttcatatatttctcctctttttcattcacatagctactaccctgagctgtagtagcttcctaatttgattgcatgcctttggtctttccttccttccaatccaccctgtcctttattgctattcatctttaaaatgctactttggtcacataaccacccagatcaagaactttaatgattttccaatgcctttaggataatgctccacaactctacagctgtgctaccctacctccccagttttattttcaattattatttcatgcaggctttatgctccagctgaatggatgtattctctgagcctctgagagatacatcatatacttttgtctatgtgccttttttcatacatttctctgcctggaataccccttcccttccctctaagttgtgcttttaagaggagccctcctttcactctagagctcctcctctatgatccttcccgcataccaggatatgatccagctcatccctgcactacggcccttggtccggtatacccttcactgggacagaccatctttctccaggtatctatgcgaatgtgtattggcaatttaagccgaccggatacttaagacagaaccacgcaatcacattgagtcccaag

SEQ ID NO: 414895 - DNA, 129 bp, Homo Sapiens
cggcatccctgtcaagccaagcgcattgaccacgacagacagacacgatgcacggcgggacccagggccaagatccaggataactacaccgaagaaggacatgaagagcgtctccaccgagcaggaggc

SEQ ID NO: 414896 - DNA, 218 bp, Homo Sapiens
ggaaatgctgcctcaacacagcctggaaaagatgaagcgccaggctgtcagtacccatcggttcagtaagcgaggcaatgtccacgcttgcctattcactcgagagatgaatagtttcctgttttcgatggctggggagccagtatgagctcataaaccaaacagcaattttcagagacatctgttcctgatcttcagaataaactcagtgtccagtt

SEQ ID NO: 414897 - DNA, 917 bp, Homo Sapiens
  misc_feature (88)..(132): n is a, c, g, or t
  misc_feature (473)..(473): n is a, c, g, or t
gctggatagagctcatgaaggcagagccctacacagtgcctctggcacacagcaagcagtgcataaatgcatacttgttagccctggnnnnnnnnnnnnnnnnnnnnnnnnnnnnnnnnnnnnnnnnnnnnngggggggcgcacggcaaaaaagatacccccggaggggcccaacatgaaccgcctgaccccgttctttggtgcaaaagggcggcccccaataaggaggggccgtataatataaagcaacaaaggagcacgggggaccgagcgttaaaacacacgggtgcgggctggggaaacacgcggcaagggggagacactttcgtggagaggaaaccccacatcctctggtgcggcggggacacaatttcggggacgcacacactcactcaacagaggagatattattaagcgggcgccaggcgaggaataattataacctgaagggggggctacgtgggtggcgtganacccccaagcggggcgaggaaaatattgcgtgctggcgcgcgggcagtgcgacaagataatatttagggcgcacacacgagcggaggagatggtagatgtttcttggtgggcgaacactatcttctttttcccggccgggcgtgccgttcccttggtcttctacataacatacaccaggggtactgtagatagatcgagcgaacaaacggacgaggacacgaaacgatgcagatagaaagtcgactcataacgagaaggcaaaggaaagcaacagaatggcagagtggataaaagacagcaggaacagataggactacatcagcagtagaggaggtaaaggagacgacatgccagtacagcaagagagtagggtacgacgaatacaaaacacaagagtagcgactacaggtaggactaacgtacgtgagaccagcaggaactat

SEQ ID NO: 414898 - DNA, 1484 bp, Homo Sapiens
  misc_feature (353)..(407): n is a, c, g, or t
  misc_feature (412)..(570): n is a, c, g, or t
  misc_feature (669)..(730): n is a, c, g, or t
  misc_feature (894)..(952): n is a, c, g, or t
  misc_feature (1090)..(1211): n is a, c, g, or t
gatttgtttggagtaggcacggaggcaaacggatcggaagtgccgagaaatagaccagacacagagacagctatgacagggaccaaaaaagtcaaccagcaaagcctagcactaagcagaaaaaaagaaaacacaatagaggcgatacctcatagagcagagaacgacactatcaccaacaaccacacaaaccagaaacacaacacgaaaaagagaaaagaacaacagacaaagcagaagagaggacgacacagcaagcatgaagaacagacaaaggcacaacagaacgcaagcagaaatgaaaccaaagaaaacacagacgaagcgctggagtaaaagaggggagaacgcannnnnnnnnnnnnnnnnnnnnnnnnnnnnnnnnnnnnnnnnnnnnnnnnnnnnnncacannnnnnnnnnnnnnnnnnnnnnnnnnnnnnnnnnnnnnnnnnnnnnnnnnnnnnnnnnnnnnnnnnnnnnnnnnnnnnnnnnnnnnnnnnnnnnnnnnnnnnnnnnnnnnnnnnnnnnnnnnnnnnnnnnnnnnnnnnnnnnnnnnnnnnnnnnnnnnncgcgagcgcaagacgcaagccgagcgaccagaacaggggccagagacaaaaacgagcaagaaacagcacagagagaaccagcacaaatgagagagcaannnnnnnnnnnnnnnnnnnnnnnnnnnnnnnnnnnnnnnnnnnnnnnnnnnnnnnnnnnnnnagaagaagacaagaaaaacgagacagtcgcacgacacaagcaaggacacgaagacagccaacgagcgaggccgacacagaagaaacgcagggcgggacgacaacgcgaggacgcagacagccacaccagaacacgaaaccaaagaaggagcggacaaaccaggnnnnnnnnnnnnnnnnnnnnnnnnnnnnnnnnnnnnnnnnnnnnnnnnnnnnnnnnnnnccaggacacagagcacacaaaacgccgatcacctcaccacaacagagaagacagacaagacaacaaacaaaaccagccaggagagaagcagaaagcaaaggagcaaagaaagagagaaacacaagagaggaacagtgnnnnnnnnnnnnnnnnnnnnnnnnnnnnnnnnnnnnnnnnnnnnnnnnnnnnnnnnnnnnnnnnnnnnnnnnnnnnnnnnnnnnnnnnnnnnnnnnnnnnnnnnnnnnnnnnnnnnnnnnnngggaagcaagacaaagaaaagacagcgcgaaacggagagaagcacgaaaagagaagcagtgagaacaacagagagcggaaccaagaacaacagcgaagaagacaggagagaaagcaaaacaataaaggaagaggagacgagcgaaagcagacgacaaagagcaaacagcatcagaggggaagagcagcaagagcagcaacgacacgagagagacgacaagacagacaaagagactgccagccagacgagacagcgaaccgacagcaagaacgc

SEQ ID NO: 414899 - DNA, 948 bp, Homo Sapiens
cctcttcttcttaagaacaaaccacaaagggattgtgagggaaggagggggttctctttatactccgtgagcccagacacctcactcggtcccggtctagagctggtttggctgaacactttttttcaaaaagggaaaaagaaagggagttggctgtgagtggtgagaggtgaaagtggacgtaagattttatccaccttcacgagcccagcccgcgcgtgtgcgcccgacggcttccctgtgttctgtgggacactttcttcccctgtgcccagtggaccccctatacttatgtgtgcaacaagggttgagacggggtagaaaaaacatgtgttattatgtgacgcatgtgaccagagacgccggacgcacagggaccatatgtgtgtgcacaagcacaaggcacatgtctctctatacccgcgtgggtctcccaaggcgtgtgggacatatgtgttgtaagaacttttcaaaacaattctcccagcacaattatagctctcctattccttttccctttcgcacaaagaaacacaactctcgggctgtgggtgccaccctgtgagagatgtggacaagtgtgtggagtctcggtgggggatatcaccacatatctctctccgtgggtgtttaccaacgcccgctatgtgatacacccccatataaatggtggggccctgtgtctttcaccccatttttcttcaacttccacagcgaaagaaaccacatggtgggacgcctctattccccctgtggaaaataatctccagcagaggtgtctcttccacgaaattatatgatggcctggtggggggccccaccaggggcgaatgtgggggcaacaccaacttcgttggcctattattctccgattaaatgttctccaccatagtttccagccgttggggtggaaacgtgggccccaggaaatacttattttaagcgcag

SEQ ID NO: 414900 - DNA, 1223 bp, Homo Sapiens
  misc_feature (346)..(346): n is a, c, g, or t
ggcggacggaccggttacgcggctggtcgtgcgctattgctggtacctgcatgaaatagcgacgagcagcttcgacgctcagtgggactggcgtgcacgtgccctgcctcatagattgctcctccaggctagaaggtctaggggctgagccaattgtagtgcttggccgtcgaatatcctcatgtaatagagggctttgctcgcccacggtgtttgtacaacagtccctagtggcatgccgacaagaggtgcaagcacatgggttgggacgctctcacagttgccgttggctagattgcgtagaggaggtctagctagagcaatttagtactaggggagccatggntcttagcagacgttcatcgtcaggcgcaacgttactccaatcccagactctagtggtgggtggaaggcgctttgatgtcctgtggatgcctccgagcatcgtagtcgaccagatcgtgccttccgtgtgatctatggaacctcaagaaaacgggacgagttacttggtggccataggggcttgcttctgcttctttgcgcgttcggtcgtgtgggcttgacgggccctggaggtgcgccttgccattgcgctagccttttcgttcgttccacctcgttcgtcgtagcgtcgcgcttgttgtaaccttttgtacgcgtaccactcgcctgtctgcgcaggtggcccgtccgcgacacttggtcgtcgcgatcgcccatggggtcgaggttcgcgctcgttggagtacgcgtcactctccgattcgcgaatggtggcaatgggcaaagtcgcgaaaatcggtcatctctagctatagctgtggggccatagctagcgaaggggcccccaggggcattgctttctgaaagcccactcctaacaaaggtacgttctacggcctgggccttggttacactagggcagggtgccatgctccccctttggggtcgcgtcgggacacttcctttactggacgtatttgctcaagcgtttctgacgggaacccatggcgccgggacggaagttctccccggcctgtaacttgggggcattgggggggatggcccttttaagtgttgggattccttcccctttccttccgtcatggtctggaagtccgggccgcgttcgagttcggccccgggtggcgcagtgtctgtggccgtcgcttttccttacccttgggacacgatgtgcggataactacccgtgcgccccg

SEQ ID NO: 414901 - DNA, 806 bp, Homo Sapiens
  misc_feature (159)..(177): n is a, c, g, or t
  misc_feature (199)..(440): n is a, c, g, or t
ggtcgtggttctgtccagaagcagttcaggctggggctgttctcttgcccctccttgaggcagacctttagatattttcagttttcatcacatgtctaacaccacttccacccccccctcacctcttaggctaaatccaagctaaatcccccaatgtcnnnnnnnnnnnnnnnnnnnggaaacgagtctcatctgtcannnnnnnnnnnnnnnnnnnnnnnnnnnnnnnnnnnnnnnnnnnnnnnnnnnnnnnnnnnnnnnnnnnnnnnnnnnnnnnnnnnnnnnnnnnnnnnnnnnnnnnnnnnnnnnnnnnnnnnnnnnnnnnnnnnnnnnnnnnnnnnnnnnnnnnnnnnnnnnnnnnnnnnnnnnnnnnnnnnnnnnnnnnnnnnnnnnnnnnnnnnnnnnnnnnnnnnnnnnnnnnnnnnnnnnnnnnnnnnnnntgagccaccgcgcccatctcccctgcaatgtctttagttagaccttttccaccatcatgtctaactggggctacggttgggggaaagtgtccaaattagtccgtgtaatcctaaagcggggtgtgccccggattagcaggccagggctagggtgagacaattgaggcaccgggggcatacatttaagtgggtgctatgcttgcaggtgccaagagagtgctcctgtgggtttacccccggtggtgcctccttaacctcatttctggccccagcccgtggggttagagtcgcaccagtgtggtccacggggcataataatctcccttaactgcttgggccagcatcagcttccagaacacttgtgcc

SEQ ID NO: 414902 - DNA, 126 bp, Homo Sapiens
gccattgccctcctcacaacccgcactctttccctccgccaaagaccggtggttgaggcgtcacggcaagcgcgaagcgcgaagcacagcggaaacgggagcgccatggccgggagcgcgaggtcg

SEQ ID NO: 414903 - DNA, 390 bp, Homo Sapiens
gtgccttttccgggcccacctatggccacgcatggaccaatcagcgtgcaattcttcccctctgaggcccataaaagccccaagatcagccagagctgagcggatgtcaggatgaccagctgcagagtagctacccacttcagggcctcctctctgttgagagctacagagacgatgggatgacctgcctgcagagatgagccacccactctatggtctcctctctgctgagagctgcacagatgactggatgaccagctgcagagaggagctaccctctccgctaggagctgaacacttgtgggaacaccctggctgcagaaaggagctgccccctgccagtttcctctgagctgttctattgctcaataaagctcctcttcatcttgc

SEQ ID NO: 414904 - DNA, 159 bp, Homo Sapiens
cggtacccagaatattctggggacaaaacggaaaaaccagtctccagcagctccccgattccctccatcagttttcggtgtccccggctccgagctcatccactgctcctgcgacgtcgccggccgccgctccggagcccccctccttgccgccggcac

SEQ ID NO: 414905 - DNA, 787 bp, Homo Sapiens
ctgccaacagatgggaaacacccctgaccttcttaatgatattggtccccagcaccttcttagtggccatggtgcatgctgtcttctgggcctgcctggggaacttgatacactggtggatcttccagtctcaattaatgtccattcctgtatatccacctccctccacctctttattttttcctctatcctctgccaggacaaccagacatttcgactttgcttaaagtaggccatctctagattctcagagcaaccctagcagtgagttgctcatcccgtgagtccttatttaatcccatgttctgaaaaagcacacccatgtcaatgcattctaagttacctgcccttactttctggcccacatcctcaatgtacaattgcagaggttctgccctacctcctggtggtacatgatagctaatttttatagcctctttgggtatattctctttcctgctttattaggcccagcaagcccccagctgggttaagctaggatttaacctccaggtattgccctgatcaccagaaggagaggcgggacaactcctcaagggtttgcctgatttctagcagggagaggcctttgcaatatcatcttgcatgggaggagtgctgacacttaatagggaggaattaaacttctgctagcactaaggcttcagggaagtgtgcagagccacttcctcagagtcatccatccagaggtcctcatccatgcttctaggccccaggtctatgtaaccatggccttgatcttagtatgaccgaaatggcttgctgg

SEQ ID NO: 414906 - DNA, 736 bp, Homo Sapiens
gtgaatacggccattccaaatgggagaaatggccaaaacaaaggggttacaggacccatgcaagtccaaaatccagcggggcagtcaaattttgaagctccaaagtgatttcctttgactgcatgtctcatatccaagtcacagtgatgcaagaggtgtgttcccatagtcgtaggcagctccacccctgtggctttgcagggcatagctcccctgctggcttctttcatgggctggcattgagtgtctgcggcttttccaggcaccttgtacaagctgtcagtgtatctaccattctgatgtttggaggatggtggccttcttcttacagctctactaggcagtaccccagtagggatactgtgttggggctctgaccccacatttcccttctgcactgccctagcagaggttctccaagagggcccctcccctgcagcaaacttttgcctgggcatccaggcattttcatacatcttctgaaatctagatggaggttcccaaacctcaattcttgacttctgtacacccgcaggctcaacaccacatggtagctgccaaggttggggtttgcactctctgaaaccatgggctgagctgtaccttggccccttttagcaatggctggagtggctgggacacaaggcagcaagtcctaggctgcacacaacatggggaccttgggtccagaccacaaaagcattttttgctcctaggcttctgggtctgtgatgag

SEQ ID NO: 414907 - DNA, 729 bp, Homo Sapiens
  misc_feature (289)..(315): n is a, c, g, or t
gccactgtgcccgcagcctgatagcaacttttaacatcacccttgtggatttcacgttttccccttaacctgattataatttggcttctaaatccttcagtaaatctccttacaagaagaaaataaaaatgcaatggctaagctgaaacatcgatctcatctgtgttatattttgcctctaaaaagataaacgggcatcctgattgtttttatgtcttatgacattgtttatgaattgtttaaactaagtccattccagagaaaataattccacatacaagaaactttnnnnnnnnnnnnnnnnnnnnnnnnnnnctagcaggcttgattcttccaccaaagagcgtatggaatctatgggtatgtgtagttcaaaaagtgtaacagatgattccgataatgcagccagtctactaatgttctgaaatatcacaacacatgccaatatgaggccttgggaaccgaaaatgaaatgttgctgtaacaacatagctgttaatagctatgacactgatagcagagtctggaaagatgaagagtgtcatgttatgaaatgacagaaatgaaaaggaaccaaatccagaaacttgagaagctggagtaaatgaaacctacttaatactttttctaaacccattcaggtagactagattattatctccatcattcacaatctctcacctaagagaatatgtttttctgggcccactgacatcagattgatttgga

SEQ ID NO: 414908 - DNA, 561 bp, Homo Sapiens
  misc_feature (84)..(92): n is a, c, g, or t
tataaaacactcaacaaaaatacatattatcacatctccccaaattttcttgccaattttccccgatccctaatctacacgacnnnnnnnnncaatatacaaattgacccccttctccacaaaagaacgcaaatacacaccgaggttggcccacgacaataccccctacacaccgcctctcagcacaccccagtcgggaagctggcaagaggaggggccatgggcaatctgacaagcgatctctgaagatctccccaaagcacctgctcagagccgtaacagggcccccatcacatccgggcaagctggatcacaccgcttttggacgcaccacatgtggaaaaacctcaacccactagagagagcatgccaccctagagcaaaagtggctggacaccacgaggacatgcagtgaggcaaacgtagcacccgggacggtatacaggcaaccacagggtaacgccacagtgcccagcgagccgcctttagcttgccgcatgcaaacaagcaaaccagataaacccggcgcccatgttacgccccgcataaacggcagagact

SEQ ID NO: 414909 - DNA, 1383 bp, Homo Sapiens
  misc_feature (55)..(55): n is a, c, g, or t
  misc_feature (333)..(341): n is a, c, g, or t
  misc_feature (370)..(453): n is a, c, g, or t
cctcagccattgtctcgaagctggaagccgtcgcgaagacgctgaatctcagggntgaggaagaaggataatggtgttgtcaagatgcaagtgaggaaggaaggcaggaatggtgttcttcagtttgactcggagatctttgagatcagcccctcgtaccatctcattgagatgaaacaaacaagcggcgattcactggagtaccagaagctattggaggagagcatccggccagcactgaaggacatttgtctgggcatggcatggagctgatggtcagcaggagcctcaagggtagatttagatgtctcacttattatgtttagttctgcnnnnnnnnncagctcgagtaattgtgttatatactctnnnnnnnnnnnnnnnnnnnnnnnnnnnnnnnnnnnnnnnnnnnnnnnnnnnnnnnnnnnnnnnnnnnnnnnnnnnnnnnnnnnnggaggggcggggcgcgcacaagataatcccgccggagggggaggcgcacaagtatttgacggcaacacaccagatttttgtggacaagaggggacgccccactaaggagagcgcgtctataaatgacgacgagcgagagcggcgagacaccagattaatacaaccaacccagcccaagaggggaaaacacacgtgctacacggtggcgacatactgagtgaaaagaagaacacccacacaacagggcgggaggaggaacacaaaatgtggagcaacacaacaccccccacaaaaaatattaacaccccccatgagggagaaataacaacaacacatcgagaagactataaagctcgttgtgttaccaccccccaccggtcatataatacgcgtcgggtgcgcgagaaagaaaattatttggcttccaacacaggaagtatattataccagagcaaacctatattaagccgggggcggatctagtagatcacaataacacgaacgtaactctagtaatagcatagtgcagtcagacgagcgcacatcgaatagagacaacgcgcactaagactgacctacgtagtccagtcattaaattaattacgaaaacaaataaaaaataattctattatcagtccaatcatctaaaaatccaaccaaacacaccctaacaaacaaaacaacacacaatattccagatcactacaatcaactattcaacacaccacaaacatatgaatacagcccacccataactatacataccgtatacaataaacacattactcactcaacacactctaactattataaacatacaacaatagcaataatacttaataaaacacaacttcgaactacgtaaaagcaagatacccatcctatcaccatatcatacactatccacctagacgctgaataaacaacaaa

SEQ ID NO: 414910 - DNA, 471 bp, Homo Sapiens
  misc_feature (43)..(84): n is a, c, g, or t
gtggttttctcttgacatggctcctgcccgtgctaccagcagnnnnnnnnnnnnnnnnnnnnnnnnnnnnnnnnnnnnnnnnnnaggctgcggctagagggcccaaaccccgccctagagtcggtccgtgagtcccgggctccgcggggacagggaggggatttccccgtcacccaccccgccctagctgcctcaattccaccccctgcccctcgggaaacaactaacgaacccacacctaaacaatccaaactctggaaacatggtctgttcaacgtgagagagagctaatccgggaacttaatatgggggggagggtgggtgggcttactttagaagtaatattaacacaagttattttctttttttcccccactgaaccttcccatttaccctctcccgcccactccaaccgggcgggaatagttccacgatgaaatgagtgaaaacctgagtgatcctgtgtcatcc

SEQ ID NO: 414911 - DNA, 854 bp, Homo Sapiens
ttcacgggaagacaacggaaatccaaggaaagctacgaaggctgttatcagagaaaaatttcctcgaagcactttagctgtcactttgaagtgttagtgacatcctttggcagtgattaaatgtgccacatgccactaatcttgtttagaatccttaaagaggacagcagcccttacacaggatgcttcgatctgatgacgatggtgtttatgcagtgatgtgtggctcacaggcacgtatacaacaccatcaactcttccatctcatacctcatcagagctttccatctgatcccatttggagaaggatatcacacctgaggaatccacgtgtaagctatgctcttgtatgagttcaggtgcacacgcactgtggacgcacactgcactgtgccccccaacggctgacaacgtggagccgggatgcaggagcatccgccttctccaagcttctctcccacctctcactgtgatactgagcagaactccccaaagaaaaatcatttctcaactgtgaaactagggaagactaaccagatgtgatagcacactgtattctgatcgaaagtgaactattcttccatcatattggtcaagctttcaaaaacacttacctatacttcagggcgaaagattctcagcatcctctaacaaatgtctgcctcagaaccattgaaaagaaacaggtttagaattaattgacagagaacaattgtacccacagttgcattttgcctcttttgaacaattcagatatttttcctgcagataattactacagaaccacaataaaagttatcatcaatgcttcacatcctagtaattgaacgtggaaacaaggcacccttcgaatt

SEQ ID NO: 414912 - DNA, 459 bp, Homo Sapiens
aggaggctctaccccggtggctcctacttcgacccgctgggtctcgcggcggacccggagaagaaggagactctgcagctggcggagatcaagcacgcccgcctcgccatggtcgccttcctcggcttcgccgtgcaggccgccgccaccggcaaggggccgctcaacaactgggccacccacctcagcgacccgctgcacaccaccatcttcgacaccttgggctcctcttaagtggtcggtggtcgagcaatttctgtcagctcggctgcaaaatggacgaacgcgcgtccgtgtaacgaacgtgcttttcgtttgtatatgacgagtgatggatgagagggtatcgcaaagatcctttgttgagtaatgcaggtctgatcacataggagagctgctgggacttggtgatttgtaaaatatgaaccaatggtgacttaatgcatccacttgtacatc

SEQ ID NO: 414913 - DNA, 730 bp, Homo Sapiens
caaaaagaaaaaacttgcccccagcccgcagagccccagttagaaagcccacacttggccttttggagaccaaggtctggtgagacattccttggcatcaaaagattcacagttcagaggaaggcccaggccagaaaataaatgactgaaatatcacgagtgaggtaagtgctgatctaggagaaatagggtgttagcaagaaagtgtctggccgcagcatcccttggcccctctcctaggactgccaggccaatcttgtgtttccagtgaaacctcccagggaggaagcgaacagaagaagttgcctgaggggcatgagccaaagctggggcctcagttgtggaagcatctcccaaactgggatgatgggggtgggggcatttcggagggtgtgacaatgctgtgttgcctcaaagtgcccagagaggcaccaggaccctagcaggagtaactgcatgacgctataagggaggttgcacccccccagccactgccaggtgcctgtgcccaacctgggaaggagtagcgaggacacccagcttccaggaccagatggaattggaaaatactgcactgtgttgcctgctgcagataggagacagagggccctctctaagtgtctgtgctgtgtaggacaccccatcccctatcctctgtttccccctttggttctctgtaggcacagagagaatccagacaaccactgagagcaatttattgtaactctgg

SEQ ID NO: 414914 - DNA, 355 bp, Homo Sapiens
  misc_feature (170)..(181): n is a, c, g, or t
tattgttttcccctgctgtacaaaagtacaaaactatgtttaagtagcatgtttaattcttgatgccattattaccacataacatctttatatttttatacaaaacacctcgccgtgagagtttcttaaggctgtgcttagtgttaactggaagccaatgctaatactgnnnnnnnnnnnngggtgggggaatgggattggggatcaggatgtagataggcttcccagaatttcaggaaaaaaattcagaacaggaaagagcatcttgaagatataccataaaaagatggtcttttgagtggtatagtcagtttctaatttaagagtaatttctctctcagatgtgttaaagtgt

SEQ ID NO: 414915 - DNA, 710 bp, Homo Sapiens
ggaagggcctgggacaacctcctgcagaacaagactgctttcaccaccaaagagaactacggcaaaggggagagggaagcacaatgggctactgcacagagaacactccatggccttcaagcacccgagccggcctcccacacactgttcaacgacaagagcagctaccgtgagctctctgagatcgctgagcaagcaaagagaagagctgagattgcaaggttgagggagctcaacacactcaagggccacgttgaatccgtggtgaagctcaagggccttgacatcgacaccatcaaccagaactacaccgtgtgaggaaattcgacattgaaccaacaaacatgacatccgtattggagcgagattggaatggagctccgctttaagatttttccggtgaatgaatgaaacaaacatggctgatctgaccagcccctagttgtaaagtgctaccaaatatatggtttcggttgtccgtcttctagagaggttttaatgttctagtggagttataccgtgtttggagcacggcgtggttgtaatcgttttcgcgttttacccagtttcccctaactagtcggtgatcttgcggaaagcaagacgagaaataatcactgcaaattttctgccccatgcttgctatcccttcacttgggtttatacaaagacaattctcgtctataaatatcaatagctggcttttctgc

SEQ ID NO: 414916 - DNA, 984 bp, Homo Sapiens
cggggaggcccgggtgggtacccggcgctccggctcccagtctcctgggcttctccagtccttcagcgccgttctccggtcacagggaatgaaagcgaggaagaaggaaacggtgtcgagaattgcgaagagagaaagcatagaaaacccacattagaggcactcccagagcagaaacccttcggagcatcccgacttcctcggcccgcgtgcaatccaggcaaaattgaggttgtctctgagccgccctccctaagcaggtcggaaagcccccgaatcatcccaggtcccgccgcgctgcactcgcaacctgggtggacggtccctctagtggttggcaccaaacaaaagttctgtcttatgaagagccgaggtcaggaagcatttccctgtgcccagcgccaaggtctgggaccttaggtccaagaaaagcgttggcaatgtctgaccacaggaatgggttctcgaactggggaggactgaagctggagatctggtccagcccctacctccagcgtgtggcctgaacccgttttggttgtactgctatgttgtggccctgcccaggcctccaaggactggctgctgttaagctgtttaaaatccctgtaggcctcagatggcagcgacaccagggactcggcatagtccccagctctggcaggagtcaccacagccctagcctttagttctctacaggctggagtgtcgacaaactccacaggacacaactttttcaaaccaatttaccctcgcggtctgaaatgaccagtaggcccaggagattttccctgtgacaggaacctaaccacctggcaatatgagaagtgtggccctgccgggacctggcccagcggcgaccgagcccagccgccggggaaggtgggcccccacgactgtgttcccaggcaccctcagtcctttactgcttaatagccccacgccttgtgcgccgcggcgcgtccccggctgggttcggatccc

SEQ ID NO: 414917 - DNA, 787 bp, Homo Sapiens
  misc_feature (463)..(503): n is a, c, g, or t
gtatagtgatttgttacaaaatatgtttttaaagattagattttgattaatgatttagttatatacagcattttaatgcttagtaattactgttctagtagcattttgcaatacaagggatgtatttagattattatactttttttggctcagacttttgtgatctaatttataaattgaaacaatgactcaaagaagtgcatacctaacttacgtttgtgccaagccagcctcctctagtttcaatttaataactagtttcaaaatatattttgatagcaagttcctaaaccacagcagaattgcggatcaggaaaaatacaagataacggcattctataaagatagagggcaggttcccatggctatgttgctaagaaactagtgtttttaatcattacactccgtgcagtcatatttaatcaataaaacaggatatattttgaaattcaccatcacagannnnnnnnnnnnnnnnnnnnnnnnnnnnnnnnnnnnnnnnngaatttacgtaaatgtgtacaacactagtgtgtctgacttggtgggtttccctgtgaaacatgtcagtatcatgtaagatgaagaatattttaagggcaaatattcaaatatctttcctccaaacacagtattagttatagtaatgaaatgattcattacactgaaaattgcaaaggaactcatgagttcctgtgtgattgaacaccaaagtgattaaaactcttatgacctgaaggctttccactaagctccactgtccgcaccagtgttcatggatatacat

SEQ ID NO: 414918 - DNA, 202 bp, Homo Sapiens
ctcggcgtgtgtgataacgaacgtatgcgcctgcgctacgcggaaggcccgtctcgtctctgcttcctgtctgcgccccgttcgtgtccatggcgggtgcgtgcgcggatggcctgtgaagtactggcagacgtgcgttgctccccgacatcacgcggcccaacatcgtggaggcgctgctacatggtgtccctgcccatgg

SEQ ID NO: 414919 - DNA, 733 bp, Homo Sapiens
aaaacttgatctttaccagaggtgcagaagttgctgttgaagccacactgctgatgaggactcaggcaggtgtcccgagaaatcgcccagtcgtgagaggaaccataagaactttgtaaggtaaatacttttcttaactttttaaaatctgggcaagacacaaggtcaatgtttaaaataattactgtggattttctttataagaagaataacgctaattcacatttttagcccgatttctttaattcatatttggcgatagagctattaccatttattagatttgtatcacattctgtataacatacacaaaatgcgtatacatgtacatatatacgaatctacacacgtttaccactaaatactgaaaagcgttatcgaaagtctttatctgcctagattgccaagtagaaagtgtgaccactttttgaaaaatatgaatacactgaatcattgaaatatcttggtgtcccagagagtagaaccaggatagtctaaagcgtgcaaaatattaaattgtgtgaagcatttggttctaaatttcagttaagagagaggctatttcacagttggcctacttcctacaggaaaccacagtgatgttttattaagtaatggaatatagttgtctcttcatttacctgtaagaaatgtggcagggagagacttgaaaactaggacttaaagagtgacaagtaccaggcatgagaaacacagctcccttacagaacaa

SEQ ID NO: 414920 - DNA, 286 bp, Homo Sapiens
tagtattatcgcctagccccctttcaagtttctgtcttcgagaaaaaaaccagggcgcgcgcgcatcccataaaataaggaaagagtccagtgtgtctataatatattacaacggacaacgcgcagagctagccagcccatcctcggagttatataataatactactacgatcgtgtctctagtaggatgatggagaaaacaatagactgatagtcagcacgcgtgaggacattatttcttctactagcaggaagccagtccctcttctctattttgtgtgagtag

SEQ ID NO: 414921 - DNA, 499 bp, Homo Sapiens
gaagaattcgccgtagcggcaccagcaggccagcacgtccaccccacctccccctcgcagcgggtgggtcccgccgccagcttccggcgagccgccggcgggcggcattgcgctctccgggccggttcttgactgacggatggcgtcgccgggtggcgggtacgcggaccggccagcgccgccgctggacgggatgatcacggtggacgggggcgggggcaggacgccgccgccggcggggctgccgaggccgccaggttccgggggctgatgcagcagccgtcgcggctggcgtccggggtgcggcagttcgcgtcgcgggtgtcgatgaaggtgccggaggtggtgccgggcatccggccgggcggcgggcggatgacgcggatgcagtccagcgcgcagatggggctcaaggggctgcgcttcctcgacaagacctccgggagcaaggagggctggaaggccgtcgagcgccgcttcgacgagatgagcaaggcca

SEQ ID NO: 414922 - DNA, 522 bp, Homo Sapiens
  misc_feature (346)..(419): n is a, c, g, or t
aagaaaaacaaattttcctttgttttatggtatgactttatagattcttgttctctgtaactagtaacttcaagtattctgttttgtctaaaaggtactgcgaaggtcatgagacgcctgagaaggcctgaactacagctgtctgggcacctagtgaaggttataaggcaaaccagtgcaaggctcttttgagcaaaacctagataacagacatctaggttgcaaagcaacagtcatgtgtaatcccgagttatgaactgtcacaatttgattaattgttctccctctgtatctctgctttcatgccactgtaagcctacatcaagttagcccaccccttttggannnnnnnnnnnnnnnnnnnnnnnnnnnnnnnnnnnnnnnnnnnnnnnnnnnnnnnnnnnnnnnnnnnnnnnnnncactcaataaagatatcctcctgtatacaccccaaggtctctctctggtactcctgattcctgcaaaaagatgtcaatttataaacaatatacaggacagatg

SEQ ID NO: 414923 - DNA, 1227 bp, Homo Sapiens
  misc_feature (897)..(960): n is a, c, g, or t
  misc_feature (1028)..(1117): n is a, c, g, or t
ccgcccgcccgcctgcgctcgcaaccagccgcgaagcggcgccggggccaccagatcgagatgcgtcccacagtgtcctacacagatatgagagagcggcggatcgagaagcggttgttcgtctccaccagattgaggccgagatggatcgagaaagatattcatgtgtatttttttcgagaactcgatattgtgttgtgttgtgatgtagacatgtagcgcttcattttgtataacctaaaatctaaaaagtggccgcgcatgatttgacgcgatcgagcggccggctgggaaccacacgatctctcaaacacaaacaaaggataataaaacaaaacggggcgctggccgctctcaaaagttatctccctcacgaagggccccccgactgaattacacgcgatcccccaccgttactcctgtgatccccacggggcccccataatcggcgcacccgctactatctacggccgtctatgcacgcgcggcccatcatcgctttacaacaagcaggttgctgtcagcaccgtccgggcgggacacaacccctgtcggccaacacaccttcgggagcaccctctctcggtgtccaacgggcaccctctagctcctcgcgtgctctgttaccacacatatgtggcgcaactctcattccccctcaggcggacttttcacacgcccctcacgaggccaactgtcacgacatgctttaacaagacgcgctaacacccgcgtttataaaaccaccttcccaagaccaatgatacccgccccgacgcgtagcaaaacattgccccccaccaccacctatctaccctctccaaaactcctttttctacaccccgcaaccactcttacaatcacatgcccccaacatacactcctccacatcaccannnnnnnnnnnnnnnnnnnnnnnnnnnnnnnnnnnnnnnnnnnnnnnnnnnnnnnnnnnnnnnncccctatcatagccactacctcacaccatcctctctcatctagcactccgtatccaacacaaccatcnnnnnnnnnnnnnnnnnnnnnnnnnnnnnnnnnnnnnnnnnnnnnnnnnnnnnnnnnnnnnnnnnnnnnnnnnnnnnnnnnnnnnnnnnnccagaccaactcactaccctcaacataactcacccacccatcattcgccctgcctcatcacaacaccgaatcacgaaccctctgccataccacccaccccccttccacta

SEQ ID NO: 414924 - DNA, 1278 bp, Homo Sapiens
cgcatgggcgcgcgcagcggtgacgcgcgttcttagctgttgacgcgccggagccgcgaaagttcgaagctggaaactgcaggtgcacgagggaggaacgcgtggagcatgaaaaggcaggggggactccgtctgagacgaaaacgagcgcggataccagtccgggaaggccggagcatgcaaagtggatgtatcttcactggaagctttgtgtatgattcagggcgaagtcatctgatggaatgccacgagaagagttgatgtgctgagtcgcgagttgagtgtatgttctgggtttatcatatggggggaactacatccagtactggcgtgtccgttcatgtatgtcgaacgcagacgtgtctcgagatcccaggtcttcttgttgattgattccggccacgtgggacggttgatttcctcgggtcatctcaggattcgtgaacccttgcaggttgattagacgcgcgtgaccattccgtcttctgcccaagcttttatggtcgctgatgccgttgtaggcttgtaccggggggggcagtatggacttggatccgattgcgaccatcactttggacctgaacggaggcgtgtagttcctgtttcccctttactgccctaacttctagctgctctccttgctggccccattgtccaacctattgcgcaacccgtgatgctctattggtaccactgggtgttcattgcattcccagactggtgccattgctcttgtggcactgaacgcctcatttataccctttgtgcgaactttcttgaaacaggcgactgcttggaccctaagtagcgcattggttgagcatggattccaccgtcacttttcatcacacttgcgcttagcgccttgtaaatcttaagatgctgaccttcagtctggactccatttgcaccgattgttcttctttaacccatgcaacagagcataacttcctaccgtagatgggaatctcctgctgctagccgggcttctccaatgggctggcatgaaccccgaaaatttcccccaccgtggatcctccttgccccctggggaccttaccttaagaatgaacgttccgggcgggaaaacctgtcaacatgctttgcctgcaccccacttcccttctaggcttggctccccatggtggtgcacgctccctccgacacttgtgccttgggctctcagcccaatatgactttcccgtccgaacaccgcgcctcacctcggcatgtcctgcacccccagaccctgtctccgggacctctggccacgtcgtc

SEQ ID NO: 414925 - DNA, 724 bp, Homo Sapiens
cggacgcctgaagatatggccactcagcctatgtctcgggtggattgcctaggaaagcaagtgatatggccatggatagttctcatgtaattagtttggctcacgcactagtacacgagtgacccgttgtagcacgtgggttcccgtcggaagccctcctcaacgagtagcgtggtgtgagagacataatgtcagtagagttaggaaaagctttataaccgggtgtgtcatatgcgttgctatttgaaagcgtagtagtgttggttttagtcctttctgcacacatgcactagtttgtgaactcatcatattttccaacacaagtgaagagagagatacatagaaacaagagctagaacacaccacaaaagaacatagaagacaaacaagagcaataagacaatcacatagaaagaaacaacaagacaaaacgaataagaacgagggcgaggtcggcaaggctagcactggccccaggggcgtcgactctgagtgtgggagccgacacagttccgttccaaggggaccctgggcaccacgagcgaagcaggctggcagtgacgtaagcggagggagcaacccgtgggaggttacccggagtacaccctgtcacgaggacgaaccataacatattggacgcaaccccgtggaagccttggatgccctaccatagccagcgccttgactcgactggggcttgccgaaccgacggagcacgggataa

SEQ ID NO: 414926 - DNA, 1243 bp, Homo Sapiens
  misc_feature (314)..(379): n is a, c, g, or t
  misc_feature (449)..(530): n is a, c, g, or t
ccagccccagccaactcccggcactgaacactacaggcaatggacttccggcagatctcacccaccacctgcaccaccccagccatgcagcagctctgcagccccgcccaccgcagccagcagcagctctgcagcccggcgcaatgaccattagctagtacctacagcacatagtacgaggacccatgatctcaagcacgcagacaacagtccggagctaacgacgctaacacatcttcagcctctcatcgcatgcacatactcctaagacgcgagcacgacacgttattatagtccatactatcgacataatnnnnnnnnnnnnnnnnnnnnnnnnnnnnnnnnnnnnnnnnnnnnnnnnnnnnnnnnnnnnnnnnnnccaccaataattaatgacacaccttaacattccaccatcaaacaatactacaatacacatccatacctannnnnnnnnnnnnnnnnnnnnnnnnnnnnnnnnnnnnnnnnnnnnnnnnnnnnnnnnnnnnnnnnnnnnnnnnnnnnnnnnntcactattactacactattacaccaccactcaaccacaccaacacactctcacatcaatctacccttcacaatacccaacctccatccacctacagccacacaactcccccagcgtacaacgccgaagacaccgacaacgcaccacagacgaagagcgccagacacacagctcggcatagtaacagcgctcctaacctcacacacacacccagcgcaggctgcgcccagctgccatcccacacccaaacagcaacaccgacaaggagtagacagtcagcccaggcacacatacgagacacgacgagcagacgcagaagcagagaacgcgaaaacacaggcaagagcgacgtcgccagagcaagagcgcggcgcgaaagcagcaaaggaacgtacaacaaggcaaccgcgagcgacagacaaacagtaccacgaagagcacgacgaatagcaccaagtaataagcaatagctataccgcacaccagcctccaatcacgcgaacacagaacgacacacccaagagacgcactacagcgcacaacagatcaacgacaacaacggtaacagacacacgcacacacatgtacacaacgcaataccaccaagacaaagacgtcaagacgaccgacccacccagcgaaaatgacaacaaatacgcaacaacagcaaaccaagatgagtcccgtacagaaacaagcaaacaacagaaacac

SEQ ID NO: 414927 - DNA, 871 bp, Homo Sapiens
cttcggagttcgcccccttcgggactcgcctccgggagaccccgagggggagagggcgcttcctccgcgtccatcgcccttgccgccctgggagagctcttgtcagagctattagctctgctttctaagcagaagtttctgcagacagagacggtacctctactgctgagtccaaagtcaccgcggcatacccagctcggcagactccccttagtacgaaactgcttccatcagtaaaatattcaatgtccaggtccccgaggggccaatctgttaaatctttccagcttgagaacactttatctaccacgtccacacagcaatgaaggggacttcctgtgtagggtccagccctacgggggcttagcgggtgttctccccgtgtgcagagacaagagatcgtaagaaataaagacacaagacaaacagataaagagaaaacagctgggcccagggaccactaccaccaagacatggagaccgctagtggctccgaacggctggctgcgctgatatttattgaatacaagacaagggggcaggctacggacggtgagtcgtccaagtaattgataaggtgaagcaagtcacgtgatcataggacagggggcctttccctcttagggtagccgagcacgagagagaaggcagcatacgtcagcgtttcttctatgcacttataagaacaatcaaagactttaagactttcactatttcttctaaccgggtatctactaacgaactttcaaagaggaaccaggagtacgggaagagccttgaaagtggaccacgcagtgtgatcattcaagcccacaggagggggttaaggccccggatgactgccgccaggcctgggagatatccgctccaa

SEQ ID NO: 414928 - DNA, 1366 bp, Homo Sapiens
  misc_feature (289)..(379): n is a, c, g, or t
  misc_feature (390)..(480): n is a, c, g, or t
  misc_feature (514)..(573): n is a, c, g, or t
  misc_feature (586)..(697): n is a, c, g, or t
  misc_feature (707)..(830): n is a, c, g, or t
  misc_feature (835)..(843): n is a, c, g, or t
cggatctaggggcgcggggctggcccgctccccgctggcctcgcggcaactgggcctccccctcgctgacgcagacctccaagctccatgagaacctcatagcacacagattgtaccagaaaacgcacggactgcacacaaggaacggcacacatgcccgagccatcagaactacgactcagcactaagggaagcacccaagaaacaacgaaagagcacgacgaaacagcactcagagccaggagacacaaaagaaggaagcaaacaatcatacgacacgagacagcannnnnnnnnnnnnnnnnnnnnnnnnnnnnnnnnnnnnnnnnnnnnnnnnnnnnnnnnnnnnnnnnnnnnnnnnnnnnnnnnnnnnnnnnnncgaataccatnnnnnnnnnnnnnnnnnnnnnnnnnnnnnnnnnnnnnnnnnnnnnnnnnnnnnnnnnnnnnnnnnnnnnnnnnnnnnnnnnnnnnnnnnnnccgacaagacaaagacaacccagcgaccaaaccnnnnnnnnnnnnnnnnnnnnnnnnnnnnnnnnnnnnnnnnnnnnnnnnnnnnnnnnnnnncaaacaccagcgnnnnnnnnnnnnnnnnnnnnnnnnnnnnnnnnnnnnnnnnnnnnnnnnnnnnnnnnnnnnnnnnnnnnnnnnnnnnnnnnnnnnnnnnnnnnnnnnnnnnnnnnnnnnnnnngcaatcaacnnnnnnnnnnnnnnnnnnnnnnnnnnnnnnnnnnnnnnnnnnnnnnnnnnnnnnnnnnnnnnnnnnnnnnnnnnnnnnnnnnnnnnnnnnnnnnnnnnnnnnnnnnnnnnnnnnnnnnnnnnnnccagnnnnnnnnncgaaacaacagagacccagaccccaacgagaccacagacaccacgacacgaacaaatagaataggcaggacggaaacaaggcgagaccgacacggacacaaaagcgcagcagcaaacaacaagcaacactacccaaaacacagagacaaacgaatccacacaccacagcaccacagcaagaaaccgtcgctggacctccagcgcacccaaacgccaatgaacacaagagaaagagcaagaacacccagaactaccaggcaaacacaaacgagcgatagacgacgcagacaatccacaacagagcacgggaatagagaggcgagcaggggaaccaagaagcacagacgagacggaagcagaggaacagacaaaggagagacggcgacgacactcactaacgacacagaggaacgaatacccgacgacgacggcggcacaaaagcaccacacaaaagaagcacacaaggagcgaaaagaagacaagcaacagaactcagcaggcgagaacgacggaccagcccga

SEQ ID NO: 414929 - DNA, 1010 bp, Homo Sapiens
agccaacctgagggcgttcctgtctggggctgcagcgtggcgggaggtaatggcatgtgccagtgcctggctggtgctgcagagcgcctgtgcacctggtgtccacgcctcgtggtgacgggcttccaggatgttctgggcgctggggcggcccatccgcatcccccaagacccacacctcctggcctgatgcctcccagctgcctgtgggaaccacctcctgtcctgctgttgcttggccctgcatcctaggcagctggccatgactgccctccccagcctggcatgccccccttgacctgggacgatgagcatacgactggtgtaaggtgcaaggctcgatgccccgttgccctactggaccacgagggagtagggttcgcatcataccctttgtcccctcgtgatacgagacctcaatgcgaagcctgggtcgcctggacccttggggccaatcaggcggtgcaaacttgcccccaaggaacgatcatcttctgcttcatgctacgagtggctgactgacccttctcccaccctactgacatgctcagctacagtgccacgcgaaggggggcagggaccctgggccggaagcccaccgaggatggagacaaacgagcgacaggggtggaccaattccacctcctttgcaaacggagttaccaaagttccaggactattaacccccacatctgatgttccgaggcgcttgtggtgagcaactgaaagtaaccagcaattgggggcgaagaacggcgtcgttaatcggggcccctgcaaacatggtacataggagagggtctgcagcaccccgacgggagacaccgagtgcgtgtccaattaggcaccagcactcaccgagtgggcacattgtgtgattggccccaccagttactgccgttgaaacgacctggggggacatgtgggaaccccaatgggaacatgcagaacgtccgggtgtcaatcccgctaacagggcatgtgttcccgccgattctgtacaagctccg

SEQ ID NO: 414930 - DNA, 275 bp, Homo Sapiens
cacccagctcaagccttcgctcccagcccagtagacacacacacgtagatactactactactaatacggttgcgtacacgcgagggtgatccgattacgttagcatagcactagccattatttttttcatttcatctcatccgggatctgtcagttacaccacggtactagtagtagttgctgcggcgattccccgggaaaggaaaaagaggttgctgcggtgattcccgccatggaggtgtgctgctgctccacctcgtcctccctcctcgcct

SEQ ID NO: 414931 - DNA, 824 bp, Homo Sapiens
atcctgcgctccccatgcaccaccatcccaaactcaggcttcaggcagaaccaagtcatcttcttcacgaccagaagcagcaggaggagtaacacgaggcatggggcaatggaccttccaggtctcatgcgcagttgagcagccaatagtgattggcctggcagcagactcgggatgtgggaaatccaccttcatgcgccggctcaccagcgtgtttggaggtgctgcagagccacccaagggcggcaatccagactccaacacgctcatcagcgacacgacgacggtcatatgccttgatgactaccattccttggacagaaccgggaggacaggagaaaggtgtgaccgccctgtgacccccaaggcgaaacgacttgtgatctcatgtatgagcaggtgacaggcaatcaaggaaggcaaggctattgagaagccaatctacaaccacgtcactggcctcctcgacccggcggagctcatccagccccccaagatcttcgtcatcgagggtttgcacccaaggtatgatgaacgtgtgagagagctccttgatttcagcatctacttagacatcagcaatgaggttaagttcgcatggaagaattcagagagacatggcagagcgtgggccagtcttgaaagcatcaggctagcatcgaagccaggaaacctgatttgatggctttattgatccgcagaagcaatacgctgatgctgtgattgaaagttctggcgacccagctgattcctgatgaaccacgaaggaagggtgccgcgtgttaattgatcattgaaagaaggccttaaggtcttcaacccgg

SEQ ID NO: 414932 - DNA, 341 bp, Homo Sapiens
cttctcctccccactcagtcctcggttccggcccggttcggttcgttagggtttagtagtggggaagaggaggaatgaatggcggacgtcgagtaccgctgcttcgtcggcggcctcgccatgggccaccgacgaccagtccctccagaacgccttctccaagtacggcgacgtcatcgactccgaagatcatcactgacagggagacgggccgttcccgcgggttcgggttcgtcgaccttcgcgtcggacgaggcgatgcgccaggcgatcgaggccatgaacggccaggacctggacgtgcgcaacatcaccgtcaacgaggcccagtcccgccgctc

SEQ ID NO: 414933 - DNA, 803 bp, Homo Sapiens
  misc_feature (517)..(517): n is a, c, g, or t
  misc_feature (525)..(525): n is a, c, g, or t
  misc_feature (529)..(529): n is a, c, g, or t
  misc_feature (571)..(572): n is a, c, g, or t
  misc_feature (579)..(579): n is a, c, g, or t
  misc_feature (602)..(603): n is a, c, g, or t
  misc_feature (611)..(612): n is a, c, g, or t
  misc_feature (631)..(631): n is a, c, g, or t
  misc_feature (666)..(667): n is a, c, g, or t
  misc_feature (681)..(681): n is a, c, g, or t
  misc_feature (713)..(713): n is a, c, g, or t
  misc_feature (724)..(724): n is a, c, g, or t
  misc_feature (756)..(756): n is a, c, g, or t
ccgccgctctccgaggctcctgaaagttgcaacctctccctctcggcgaatttgggggtttctgaagcgcgcgaggtaaaccaaggttttgctcatggctcgtactaagcagaccgcccgtaagtccactggaggaaaggctcccaggaagcagctagccaccaaggctgcccgtaagtctgctcccaccactggaggagtgaagaagcctcaccgttaccgccctggaactgttgctcttcgtgagatccgcaagtaccaaaagagcacggagctgctcatcaggaagcttccattccagaggcttgttagggagattgcccaggacttcaagactgacctccgcttccagagccatgcggtgctggcccttcaggaggctgcagaggcctacctggtcggtctcttcgaggacaccaacctgtgcgccatccatgccaagcgggtgaccatcatgcccaaggacattcagctggctaggaggatccgtggcgagagggcttaaggtggctggtgnccttgccnttgncctggtgggcgaaaattcgctcctgggggctgggccattctnngtgtctngcgttttggcgctggcgtgaacnnacttatcnnatgtgtccgtggggaaacntacttaattactgggtccgtgtgtacgtaatggtnncagctagcgttacntcctggttggcccaattacttaatggcttccngggctagaagncgtggggaatccacttttcggtttcccggtanagggatccggttcttttaacattcaattccaaccctggcgtgggaga

SEQ ID NO: 414934 - DNA, 428 bp, Homo Sapiens
gcatgcctgactagctacccactgtaacattttcccactcaagagtccaagaccccaaatcttcggaagaaaatggatgaagggtatgagagtcatttgtggcataacttcaacagacatgacagggctgactttgagttgaattataaaatttccaaatgaggatgtccaggaaccagatagacacgtgagttagaagctcagaaagcaggtcaccatcacctcttatctgatcattgcaacacttgcttacttgtcctcctatcaccagatctggctcctgacaattcaccttgcgtaatgagagggataaaaaccttatatatgaaactttcactaataacctgaaacatcaccacagagacagttgggttatcctgtttgtttggacatccacttattcacttgaaatgcaggaaatctatttg

SEQ ID NO: 414935 - DNA, 849 bp, Homo Sapiens
  misc_feature (427)..(760): n is a, c, g, or t
ggctggtgagaagcttccccagactgagctccaaacacctcccctcccaggacatcttcctgcccacaggctcctgttgctcctttgcagagtccttgattctccagagcagtcttcattcatggtcctgagcagaggccatgggatggggctctggggagtgactcatgacacctccctaggatgtgggaaacacgccaaatctaaacacatcaggacacctctcctccatcgtcttggactctccgtaagccacaaactgcagtccagattctcaagagttattctgccttctggattcctgcctacccaattacccagccttgttgagattctctattgcctcctgaatacaaattaacactcatcctggttttaaggagaaaaatgattatccttcctctttgtttatacgtatgatataatnnnnnnnnnnnnnnnnnnnnnnnnnnnnnnnnnnnnnnnnnnnnnnnnnnnnnnnnnnnnnnnnnnnnnnnnnnnnnnnnnnnnnnnnnnnnnnnnnnnnnnnnnnnnnnnnnnnnnnnnnnnnnnnnnnnnnnnnnnnnnnnnnnnnnnnnnnnnnnnnnnnnnnnnnnnnnnnnnnnnnnnnnnnnnnnnnnnnnnnnnnnnnnnnnnnnnnnnnnnnnnnnnnnnnnnnnnnnnnnnnnnnnnnnnnnnnnnnnnnnnnnnnnnnnnnnnnnnnnnnnnnnnnnnnnnnnnnnnnnnnnnnnnnnnnnnnnnnnnnnnnnnnnnnnnnnnnaaaccacccctccccccaaacaaacaccacacctcacgcgcgagccaagcccataaaaccacaaaacagggcgggcgcataaatcccct

SEQ ID NO: 414936 - DNA, 900 bp, Homo Sapiens
  misc_feature (432)..(441): n is a, c, g, or t
ggagagacctcgtaacggaactgggacgccagcgctgcattgtgggagcttttaaatgcggcggggagctcggcgcgaccctcgggcccaccgggccacgctcgcccggcccgcgacgcccccccgctgtcgcctggcccgcgacgcaccgaggcctgaggacccgaaagccgggcgcggggagatgaccggtggctcgtgacggtcccacgggcaaaatcttccatcgcccggggctgagacttgtcaaactgccctctacggtcacccggacacgtaggcaggctttttcctgcagacggggaacacaaaatcaaaaagagccgttccatcccccctccaaggactgggtttgaattgcttttcatctgcagtggctgtgattcagcgtccctcttagcagcaggcaatgacagaggcaggagcaggggnnnnnnnnnncgaacgacagaaaaaacacagcaaatgattcaaacggacgtgagtaacaaaagtttagaaagagctgggctcgtattcagaaaaaacgccttcatcccccccgccccgttgcactctcaacccctttaaaaattagcagataatcaacgaaacggaaccgggtgcttccatattggacattccgggattgtcaggtagccaggcaagagtgtgggtactcgttggcaccggatttcaggcatctgactgagtagctgactcttatccagttggtgttgatcaccagggaggatctgggacctcagttatttaccacatttagagcttataatcacattccttgtaagccttcctgagatcacaccaattgtcttgatgggaattggtaacaaccctaaatcctgcgtcctaatgatttccaggaccgggcctaatagaatccgtgaattgccaatcact

SEQ ID NO: 414937 - DNA, 629 bp, Homo Sapiens
  misc_feature (129)..(191): n is a, c, g, or t
gccacagctacagcaatggaagctctcgcctcgtcgccgcgggctctcttcgcccgcaccgccactccgacgacggcgctggccacgccagcaagatggacgccgtcatcgaccaggcgtgtcaaggcnnnnnnnnnnnnnnnnnnnnnnnnnnnnnnnnnnnnnnnnnnnnnnnnnnnnnnnnnnnnnnncaagaagatcctcaagaagaagcccgtctactccatgaagaaagggcagatcgtgcgcgtcgagaaagagaagtacctgaacagcatcaattacctgtcggtggggcacccacccttctacaaggggctagactacatatacgaagaccgcggcgaggttttggacatcagaatcttcgaagaaaccggagagtatgctctgatcgcgtgggtagggattccaacaccaccagcatggctcccaacttatatgctcatcaagtcagacaaactcgactatgagaggatatgatcgccggatgagcgattgcgagggagaacaatgttttgtgcatcaattgatgtcgctatgtggtgatgttgtgacattgctccatggatacaagattaagcagttgtaaatcgaagaaacaacagtgaaatatatccaaagttgtt

SEQ ID NO: 414938 - DNA, 515 bp, Homo Sapiens
gggaacaggaataaatgaatcaaaaagctatcgggcctttttgacatgggacggaataaagtaactaataggcaaaggggctaaatgatttccagtcaagtaattagagataagtcatttattaaggaggcagatggggtattattggtatatagatggcatagtagattgctagtatattggtagattattggtatatagatggtatgttaaggaggcagatggggtattactggtatatagatggtatggtagattggtagtatattggcagattattggtatatggtatgttgaggcagatggggtattactggtatatagatggcatagtagattggtagtatattggtagattattggtatagagatggtatattattaaggaggcagatggggtaattagaggtgagacttagggacagggcttgtgatatggacaaggagtgaagtcactgagtaaaagacaagtttactgtcagcagagattcttagaggctcttttctccgtgatt

SEQ ID NO: 414939 - DNA, 803 bp, Homo Sapiens
cgccgcagctcgcgtgacgcaccgcggggcctcgcccgggtgttcgctccgccgcctgtccgcggatcggcgctgcgagccccgcggctgcctgcgggacacctgagcgcggagggtgcggcaccttggcaccttgaccctgtggcagggacatctcggcccaggaaagaatgaggtttaggcacggcctaaccacctaagtgagggcactgaagctgccgggggaagggcaaggtccgcgttgcagagcccaagcccagtggcgcaggatttgttttggtctcagtttgcttcatctctggaatggagatggtttcctatgtgatcatgaaaatttctcccagctctgaagaccttttattttgtaagaatcattgtgaaggtatgggcttggcaaatgaatggaaagatgagcaatgggagaggaaagaattgaagagggctgtgaggtttgaagaatggcatcccccatgaagtggcgctgaaagatcacgatagcacagttccatgatgtgaaataccacaagtctgcaatttttcggtcttgagagtgtcgctgggctgagaggatggaaatctttcagtaattataccagtttgtattcgtctcacatttgggaccaaatacaaatccgatccactctttctccctgtgaatattcataaaaaacaaagtgccaattctgggtctaatcatgtatggaaccaaatatgttgatgagtcctaagtatatactgtatgtatgtatacctatgactatatatatttgtacacaactaattttgcttgtgtcttcctcttg

SEQ ID NO: 414940 - DNA, 1041 bp, Homo Sapiens
  misc_feature (494)..(577): n is a, c, g, or t
  misc_feature (806)..(819): n is a, c, g, or t
gcagctaccacaaagacaggtcgacctcaccgaggagaagaaaggagaagcgagaaagatgtcggggcgcggcaagggaggcaaggggctcggcaagggcggcgccaagcgccaccggaaggtcctccgcgacaacatccaggcatcaccaagccggcgatccgtcgtctggcgcgtcggggcggcgtgaagcgcatctcggggctcatctacgaggagacccgcggcgtgctcaagatcttcctcgagaacgtcatccgcgacgccgtcacctacaccgagcacgcccgccgcaagaccgtcaccgccatggacgtcgtctacgccctcaagcgccaggacgcaccctctacggattcggaggctaggccaccatcaccgccagattagagtgtctagggttcgtggtcgttgatgtaatcgcagtatctcgctgctgtttgctatcttctgtagaatggaattgaatggaaatcgaactagtttatcgttgnnnnnnnnnnnnnnnnnnnnnnnnnnnnnnnnnnnnnnnnnnnnnnnnnnnnnnnnnnnnnnnnnnnnnnnnnnnnnnnnnnnnagcccaagaagaatacccgccggggggggccccgcaatatatgggcgaaaccccaaatatgttgagagaaaaagaggggtcgccacaaaaaggaggggcgcggctcaaaacgcaccgagaagacgagaggcagcatgatacacaaaacgcgagtctggatggaggaaaaaacatgtgaccacagggcgcacacaacctagcggagagcgaacaaccaccccaaaccgcnnnnnnnnnnnnnnacaaacacatagagggcagacaaacacacaaaccaactgacagaagaagacaaagaacagccaccgggacggaggcgacatcacacaaccgcaccgccaggaagggacaagagggcgagggaaaaacaaaccgaggacgtcaaactgagcagcgtgccgcactcgaaaagacctgagtaggacaccgcagcaaactgataaaacaaagaacaaaagctgacc

SEQ ID NO: 414941 - DNA, 818 bp, Homo Sapiens
  misc_feature (287)..(295): n is a, c, g, or t
  misc_feature (395)..(669): n is a, c, g, or t
tcctttgctgatagggcctgcgtgctgatagttgattcagtgaatatatgtagcagtgatagctcatgggctccagaggtcagatatcttattctctaggctgaaacccttgttgctttaaggaaacaggattttaataggaatcacatgcagattgactacagggagccaagcggtagtggaagaagcaaagttggcggtttggagacggacgtctatctatccacagtgggacaaaaatgaaggttattgaaaagaatcatgcttggtggaagaagtaattacannnnnnnnncaaatctcagaggaataatgcttttatatttcctgcgatgacccaatttgcactacgatatgctcccttaaatgtgatttaaacagaagagaggaccacnnnnnnnnnnnnnnnnnnnnnnnnnnnnnnnnnnnnnnnnnnnnnnnnnnnnnnnnnnnnnnnnnnnnnnnnnnnnnnnnnnnnnnnnnnnnnnnnnnnnnnnnnnnnnnnnnnnnnnnnnnnnnnnnnnnnnnnnnnnnnnnnnnnnnnnnnnnnnnnnnnnnnnnnnnnnnnnnnnnnnnnnnnnnnnnnnnnnnnnnnnnnnnnnnnnnnnnnnnnnnnnnnnnnnnnnnnnnnnnnnnnnnnnnnnnnnnnnnnnnnnnnnnnnnnnnnnntttcacaaaggactgggttgaaaactaagatcttaaatcaattcatcgtgttgggaatggagcaggatagagatcgttcctgaaagataaaacatacgtgcagcatatgcacttgtgcatacatagtgctggttaatgacatatgtcag

SEQ ID NO: 414942 - DNA, 719 bp, Homo Sapiens
ctgaatagtattttgtcttctgtatgactttattctactaggatttttgcgggggagcggtgtcctagtccatttgtgttgctataactgaataccatagactgggtgacttataaagaatggagatttatttagctcattgttctggaggctgggaagtcctagagcatggtaccagcatcttgtaagggccttcctgctgtgttgtgacatgatgggaggcatcacacggtaagacagagcaactgtgctagctctgtgtaactatacaattacatgtctacaaataattttttgttcaaatcttcttttctaatattgataacactccatacccactggcctaaactaataatgtcaataatgggcattttgttgtatgtgtgtgtatattctgttctgtaacccttttatagctcaatacatgaggatgttttctactataagtattagtttctagtatcaattttattggccttgtactattccacaggatgtgtgtcactatatcacctagagaggggggagtatcccctcttgtcatttactcagggggccacaggagactatcgggatggtgtcttccactgttgaaggagagttggactttggacgtgaggtatcttttctgggtccccagctggctctttcattcattcattttttctacacaaataagttatccacgtacctaagtaccttaagtacttggggttggg

SEQ ID NO: 414943 - DNA, 798 bp, Homo Sapiens
  misc_feature (258)..(258): n is a, c, g, or t
caagcatcgtctgccctgtgggggcgcagctcctggactttttaaaattcctggaattgtgtctctctatcatggggctggtactattaccatacgtttcagaaaacagcatctgtttacaaagcgtgttattatacaagcacagaaatacatttcaccccaaatgataacagtgaacttcagcccccagaatctccttctccccttcgtgaaacagagctgggatgatggcagaggactccagaacgcactgagatngttccttggcgtgacaaatggcaaaggactctagaacgcacagagattgttccttggtgtgacgggccagacagcacacctttcttcaagccattctcacatcaaataaaacgtgataaatcattgtttctctaagcttgaaaaatgctactaactcaagacaaggtgaaagtgagtttgttgaaatcaacgtgaaggatcgagggtaccaacttggaatgtaaaaccatagaaaataccatctgggaacacggaaatcatctgtcttatctggaagcctgtctccagagtggcaaacttagggactggtttgaggacagagtgtgccctgtgtgctggggaggggtgtaaaggactgggatggaggagggggggctccagatgttcttttacccataaatacactgtacatcaccgtctgccactgaagcttaaggattgaaaaccttggggatgtttcactggtttgcttccgcctctgcatgtttgaactgcattttctgagccacgtatgcaataaagcttacatgcattaccacc

SEQ ID NO: 414944 - DNA, 801 bp, Homo Sapiens
cttgtgtggccgagagagcagcgctggtgggtagactgtacggcgagcaagccggagccatggcctttacccccacgtcggtgtcggccaccctgccgccgtcggctcctcctcctccggcggccaccaagggcacgccccgccgcgcgccatggaatgccgcgccgctggccgcggcggcagcctcgtcgacggctgcattgatggacgcgacgccggtcgcgcacgccgcggcgttctccaaggaggacgtcgccgggtcgttcaccaaggtggtggacacggtggatgcggtgatcggcgtcggcggcaaggtcgccgagcagtcctttgtcgtgctcagggcgctgagcgaggccgtgaagcccgcgctaccggtgctgcagagcgccggcgagcaggccctgaagctcgcctcgccggtggtctccgacgcctccaggcaggccacggaggcgctccagggcgccggcgtcgaccttgcccccttccagtctgctttcaagacggtcgcagatgcggcgcagccggccttcggcgccgcgaagccgatcgcctcggagactgtgcagaccatcgggtccctggaaggcacggactacgtcgtggccgcggagccgcgttcctcgcgtacctgctcctgccgccggcctggtccctgctctcatacggcctgcgcggtacaaaggtgacctgagcccagctcaagctctggacatggtcgcctctcaaaggctaccttatcatcgacgtgcgaaccgagaacgacaaggccaaagccggcgtgccggagtcccctca

SEQ ID NO: 414945 - DNA, 168 bp, Homo Sapiens
gaggaaccacaccgacaccccatccactttatctcagtagagaggtttagaagcagtgaagcacaagtgcagcaagagctgcgagaaggaggagcgggcagcaatggcgaggcacagcctccttgccgtgctcctcgtcgggctagtcgcggcctccggcttcagcca

SEQ ID NO: 414946 - DNA, 232 bp, Homo Sapiens
cgcgggttccgttggctgtggcggcagctgtacgcttgtgtgcggcggtggcttcggggtgggccgtagcatggtccacatgcgaggcgcatggtgcccccttaatgcgttgcgtgtgagggcgtggcttgtggcagcagaagctggcttctgtgctactccagagataacgtggagctagggctagatcgtggtagtgggcctggccgatcgggctaccggcttacccccg

SEQ ID NO: 414947 - DNA, 833 bp, Homo Sapiens
catctaccctgttttctgtttctgcagatggcttgttcaagcttcattttaagcctgctctgtctacttatcttccttatatcctaatagacttctcttgtgttattacacatttctcttttgctctaatatttcattattttccagttgtcagtaccgttatcagagggacaaggaaggaataacacaccagttgaccatttgtttctctgaaaatctgagcaatacggagatccttttattagtaaaactgaatcattactcatactacaagggctttcacttttaaaatgtaatccatcattgcttgccatttttatgaaaaccaaagttgaaaagtcttctgaatcacaggctatgtatagccacacatgcatgacttcaggctagcataaagacatgtctgctcctgagcctcttcttttaaagggcaaccacttgtataccctctggtggccactcctccttctccactccaaggcagccctggtactttcctaagtggcccctcctacagagcacttgccggcatttggcctgctgctggtgaagacgccccttactagcttcataaatgtttttctgcaagcagggatcccagacacatactttggtttctagtgtttcagttactatgttgtatttgaaattctcattccacaattaccctttagttgaagtcctgaagtacatgccatgtactccccctttatttctaccttgatcaatggcctctgcggagtgtagtgaaaagacaatcttttattatgatctacactttaaaaaaccaaaggctgcctgtattaccttgcttgggggagtgttaagactct

SEQ ID NO: 414948 - DNA, 475 bp, Homo Sapiens
ctccaccccgcaacccacgcagacgcagctcgaccgaccacaactgtgcgcagcagcggcggccggcggagaccgtatcgtaccatggcgatggagggctacgaccgcgagttctggcagttcggcgaccagctccgcctccagacggccaccttctccggcctctccctcggcgactccatctggtccccacgccgaggccgcgcgcaagcgcgcgcaagcgcggaaggccagagtcgagacgcggccgtcccagggggccaaaagaagagcggagacggatcgacgacgcaaggatgaacgagcaggccatcatacggggcgcggccttcattcgggctcacggacgaagctgcgtccgttacggcgcacaacagacaccaggcagaggccgaaacggtgacggacaaacgattcaggctccccgacggacggccggagaacaacgcaccgaagacaaagacaacggactgta

SEQ ID NO: 414949 - DNA, 1030 bp, Homo Sapiens
cgggaacggggagcgcggctgcagcacccctgagccgcgcggacctccgtcgccccgggcgcacccgcccctgggtcccaggtgtgtccgtctcgggacggtcgataccctcgcagagccggggaagaggacggaggggggcccagaggaaggagggactcagggcgcgcgcgccatgagccctgcgagcacacacgacgcgcggtgcggcgaatgcgctccgtggccgtgagcgcccagctgtggggcgggggccggggtccatgcgcggatgtccccactccggaccggagcactgccggtgacaggagagcggtggagtaggagagggacagcagcagccataggatctccattagactcaggccacattggggcagggtcagacaaacccagaaggggaacaggaacaagaggaagcattagaagaccctcagagggacctggggcacctacacaccacgagacaccaagtgcttcatgaaagggaccaccaagagacgcatgcccggcgacagggcaccgtcagagaccaaactgggcacccggagaaggggataattgagtgaggcactggccatagagcttcgaccccaaggggccaatccgcagggacttgggccacccagaaaagcaaccatgggagtaaggcgttgcgcacaagaaagacgcagcgtagccacccagctaagataaccaagaggggcccgtaagtgggggcccccaataatcgagccactctaccccgaagaccaccatcgaacaacagagccctatgggacaaacgggacaacggaggcgccgtgacaggaagcggaggacggcatcgaagcttcgagggaacccatagggagaacacagcacgacaacaattcacgcgaagctacctggcgaccgccgggcggcgctggcggaagaaacagcaggcgaaacatggcgtaacgattgccacgaagcccgagttaccgctcgagccagggagaccggactgaatcgccgtacgcactcacacataccggaactgatcacg

SEQ ID NO: 414950 - DNA, 800 bp, Homo Sapiens
gtacaatccctattttaaaattcccctaacaataatagaactgccagcatacttttctctttcagttgtagatgaatacattcgagagaatatgagctgtatttcatcctagattttaatattttcagatgtgactgtatttcctgatcattggtccaagttgtcctaaaagaaatttttctctccagacctaacagttttaactgcaagagtttactgtgggttatgttaatctgaattttaatagggccactaagaatctgagtgctttaggagattacccttatacccactgccatcacatccagtcaggcctgttgtgctctatataaatcttcccagctgaggggcaggtgcgggctaaaatccaactgcaattggctcccagacataattttatattttacagagaagcatcttattggcttatatgtgtttaaagaatggtctggcttatacatcttcagaaaatgagaattaaaaagtcaaaataattcttgacatctacagattgaacaaagaacttagaagaaataatactttatcttttcatcctggcattcctgagagaagagaaattgattgtttatcatgttggtttaatttttcaacccagacaatctgcagcaaggcacatggaccccaattttgatatcgtccatacagttttcattctatgcatggagctaattactgactttgcctgtaaagagaggattgtgtgcctaaatttgtctaacaatgcaagcgtagatgacattactaatatttctatttcttccataaggctaaaataatag

SEQ ID NO: 414951 - DNA, 993 bp, Homo Sapiens
ctggactccccctcttggtcctactagagacctctcaacagatcgtgtgggcccagtcagttgaggtattatcaggtgcttaattgtgaagctaatgttggtacttgccacagaatctacaagccactaccttctgacctccccacacaccgtcactgaaccccctatcatcttgaaataatgcatgtggggcatagagacttccggaatgatcgagcatgatatcctcatgagtcttgtccccaggggtattagcggcctctttttatgaagcagggaattggattcgaagatttggacgatggtgctccatcatgattgatctagcgtaactgggaggctagatgggccatttcatagcacatacgctaagcgcgtcccgtcgcgtacgtcacgccatgtcgtctgggaaaacattggcactgcctatgatgttaatgcaagacgatctatgtttgcctacccatattgcgcctgcaggagctcgacgagtacagatgtttcgacgcaacggcccacaattgtggcacaggagatatttccagtgcgaacatcgaaggaattgcatctaactgtctttctatgtgcgtgtatgaagcaagaagggaatttaaaggatatccacttcgcatgcctagttgtcgctcccatttcatgtttcccttcgcaaaagattcccgtgacccatgaatagattttggtgggtgtgaataatcccaaggttcccctaactgagaagcggcaatcaaacgtaggttcaggaaggattttcggacccatccaacgtttgttagagagcccctcgatagacggtagatcgttgttcagaatggttccattttagatgtgcgactgaacatttccagaggaggtccaggatacctcggtatttataggcaattgggctcagatctatagcgagtagtgttgaagacattataagccgtaggatgatagcaagaaaaattgtcatgtagtaacaaaaggaatcag

SEQ ID NO: 414952 - DNA, 156 bp, Homo Sapiens
tggctcacacgtcacgcatccagtccccgagtcgtcgacagcgactgcccgtcgcggagcaaataacgtcgaccctggtcgccgcactcccgccctctccaccttcccgcctccctccgttccctctcctcgccgctcctgtggcccgccctgggg

SEQ ID NO: 414953 - DNA, 874 bp, Homo Sapiens
gttagtcacttacttggtcttctatatatacctgtttcttcccaaatagggagccagaatttaaaaaactaattattggtgaccacagcaaactaattatgtttcccaatggtattctaagttgtctctttagttatccatactattattatttcttctgtccttttttcactgttacaccagagtggagaagtagaattattcagaatgccaaagatctagagaggtgaaatttaactgttctgccatgtccatcttgactgtgactccaaactaaaataagctaactagtgccttgttagctagcacaggatcatttcatttttagctaaaaggaaataaataactgggtcagggctatcaataagaagacaggctccatcttccaaaagtcaccaaagttaaggtaaagagggtcaatcacattgttagagaataatactgatcttagggtattaactgtttcagacagctcttggtttcaccatgtgttacagtatggaaaattgaaatattggtaaatggcttttaaaggccattaagccataattatcaaacactaaagattatttcttttttcaaaaatagacgttatgacacggttataacgtcgactgtacactggtcatcacggtaacctctagtggaaatgaggttacaacatcacaagacagaatgtaatgccgatcatcgggactggcattatcgggcaaaactagaacctgacaaggatgttcagccgaaaaagtcactcatagacagtgagactacaggttaccagacgggatagacatcggggaacacagccgatcggacgaacgggacacaacgcccataactgcacaggcctgccgacgttggcccaaaccaaggg

SEQ ID NO: 414954 - DNA, 589 bp, Homo Sapiens
ccctttcaataaatccagctcagaaacacctattgtcaaaatcttcaactcgccacaggctaccaccactccctatggctttgcaaaattaaagatttagaagaaggatggggcggtggaagctatgaaaagaggcagaaaaaagttcctttgacccgatgctgtcagagagcgtgcatgaagaagaaagttaatggtatttccatttatataagaagcgcctaagaaatgcctgtgacgttcgtgaactagtgattgtgaattccaaatttgatgccaactttatgtgtaaagaagctaactcctgccaacatcgtggctgaatgaacagctgggactatgcttaacccattcccagcttataaaagccccatggcagctgcagtgaagcatcaggtgagtctgatatgggctgtctgttccctcggggatttgaatcttgcctgtcctttccaagtggagtcttgtgcctaagtgctagagcccactccttcctccccactgattcccttctttccatttctgccatattcgcctttcttgcattttacataaccaacttggggaccattcttcttggcaaagaaac

SEQ ID NO: 414955 - DNA, 533 bp, Homo Sapiens
ccgctcccgcccctgccgctcattcctgtccggacgcacctgcagctccccggggagaagaggacgccccccatccgtcccccaacaggcttgcgcccagagacgcggccagccggggccagagagcaactggaagaacatgcaggccgtgcaagaccaatgaacgaggcaatctacgcctaggatgcatagcgtagagacgaacggatgcttcgagagaatcggagcagacgcagcagctctaggccaatgatgattgcgacggaaatagaaccaatgtaataaacagaatacaagaacagttagaagcacgaaaggcacgagacaacgcaggacaccggacagagcagaatgtgccacagcgagatgacgcaagcgcgaaacgaatcaacaagcagacccatgtgagacaggagccacaatgaggaagaaacacaggaataacagagaccgaagcgtaacgggatggcacaacacataaagtcacaaaacatagaaacatacagagatatccgtaaagggagcacacatga

SEQ ID NO: 414956 - DNA, 780 bp, Homo Sapiens
atgctattagagtccagtaagtcaagagctgattttaaaagggcacaaaattatcttgctgtgaatggaatggctttccttcagaatcctgggggtttgcatgtgatttctccacttggattgccacaagctccatattccttttcctatagcttttccctttttccactttttcccatcactgacgcttccaactccacaggatctgctggtcacccagctgtagtgtcagggatgattgtactgtgccttatgcctgctgccatgccctttttgttgtgagccttactcagagatgtcagctttctgtgtcaccgggtgacaatatgtctggaacaatattcctagatgtggaatgtcttgattttagaagtcaaagaggccatccaggtgccatgctacctactttatggtaggtgatgcaagatgcaggtgacattttggaaggagtatcctgtcaagactcctgaacttgaccactaaaacctttactgaatattcctgcaatctatctcccatcctctggagcatcttcagtctcctagctaacgcttgctccacctgtccattcaccatgacacaatcaaatgaagtggatcagtgtaacacgctgtgaggtggtccagatgttatttggatatcataacagagggtgggtgaagtaatgtaaccttgaggcagtactgtacattaatcttgctgtctgtccatattgactacaaactgtttccaatactgtaatctagttgcaatggcacaagactgcataatcagatcatg

SEQ ID NO: 414957 - DNA, 629 bp, Homo Sapiens
  misc_feature (95)..(132): n is a, c, g, or t
  misc_feature (338)..(390): n is a, c, g, or t
  misc_feature (417)..(492): n is a, c, g, or t
cgacaatcgtgttcttaattcttgttaatatgttattagagttagaaaggattccttcttatattgcagataaaagaaggaaatgtgtagaaggnnnnnnnnnnnnnnnnnnnnnnnnnnnnnnnnnnnnnngtgcctcaaatctgaaggccttttatgtatagattgtactaggacctgcagatctagtgtctttactcatcataggtaacaattggatttagcgagaaaatataggtatttctgttttgagtttcgttaacagcaaattgtttagatgggattaaaggcccaaaatgtactctagttatctttgtggaacccatggatgaacaccnnnnnnnnnnnnnnnnnnnnnnnnnnnnnnnnnnnnnnnnnnnnnnnnnnnnntactcaccgttggactcaaactcaggnnnnnnnnnnnnnnnnnnnnnnnnnnnnnnnnnnnnnnnnnnnnnnnnnnnnnnnnnnnnnnnnnnnnnnnnnnnnagtggtgttaaatcttgtgtaccaggtcagaataattgttttagttggaggagctaagttgaaataagtatttggttatcataagttacagttcataagcactttaaaaataaccccttttcttcaattaactatat

SEQ ID NO: 414958 - DNA, 191 bp, Homo Sapiens
ctctttcttcacacctccagtcctccacccaccctcgcttcccagtcgcgtacgtgtgcagttcacaccaacccccaccctgatcggccgcatctgcatcgggagcgtgaaggaagaaaaaataggaggccatgacgctgctgtgtgtgccgctggtggggcggacggtcgaggagatgaagatcgacgcg

SEQ ID NO: 414959 - DNA, 1147 bp, Homo Sapiens
ggcgggatcactagggccacggtgctaggcagaagggaacctgggatgacagagccactatggagcgctccttccactcctctccaaatgtcctttgttgctctggagctgacggtccctgccctgcaagaaggtgcgtttcctaaaacacccgggaagccaacccagctacacttaagtaacccagccacggacagtgcccgacgcgtccgtgggcctctgaggttggccttcaaagaaatagagccgtccaaacgtgtcatcaggcccacacaaagccggtgtcaaagagaaagaggttctccgtgccttgcaaaaaaagattctcacaaaagacttaagacttggcagcaggtccgactgtgccctttcaggataggaactgctcaggtgtgtgagagaaagagactcgagcacaaggtgtgtcccttccccctgtatttaaacctaaattaatttcactgggaggaaataccatgcagatattttcataagtctgtttcacgctcccagcgggctaatcggttctttcaatcctaaagcaacagaaaactgtgcaaattctgaagagaaattgttagatcaaaggaacaaagcaaacattaacaggaatgaaagtactctcattatatagcaaaacatggaaaagtgttcacaattggggtagtcaacctttttaaaacattggttccaaagaacatagtccactcttcaaaaatttattcagggagtgaccacaggaaacacgcagctaggccctggggatccaacattcaaacaaggcacctaaacatacagtgaattactgcacctgtgcagagtacatcaccggtgcgcaccccaggtccacatttcctacagttgaattcgcaacgtaacgaaaagtgaaattgcccgtcggggaaaactattccccgggtagtggtcctcgtccgatattcaggggcccagtttgtttaacaagattcaccctgtgctcagaatgggtaacggaggagttacagagccatctataggccagctgtgggcagtgggacttctcctcaccgcgtacaaagttttttgagcccgttggaacacaagagcctcgctactgcttacaatgaggaaaaacacacacgtgtcgctgtttattccaagacgccta

SEQ ID NO: 414960 - DNA, 862 bp, Homo Sapiens
accggagaggtggctccgttcgccctgaagccgttcctcggccccctacgcactcgggccccgttccgcagaggattcgcagggtgagcgcccctgcagcccgctcaggaccagctatgagcagacgtgtggttcggcaaagcaagttccgccatgtgtttgggcaggcagcaaaggccgaccaggcctacgaggacatccgtgtgtccaaggtcacatgggacagctccttctgtgccagtcaaccccaaattcctggccattattgtggaggctggaggcgggggtgccttcatcgtcctgcctctggccaagggcgagtggataagaactacccactggtcactgggcacactgcccctgtgctggatattgactggtgtccacacaatgacaacgttatcgccagtgcctcagacgacaccaccatcatggtgtggcagattccagactataaccccatgcgcaacattacggaaactatcatcacactttgagggccactccaagcgtgtgggcatcctctcctggcaaccctactgccaggaatgtcctgctcagtgcaggtggtgacaatgtgatcatcatctggaatgtgggcaccggggcaggtgctgctgagcctggatgcatatgcaccccagacgctcatccacagtgtgtgctggaacagcaacggtagcctgcttagccaccaccgtgcaaggaccagaccttgcgcatcattgacgccagaacaggccccgtggtgggcggctactgacctaaggtaagccgccagcctgcattctcctgccggctcgtgttccctccgcctcctttgcctctcaaaaggctcacgacatgcgctcctcgctttgtg

SEQ ID NO: 414961 - DNA, 1094 bp, Homo Sapiens
aatcactactacaagctgttcatcccctggacgaatcagaagatccagcaatgactttgcgtgcagaggaacatgttgtgagttcaatgcacatcagagggcttcgaccgggctttcgctgacaatccaggaccgatggttgtgtttgccatcgcctaggagatgctagcacgctgggcgagtccctgcatggatcttccaggaaatgggccgtgaagacgtatagaagtaacatggtcatcatgcccggttactgcgtgcatgggtcaccgtcgtgccaggaagatcctcagcggggcagcgggaagctcgcagatgtcaggggcggtcagtgtgcatgggaggtcaagatgtcaggtggagtacatgtcatgtcagtcggctagcacggcgggacgccaagggtcatcatgcggcttgtgtgtgggccaggtgagagccggagatgctgtgctgctggtgcaatgagtcggagggcactaagcaatgagtggacgttccttgaatgccatacacgagtcgatgcaggaggctccgtttatgctcgacgtggcgggtggcgtgggggtcccatccatcgagtgtcatgtacggggtcatgtccctggtgcttgcatggctcatctcattacccctcgggggatccatgggggatcacaatcttggctactactgcctgtgcctaaatggtcggcaccacggtgtgcacacgcttgcccacaaccaaggccctcgcagacattgcacccggttatcgcattactcgggcgtgagtgggcttgcctcgaaaagcgcggagcgatcggcggcaggtggtatggcggcgccttggcgcaatggggcgatggggcaaggggttgcatcgagggtgacgaggactgtgagagggtgaaaccggggcgcgtcatagtttggactcggactgcgtggccaaccttgtccttcccggcagcgggatgttgtccccctgtggagggcccacaagaaagtccttccgcgggtcacatggcagcgagcaattcccttggatgcgattgtaaggggacaaggcagtgatagttgccacaggaaacggtcactcttggagaatgggg

SEQ ID NO: 414962 - DNA, 812 bp, Homo Sapiens
  misc_feature (289)..(289): n is a, c, g, or t
  misc_feature (488)..(488): n is a, c, g, or t
  misc_feature (496)..(496): n is a, c, g, or t
  misc_feature (724)..(724): n is a, c, g, or t
cgagctgaccgctgagtatcatcgtccacctgctacatcctatgcctagtggcgacgaggagcggtgactgccaaccttcaatacaatagatagaatacaataacaggggaacgttggagatctataattcagtggagaatgtcgcaaagaaccagatggggagagtttctcctttggtgacaaccaacattgttcctcctccctttcgatatcgtctcgagaagcgcttacagtgtggtcgaaagcgctcctgcgcgtcttgcgctgcggcaactctcaagtcacagngtcccttctacaacgcccactataacagtgataactccgggtgggagacccaagaaacgcttgggcgtgtgttacacgcctgagagccattgggcgcgcgtggagaccgctgttgggcgacaagctttgtgtgtgtctccctttggagcggagaacctcagagcgtcttgcgcgatgtgcgagcactgctcgcgtcttntcacaagngcgcgtcccaacacaggggaggcctaaaagccccctctgtgtcagggttctcatacacgggacagcgcatacagtgcggtgggaacactttggaagacccattgtgtctgcgcagttcggctaccggcgaacggcccttggaatgcccagttagcacacggtgtgcacaacggcctcgcggtgagacagttaccccgggattgactagcatgcggcgtggaaccgagncctccaggtgttgaccccttggaagcctgggggcccatgcgcggagccggtggcttggtggctagcactttcgactgcaacatacctg

SEQ ID NO: 414963 - DNA, 756 bp, Homo Sapiens
  misc_feature (23)..(23): n is a, c, g, or t
cgtgaaggtcatccagtggcccntgcgccaactccagatacacactgtctgcagtccaggtccgtgggtgcccccttcctaggctgtagggacagtgacacaggtgagggaggtaatggtggagccctgctgccctggtgagaggggacgaggaccccacaggggccaaggcctggccacctactcgccccaggctggaaaccaggactatgaccctcccccaccctgctcgctggttgtcgcaggacacgtgttcgtgtccaggtgcgctgggaagggtcctggcggtgctcctctcagcgcaggtcccgaggagctacacgcatgacgctgccttcagaactcccccgagcctgctccttcccagccttggctcgtgaggctcctccgaggaccacgggccttccacggcgtagccctgccacgaagcctccccatgtcttgcctcccagcatcacctggccgagacggcaccctagggccgtccttcctccagcattcccctgggccgagaaccgagagcctaggcgccgtttccttctcccacccatcacccttgcctcgaagaccggaccataaggcgcccgtccttttcttccagctatcacctggccccgcagaccggcgcccttagggcgtccttacttcccaggcattcacctaggccgaagacggcgccctaggggccgtcactttctccagcattcacctgcgcccgagacgggcctagggcggtctttctccagctatcagcct

SEQ ID NO: 414964 - DNA, 728 bp, Homo Sapiens
aagtggctgtacggttggaattttgggatcccggtcactgagctcgggtgacgcggtctgggtagctgggatcgagccttccgcgggatctgcctggcgatcccgaccatcctcctgctgtctctccgctccgtctagcccgcaaccctgccaaggctcctgtccttttcctccgtgtcctttgccatgcagttgtggtcggaccgggccttgagccgggcttcgccggtgtgcagtctttaaccatggcgtccctcttcaagaatgaaataactcgtggatgatgtaatacacaggaacagaatcgagagttacgcatggtacatgagagggctataatcagagatcgatgcatctttagagataacacaagaaagagacagctggaattagaaattacgaccaatggccaagattggtaaataagtgaagcttgcaacagattttagcctagacaacttgtgcatctacggaaacacgacagacgagaacttttgctgtaagttcaaaaagttacttctatgtctacatcaaacaatagtgatgaattcccaagagtgaagatggtctggatgcaatgtctaccacagggaaatagacaatgcatgctagttaacaagaagatggatccacaaaagacattacaaagcaatgcgagatatttccaagaaggaatacatgatgatggacagtgactgaagcaagatgatcaatgatacacttgatga

SEQ ID NO: 414965 - DNA, 846 bp, Homo Sapiens
cggctggtacggtcgggatgttaggatcctgggagccccgctgcaccccaggagttccattccagcctccccagtgcgagtgcggccgagcgctgacttttggggggctccctcccccgtctcactgggtccctctgcggctcccccgcccgctgtcccggttcagacgtggctgcaccccggaggggggcgccggccgagacctgagacgtggcgctccctctctgccggcctcggcttcagtgcttgaatttcagccacatccctaagctgccatctcagaccagaggaacagggaggggggctttctggaaagaacatcacctggaagaaatcaggacatgactgtgggccatgagtgaccttcaaaggaaagccgggtatctgtggtctttaagatgtggtaagattgtattaaaattatagaaaaaaacctcaatccagaaatcgtggcctcttgacatttacatcttaactgcattttcctaccaatgagatgcattacaatcatcctccataagtgttctctttttacccctgtttccattcttttagatccatgacatttaaaaactgaagaaatggaaagatcatctgatcgggcccatcagtctttttcctaatgctaaacattggtacaaagacgtgaagtttgatgtctcactaagattgcctagggctgctttattgctcacctacttcaaagtattgggaaaacatgattatgggtacaggtgatgctgtgttgccccccagacaggttcttttgtcaggttcttttgatggattaggaacctacaagtggggagattttcagggaaatagccccttccacttggatttcac

SEQ ID NO: 414966 - DNA, 769 bp, Homo Sapiens
ggctggtacaggtccggagatttaaggatctccagccaggctgagtggcagtgtgggcaccgcggcccgggacgacagcctgggctcagagtcaggcttgtggcttcgcctctcagcttgcgtctcctcccctgtgggatgggggattccgtggcacccccatgatgaacaggatgccatgggcctcagcccagggcagacctcagtgtccttcctgtggccgctgctggaggtgcgtgaccacaacacagggaggggactcgtccccgccactgtgctgacgcctgggtctccagagaccctcctggaactccgccaggccttcctgggttccagacaggcccgccacgggcatgacgcagcgccatctagcggacagcagggctgcagcgtggacagaacggccggacgcccagtcctgggctggcggctgaggaacagcctcacagggcaagagggcaggcaacacctgcatctttccggcataagaacctcaagaaaagcaaaggaatataagcctgtgttctttggagccaccgaaatctctgttctcatggcagtcgctgaaagtttaagggagccgccaccgccccaatggggttggtttctttcttccctgtttttaaagatcttttaaaatgtctagagagaccctgggatccagtgctggacggatgatgcagggccacacagagaggctattgtgtgtcacttgctgggttaggaacagacggatcaggtcttctatgctgcgtctgcctggtcctgg

SEQ ID NO: 414967 - DNA, 785 bp, Homo Sapiens
ggctggttactggtccccgaggcgttaagcagtagaatagatcaaagcacttagttcttgtgcccttaagattatttactgtgtgttttcactaaaatgttcttttcatctttccatcttcacattctcttagcatcatcctatgcacataaggtatgtgtgttccttctccactcacctaccgcactaaatttgatcagcaattgtacagtaacagaatatatttgtgccagaagatttgcaagtgatatttgagcatgtatttatttaggaggaagccagtgcctgtaattatgtctcattgagtagttttactttgcccatcctgcagtatttagagctgatctgtacccaaagcaggacaatgtaactgtagatctgctttgttttcagtaactgtacattgcatcagaatctgtttatttctatctggaaacagacagaatggtgggggagggaaggagttattttgcatcctagtttgtattatgaagtcatcatatatatatttgaaatagtataagctaattactgttgcagaatgccctcgatataattatttcttcttcagctggatgtgaaaagctgaagcagtgaaaaacctgcagtcttatttcactggtttccttctgtttcttgtccatcacttctgtatccacagggagctatctactacatacctttggtaacaggctacattctcttcagcatctcatatgaataattcatcagcactaaagcattaccatagcaataatgaagccaaagacctgagtcgagatgga

SEQ ID NO: 414968 - DNA, 1093 bp, Homo Sapiens
acatgttaggatggctcgccagagcttcagtgggcggggactacgacaggtgactccataccaaggaggatgagatgactgtcactggaatagagcggatgagggaagcagctcctacgaagttccctctgtggctgctgcatgatctggaggagggtgctggtccgactagtgagcttgcaatgacagcccactccaaagatgttcacaaagggtgtaggaggcatcatcttatccaccacatcagcgattttagacttgagtgaaagtggtctgtgccagtattggaggagggtcttaaagaatccacacagacattccaaacaaattgcatcatgaaaagagaaatgccctgatgtgatgaattcctcaaagcattaactattcaggtatgattcacgaaccaccttgactatgtgcatggtaaccactcacggttacaaatcagacacttcaaaggcggcattacatatcctggggaaatacggaagaactccaaccgcagacacattatatgacaacacgtataggccataatcagaacaaggacgaagatcacgttaattcaacagaaagttgatacacccaatggatgaggaaaggacatgagtgataaatgaccggatacagccccaacagacctaggataatggacaagacgtggtagacgctataaaagaagatgagtggcccacatcgatgggaaaaatttaacaccagtaccacaatcaagacgatcaagatttagtagccaatgacaagaggggaaattagggggacagtggaaaataacatccaccaagaaaggacaataacaccagttgcaagggaaaaattgtggagagagccacaaacaacaaacaaccaacaattgataacgttagcaccacataagatatagtgccacgaagcaaagacatacaagagtaaacggggcaataccaaaaacacgtggagatatacaagacagaagaacaatggaaaaaccccaatacgcggagaatgagaaccgacaaacacaacagcaaaaacaacacaaaggaacaaaatggaacagaagaattggcactaatggagaaacaatagcacagaa

SEQ ID NO: 414969 - DNA, 1162 bp, Homo Sapiens
ccgttgaggcaggtactgtcacactgtccatttcccgggggaagaagcggatccaggaaaagttaaactctcccagggccgaggatggaatcagagctggagctgtgacctggaaacccataaccacaatacagatgagccctgctgaggtgggggaagccttggattcctgaatcccaggctacagaaatcgggaagggtgtgtggacgtgaaatagctccgactgggaagaatccaggtaggagtggggtgcggggaggtactttgagcaggcaaaacagaacaaaagggcacactgcacgcgggtctgacaccagaagaccccggtcgtcctatcattcccgaagggttaacatgctctcgaggaaaagcaagtgattcgcctaagtaagaatggggtggcgcctctcctatttttttaaaatagagatagagtagcgctatcttgcccgggctggcctcaagcaatcctttcccacctctgcctcctaaaatgctggcattacagccctgagccaccgcgcccggcccagcgccccgtctcaaaacaagatattacttccgctccaaacaaagatgggccagctaacgagcgcgggggaaacatccgccggaaggccacttgaaggcacttccagcctctcttaacatggagccggcggaaggggtggtgtagggcgggcgataatgggggcgtccaggctggagctaacttggtgcgggtggtatccgatggaggcgaagggagcggagaacgggacccggacaagtgtgccctgtggaacgaccgtggggaggcccaaaggacactgttgcacggccggaaagcgcccacgagacgaaacagcggcgagggggatcacagagaattcctgcagcgggggaccagaaggggaggtgacaaccaggcacaagagcccacccaccagaaagaaagggggcgcaacagacggctgccacacgggggtgagacaccacccaggccgaaccgagtcgcaccaacaagacggagggaatcctacaagcggcgccacacacaagaagagagaacagcaggcatacaaaaccgcagtaacgcgaacaaccaagggaggcgacagcgaaaagagaggggaagcaagaacagcaagcaaagcagaagagtcaaacaagaacaccaac

SEQ ID NO: 414970 - DNA, 753 bp, Homo Sapiens
  misc_feature (106)..(124): n is a, c, g, or t
  misc_feature (140)..(148): n is a, c, g, or t
  misc_feature (321)..(365): n is a, c, g, or t
aaatcctaggctggtacggcccgggagtacgtgatgaagcttccagaaaggacgcagatgcattttgcgctcctgtggagaagaccagacccccggcgtccgaagnnnnnnnnnnnnnnnnnnnaattacccatcctccnnnnnnnnnaaagcgccacctagcaagggatttctaaaatcagggacccgcggttcccccttctgtgtggtccctgcgccgaggatccatctgggtgtcccggatggggggagctgcgtgggtgttctccagccgggccgggaggagatcttgccagccttccagtggggagttgagggaannnnnnnnnnnnnnnnnnnnnnnnnnnnnnnnnnnnnnnnnnnnnaaatggcagtctaaaaagccggcaggactgccaacttctcgagcagtgtttgctggaagggaaccaaacgctggcagcctaagccgtgggagggtcccagtcgaaattgggacaggatgaaagacttcagaatggaacagaattaacatgcctttttgtgacaaagcgcagcaggtgcgttgcctcttagcttgcaagaagcgttaactccccttcatagccttaaaaggtttccgcactgcgttgcagtatagaagtatgctaacatctgtgtgtgacgcttccactaaacacttgtaccgaattttctgcgagaaacgataaccgttgccacccaatgccccccaaaggcattctactccccaagacctctaaggggcgggacgaa

SEQ ID NO: 414971 - DNA, 911 bp, Homo Sapiens
gcggctgtacgccatggagttatgggatctagcacgatggtggtggaaagacgcttctgtgcgttagtgtcctaacggttaggaaggattcacagagctgggacatgaggaaggagccagacccctcgggcagaatgcccgcgaggagcactgggtagtggtgggggcaggggtgcctcctctgtcaagtaggagagtcggcgccatcgcatcgttactcgtgcgagctgcgcagcagcgatcgtacagtacagagcgatagcagaacgcactacagggaaagtgaagccggtgagagagtacctgggtaggacggtcgtctggggactgggggcctgtaggagcgccactttgttcgtcgtggaggcagttgctgaagacacatgatgacttacagtgtgaggtctggcgccttactcatgatgacggttcaccctatgagcatcctatcaattacatagggaccacattggaaaccagggaatagaacgcacaagtgatacagtaaatgcataaatgcataaaacagagggaaacctccaagaatatacgcaaaatgactagagacctgagggaaatatagcgtatccacccagctcgattacacttattgtcccgttatagccgcacgttcaccacaaccaatttatactagagcaagacgattgcggatacaggcaatcgcggtctcccatagacagcatttgggtagagagcacgaaggtgatcgcaagtccacgagaaggaatcagtataataaagacccaagcggagtaaacactcaatctagccaccattaaacaggcacaacacaacggactagaacgcgatccaaaacaataatacgaatcagcaaagcacaccaagatgcacggaagttatcgggatattgcgcagaagagcccaacagt

SEQ ID NO: 414972 - DNA, 768 bp, Homo Sapiens
tgccaggcaccaagagcctcccgataagtctgttagattcagaacaaaagccaaccaccttctgcaagcttgtggcgctgtggatcagaggctgcaccagccatgtgaggacactgcgctctcctagcctaggtttttctcatctacgcaaaaggaactggtgagcccggggttcctgattccacaaggtgcctacaattgcttatcgacaggagagctgggaaaactaacaaagggttgctaggaactcggcctccctgcatcctgccctgggccaggtgtactgggctgctttggggcagagtccaacaaaaagcatcaatagcagcaggtggcttttacaaggcctctgtggttggcagcttctttctgggtggcggcacgggcgttaattgcaacccacagatggagagtcttctggggccccagaagctatgtaagtgaacccaggtaccgcacaaccccacgcagtctcagaatagctgttctgccaattcctggaatgtggatcagatataatttcttctccagctgttcccaccggctcccatgaaatccagacccctctgcatggctgaaggcccaggtgatctgccccatcttaccctggaccacatctccttcctctcttaccagcttgctttctgaacaatccagatgcaaatcgctctcaagtgtgttacctgttcactttcctccacttgccactgcctctgaaccttacttactggaaaaatctaacctgagatgaatatctgttcaggaatg

SEQ ID NO: 414973 - DNA, 749 bp, Homo Sapiens
atgagccaatatgaccagctcaaacatcttctttttaaatgtcagaagcatgtatagtgattatttcttattttttcccccttgatccatctcaccagatgttgttgatttttataagaatttcaaactaccagcttctggcttggttgaacttggatttctgtttcactaattttctttctcctgtctttgtactttactttgtttgctcttttttctaagttttaaagatggatgccaatctcaggcttcttttccgtgtgttgtatgtgcgtatgtccataaaattctcttctaattacagtgtaaagccgcatcccacaagtttgatagtcacagaaactgttttcggtcacactatttttttaatttcagtaaggttcttcactgatcccctgtggtatttagcaaattgtttccataatttcccttaccttgggagggcaagaatagtttgttattattaactttcttagctgtattggagctccttgtcagagaaatatggtttattctaagtcgttcgcacatttaagaacctggtttatggcaactggttggtccggttttggtaatgtttgcccgtcaacgctgccgaattcgtttgttcccttaattgacaatccatggctcggggtgttcatttggcccatggttaccccgtgtggcaccattttctattctaacgtgtttgctcacaggtggcgtttcacatgtgcccggcggagcaattcctccccccgtttctc

SEQ ID NO: 414974 - DNA, 1083 bp, Homo Sapiens
ggaattcccgggatcttcagaggcagtagcagttttaggaagtgtgccctcctgcctctggggaaaggttgaattggggtcttgtgggcacttgttttctcatgggatgtatcagtcagacccatgcacagttctgggcggcagggaagtgtgtctctttctggacttgagccagtgagctgttggcatgcctttttaaaggcattagaaaaaaggtttctttcttttttttcctttcctgttcacaccaccttcatatgaacatggagaagggaggtttctaagtgggcccctgatttactcctatgtcaataatcgtgccagaccctaaggggcagaaaaggcagccaggggatcctgactcagaggctgtagttcgtcagccctgctaaagggccaggggtttgtctctcagtgcctgggtgggcatgcttgactgctaaccccttagctgaaaggagatggcaggagtcctccacagggtcccttcttccctcctggcttacagcttcctctgaagacgggccagttccttgctgtctggcaagaggaaacagctggggtgcacttcactgggagttgggcaagatgtcggcagtttcctggtgcccttcaagtcctccaaaagtatcgagctaaaaggtgacaagtcttccttcaataaccaagaagagttccagcttaatgtctgctgaatctagaatcttctgacttgtatttttggcccagcccacaatcttggatgcagggtgcagcagtgtttaacaaacctcccaccccatttccagaatagcagggtagaggcactgggagcctttgataactccagagacccccaaacaagccaagatgggggccctggggtaaaggaagttgaaacggggacctttagtaacagggacaaaccagcttccatttggggggctaacggtttggccttataagggggtcaccctttcccccggaaactgggggtctttcccaaacttccgcgaggggggttctccttcgtttttccccccagaagggggcgttccttttttgggaggcttggatataaattaaggggcccttttcttcttt

SEQ ID NO: 414975 - DNA, 1083 bp, Homo Sapiens
  misc_feature (887)..(904): n is a, c, g, or t
gggtccggaattctccgggatggcagagggtggggaatcagtgaagtggaggttgtgccttttccctggattgggcaggaagtgtcacgaagcatacctggccaagtagcactgactatacccaagaatgaagtcccctccatatctagccatcccgtcacaccccttcatgcttggggcttgccatgctgaggaagcaggtgccgtagatgggccaggcgggcccacctagcaagggttccttccctcagcacactcagccatgttgcctgtctctgcccttgaggagctcctagtctggtagaggaagacataagccattaccacctagtgtgagcaggataacaatagagcgaggccaggtcatggaagagatgatgtgtagctgagcctgctagtgattgagggagcaatgttccacaccaggggaatggccttagccatacagagctgtgacagtccttggtatgtggtgaggccaagagcctcctgtggctgcagtgcccccctagtttgtagaggactctgcttattgtcagagggtgatgattgtgaagggccgtatgtgtcaggcttaggggctgggatttgattctttcatggggaggaaatgccctgtgtgacgggagctgcacctgctttctctgagttcatcttcaatcccacaagctgatgattgtaccatataatagatgtggaaacagacactaaaaggtgcagggagaatagggaggaagtttggtggaagcctggatttcacccagtggtggtggggggtttcaaagccccctctcttggccatggtttaccatctactctggcctacccttaaaggaaaaccagcccccccctggctggggccaactaatctctgaccttttcccttnnnnnnnnnnnnnnnnnnaggaaaagccctaaaaacttagggtcttccagggaggcggcccgggaaaaaagacccatttattgtctgggagaaggaattccgcacccaaaaaagggtttcccgagaagagcttagacaaaattgtaccattttgcgcctccttcccttttggaaaacctctcatggggtggagttcc

SEQ ID NO: 414976 - DNA, 1077 bp, Homo Sapiens
ggaattccccgggatccccactacaggcacagccagcgagcgcactggtggcacaacgatggcgctggtctcctcctcctccgccaccgccgtcgcggcgctccccagcaatgggctggccggcgcccggagctccttcctcggcgctgccggcaaggcggcggcgtcgcgcgcgtccttcgccgtgcgcgccgcggcgcccgagaggcccatctggttccccgggagcacccctcctccgtggctcgacggcagccttcccggagacttcggctttgacccctggggtcttggatccgacccggagagcttgcggtggaacgtgcaggcggagctggtgcactgccggtgggcgatgctgggcgcggcgggcatcttcatcccggagctcctgaccaagatcggcatcctcaacacgccgtcgtggtacaccgccggggagcaggagtacttcaccgacaccaccaccctcttcatcgtggagctcatcctcatcggctgggccgagggccgccggtgggcagacatcatcaagcccggctgcgtcaacacggaccccatcttccccaacaacaagctcaccggcaccgacgtcgggtaccccggtggtctgtggtttgacccgctcggctacggcaccggctcgcccgagaagctcaaggagctgcgcaccaaggagatcaagaacggccgcctcgccatgctcgccgtcatgggcgcgtggttcaggccgagtacccggcaccggccccatcgacaacctcttcgctcacctcgccgaccccgggcacgccaccatcttccgggcattcgccccccagtaaggaaccccgtggggagttagcaacctattcccgaggagttgtgctaccaccggggaaagaacaatccctgggtggaaactggaattttttttcccccggggaggatggggagtggaaattcgggggaacacaaggcctggcctttgtttggggagtgtgggtcacacagagaccgacgcgggacaccgacagtattgtccctaaattccgacactactcgggggggcgggccccgcgtttcttcaaagaaaat

SEQ ID NO: 414977 - DNA, 700 bp, Homo Sapiens
  misc_feature (55)..(109): n is a, c, g, or t
  misc_feature (187)..(199): n is a, c, g, or t
  misc_feature (203)..(290): n is a, c, g, or t
  misc_feature (428)..(447): n is a, c, g, or t
  misc_feature (465)..(510): n is a, c, g, or t
  misc_feature (567)..(577): n is a, c, g, or t
taataaaaaaagaagtttctctacttattttattttttgaggcagagtttcgccnnnnnnnnnnnnnnnnnnnnnnnnnnnnnnnnnnnnnnnnnnnnnnnnnnnnnnngcagggtttaagcgatcctcctaccatagcctccctagtagctggctgtgcaggcacacaccaccatgctcagctaannnnnnnnnnnnngaannnnnnnnnnnnnnnnnnnnnnnnnnnnnnnnnnnnnnnnnnnnnnnnnnnnnnnnnnnnnnnnnnnnnnnnnnnnnnnnnnnnnnnngacaagaatgagcccccatgcccaactaattttaccacttattaaaacttgaggagagcttagcttggaaagggaatataagttttttattttcaacaccccccaagggttttggacaggtacaccaaagccctttannnnnnnnnnnnnnnnnnnnaacctggcccacgaaatnnnnnnnnnnnnnnnnnnnnnnnnnnnnnnnnnnnnnnnnnnnnnnttgtttatgggaaatttcctttttgggtcccaaatctttcgcctggtgccctctctnnnnnnnnnnnctccccaaaaattggggaaatttggggagataaaatataaccacgaggcccccgcttataaacattatttgtggcgggagcgtttctttttaatatttttcttttggggcgtgtgggcaaacc

SEQ ID NO: 414978 - DNA, 1172 bp, Homo Sapiens
  misc_feature (378)..(403): n is a, c, g, or t
  misc_feature (587)..(612): n is a, c, g, or t
atccttcaacacacgatggaaccgggtccggaattcccgggatcgggaggtgaaagttctgcagaaggaaaacccctgtttgcaaggaaacagaaaccccgccagccagcgaggggttttctcccctgtttctcggaatcaggagagtgtgaatgtgggacgagcttctgcccccttgtcagagccactgcaggaatgtgcaatcgagtccactttgggggaaggtggctgcatcaggaactgtgttcttgccacgactcctcttaggaaaacgcctgggggctagcatgtcagtccgttgtttaacacaaattacctgctctcccagtgatcagtcacgtgcaaaaagctttgtccaattctttgaaaaggtgagannnnnnnnnnnnnnnnnnnnnnnnnngaagtttggttgaatttagaaattcgaaggaataaactaagagcctgaattaaatgttttgaaatatacatacataaaacaaaagacactagtatttctttcacttttatcaatacgcatagagaaggaagcagagtatgtgtttccaaaacgtgacttggaaagctgtaagacctctatgtcnnnnnnnnnnnnnnnnnnnnnnnnnnaacagaaaataaattttttcagacccaccaccacagaaagtggccagacttcccaaacccgcatttccagctactggcctggcttggtgtacacccaggccaatttctttatgagaatatattaacaggtcacccccggtgggattcctaccaaggaacttccccctttgccgcccaggggcaaaaccctttacttgaccccacttgctccttgtagcgcccgaatcccccgctacaaaataatcacatccagcataaggaatattataatacattcatatgcaggccggaaggtgccacgtattctcatacaccccgccaaacactctatcctcttcacaatgtaagcatattctactccccgtttaaatcttttcacactcacgacccgtacactcatctcaccccagtatgccgataagctgcatcaattgaacattcccctattaactcaaccacctccgcgtgtcccacaggaactcccccccgttttctttaacagaacccattaatattataatacgctacagcactaaatagttgcgtctgctttccccgcc

SEQ ID NO: 414979 - DNA, 1265 bp, Homo Sapiens
cggtccggaattcccgggatcacacacaccagattcatcaagaaaacctcgagaggatcatggccggcgtgaacaccagtgtggtcggcctcaagcccgccgcggcggtgccgcagtccgcctcgccggcggcggcaaagcgcgtgcaggtcgccccggccaaggaccggcggtcggcgcttctcggcctggcggccgtcttcgccgtcacggccgcctccgccgggtcggccagggcaagcgtcttcgacgagtacctcgagaagagcaagctcaacaaggagctgaacgacaagaagagggcggcgacgagcggcgccaacttcgcgcgcgcctacaccgtccagttcggcagctgcaagttcccctacaacttcaccggctgccaggacctcgccaagcagaagaaagtcccgttcatcaccgacgacctggagatcgagtgcgaggggaaggagaagttcaagtgcggatccaacgtacttctggcaatggcgaacctggccaatctgcctcaccatatggggagagctgaagtatgttaacgcaccgctgagtacctagaaagacataacctgcccaactgctactgactgtggaaaataatcataggatttacactctcataccgcctccctggaataaatcctggaataacagctcccgagacggtcatcccatgcattggtcactccatcgctccgtgtcaaacacaaccccatgctagggcatttggagcccaacttcccgaagtgatgtccttcaaacaggatctcccattttttgccattgaaacccacccggttttctctggtttccccctcggctttcgacctcaaaggccattccgaaggttctctaaccattcagcgcaataccctggtaataataaaaaccccttggagccaattctaccataataattggcgacctttagaggcactcccaaattattatgctagttcctcacttcccgctctctcgcaagaatacttcattgggcaccctaataatccacaagaaccactcttgcaacccctctctatcggcgagtttcacaacaaacaccaccccaacaaggtaactctcctgtggaacgacccaccttatctgcaccctcgcacgcaattgattatggtctcaagaagttattcttattttgtcgaaatcatagaacagaatatctgtcgtaaacgtaactctactatgtatgtacaactgccacatagaccattttttgttggaccctcgctctgagtgtctag

SEQ ID NO: 414980 - DNA, 1656 bp, Homo Sapiens
  misc_feature (142)..(180): n is a, c, g, or t
  misc_feature (1282)..(1282): n is a, c, g, or t
  misc_feature (1299)..(1299): n is a, c, g, or t
  misc_feature (1380)..(1380): n is a, c, g, or t
  misc_feature (1455)..(1455): n is a, c, g, or t
  misc_feature (1566)..(1566): n is a, c, g, or t
ccccctccctgataataattactttcgtggccaccccccagctggtaccggtccggaattctaccgatggttattataatgatttttatgtaatcttctgttaagattttgttcacttcatgaggacaagaaactcacatannnnnnnnnnnnnnnnnnnnnnnnnnnnnnnnnnnnnnngctcacgttccatccaggtggagcagccccgttcctcccaggtcctccacctcacagctaacattccctgcgcctaacatggcaagcgtggaagactctggagggtgaaaggagaggcagctgcctggggaccttgggacttgaggcatgaggtgctggtggttctctgagcctccttgtagacttgccgcctaataccaatgcattaccctgcacctgaactcacgagcacctgtaaaaaaccgtcgcggcttcgcgatcccgttggccgcccccttctattcgctctcccctagcctacgctcattcccctcgcccacctcttctctgacccaaactcgccccccgtttcagcacacacccacaacacgacccacggccgaacgatgcagcacttcgaaggtggccgttgtctcgttgcactcgcccctcactcccccatctaaaatctcccgccccacgctgccgagcaacaccccgcttctcgccgcccctctagcgccctaccatggcacagccccgcgcccgccatttttatccgccccgaggctccgaatacgccccccccgctactacattcagacataacgcgcctcacactcttacatgcgttgcagttccgtacagccgactcgaacggttcgtgaaagggtagacccgcgcgtgtccgctatacctcctggctcctgcgcgaattcgctcttttgcgcgggtatatccgcttccatacctcgccccgctctatatcccagatcgagtgctcaagaccgctttctgcaccgcgcccccaaccggagctaccttatagcatacgcgtgactgcctctttcaacatcacacacacatccttaaatttatcgcttttacacctccgcggggggcgtaattaatcatcaccctcatctctctaaaaataccagcctatatcacacatatacgaataagaacctgtgtcgctccgtacgcggtgcatcacccgcgcacgctctccccgtgactagtagcgacagtgatctcacaccccatcagcccgactcatagcacgcacgcgacccaccgcaccttacttgtaataccgcgcgagcggtccgtgtctctcatntctacgttgaacatgtntcgccacacgcgcgagatgctgatcatattgagtagtgcgaacggtgtgactcaaacgcatacaccgtcactgatcacacngccataatggactatatagtcgtgacaccctttcttattccgttgttactgtcggtcgcgctccctccggtagancgacgaggtgagggcccactcttgtggctaagcctatgaacaacttgtatattctgctgttactattaccctcacgtattccccctttccttcacccctgcgcgtctcctncccccgtcgcactgaaccttgcaccgaacctttaatcgttgtcatgattgagcgccactcctaggtctttgatattgttcaactcggtag

SEQ ID NO: 414981 - DNA, 1024 bp, Homo Sapiens
  misc_feature (872)..(880): n is a, c, g, or t
ggtttccaggtcgccggccttcgccccgtcagccagccgtcgcgtccatggcggaggtagcgcccgtcgatcaggggaagaaggaggaggaggagttcagcacggggccgctgtccattctcatgctcagcgtcaagaacaacacccaggtgcttatcaactgcaggaacaacaagaagttgcttggtcgcgtgagggcatttgatcgtcattgcaacatggttcttgagaatgtcagggagatgtggactgaggttccaaagactggtaaaggcaagaagaaggctctcccggtgaacaaggacaggttcataagcaagatgttcctccgcggggattcggtcatcatcgtcctcaggaacccgaaatgagtttgacgactcggcgtaaaccagaagagtctcttttcgctatgctgctgttagtttgtatgccgaatgctctggatcagggagtgtgtaagacagctatcaagcaagcattgcctgtactgattaatggtttggtgctgtggtctggatgttaccaattcacggtcttttggagcatctaatctaacaacgtgcactgggagccctcctgttcggatccatcaatatgtctgcctggaaagagaagttttcagtttcaaaaggcgaccacccataccgcataaaaacaccaacggggggggccgccttctaaaatattccctcgaggggccccaagttttacgcggtaccccggcttttcttggaacaaggggggcccctataggggggggcgcatttatacacctagggccctgggccgtcccctttaacaacgtctgtggcctgcggaaaaccgctaagcttcggggaactttttgtggaaggaaaccttaatttttnnnnnnnnnaaaaacaatgggcacgatttttcttcccccggattttaaaccccccccggtacaccttaacacccctccccacggtacacaggggtctaccccgcccgcccttgcgatgcccggctgggaacggcccccgtttttcccaccgtt

SEQ ID NO: 414982 - DNA, 1241 bp, Homo Sapiens
  misc_feature (57)..(58): n is a, c, g, or t
  misc_feature (96)..(611): n is a, c, g, or t
ccgctgagaaacaccaaaaccaggggcccggccggatttttcaacacgggtggccanngacttataacggaaaatgctggccagaagggggagaannnnnnnnnnnnnnnnnnnnnnnnnnnnnnnnnnnnnnnnnnnnnnnnnnnnnnnnnnnnnnnnnnnnnnnnnnnnnnnnnnnnnnnnnnnnnnnnnnnnnnnnnnnnnnnnnnnnnnnnnnnnnnnnnnnnnnnnnnnnnnnnnnnnnnnnnnnnnnnnnnnnnnnnnnnnnnnnnnnnnnnnnnnnnnnnnnnnnnnnnnnnnnnnnnnnnnnnnnnnnnnnnnnnnnnnnnnnnnnnnnnnnnnnnnnnnnnnnnnnnnnnnnnnnnnnnnnnnnnnnnnnnnnnnnnnnnnnnnnnnnnnnnnnnnnnnnnnnnnnnnnnnnnnnnnnnnnnnnnnnnnnnnnnnnnnnnnnnnnnnnnnnnnnnnnnnnnnnnnnnnnnnnnnnnnnnnnnnnnnnnnnnnnnnnnnnnnnnnnnnnnnnnnnnnnnnnnnnnnnnnnnnnnnnnnnnnnnnnnnnnnnnnnnnnnnnnnnnnnnnnnnnnnnnnnnnnnnnnnnnnnnnnnnnnnnnnnnagaaacaaggtcgaggctgcacaaccttggacacatggttctcaggggcttcctgagggctggcttcacagggcccttggaccactcctggtttgctcagaaataaaatcccctccaaaggtttttacaaacctctggaaacttttcggtggaccaagtggcctcccgtttctttttttccttcgggggcctccctggcccccaaaagttatagccgttaaagctctcacgaaggccatattttatttttggagaaaccacagaaccttggactattgaaaaataaaaccccctgctccggttttttaaactccatagtgttactttccgggacatttggactttcaaccacattcccctgtcctgaaagggggggtaggctatttgccacatcggccccgcttaaccaaaacagggacacacctgcgacaccccagccgggaaatattttaatacaccccccttttcacacacccccataaagcctcagcttgtctacaggggcacccccgcacaccgctgtagatataacgtggcactgtgaaccccccccagtgccacacatttcgcaccctccttttttaaagcctcacccaagggggcgcggcaaaatgacatctgtctggtcgt

SEQ ID NO: 414983 - DNA, 1703 bp, Homo Sapiens
  misc_feature (70)..(70): n is a, c, g, or t
  misc_feature (513)..(568): n is a, c, g, or t
  misc_feature (622)..(659): n is a, c, g, or t
  misc_feature (969)..(969): n is a, c, g, or t
  misc_feature (1062)..(1062): n is a, c, g, or t
  misc_feature (1111)..(1111): n is a, c, g, or t
  misc_feature (1258)..(1258): n is a, c, g, or t
  misc_feature (1284)..(1284): n is a, c, g, or t
  misc_feature (1313)..(1313): n is a, c, g, or t
  misc_feature (1396)..(1396): n is a, c, g, or t
  misc_feature (1454)..(1454): n is a, c, g, or t
  misc_feature (1456)..(1456): n is a, c, g, or t
  misc_feature (1508)..(1508): n is a, c, g, or t
tccccccctattggttgagaaaccaacaaaccaggggcccggcccggccaattacagacctcgccctgcngagccaccacaataaccgcccccttgggtgggagggatatggaaaccgtgtcacacagcctcgcttttctgcgccctcctccccctgccccttcactcctccttcctcccttacccgccatctatggggctggcctctctctcttctggatgacttttccacctgatcccttctgggctggcttctcctgaccccggctatgtgcctccacccctcgccctaaccccagtcccggaacacccctgcagcagggggacgtgcaccgacccttttttctcggccgggtagcccaccccataagcaacgccgccgctgcgtggctcccaagcacgacggggcaccgcctaccccaagtcaccccaggagagggaaacggcgatcggggcgtcccgaccggtgcccacgccccccctaaccgggcccacgggcaccccgtgacgccnnnnnnnnnnnnnnnnnnnnnnnnnnnnnnnnnnnnnnnnnnnnnnnnnnnnnnnngcgcgacaattgtagtggctctgacggcctatcaaccgcaagccccgggcctannnnnnnnnnnnnnnnnnnnnnnnnnnnnnnnnnnnnnaacgcgcgaccaatgaacgcccccaaaccccgtaaaaaccggagtggggtgcgggccatactccgcgctaaggccccggagggacacaccgcgtgcaccggaacgccaccgcgcgcccgccaactacgcgggcacccgtggcacaggtgccggtcgcccccgacgatgtgccaggcccacacgccccgcccatacggcggccgccgcaccaactgccaagaatcgaccggggcgaacagggcctgcacacccagagctggcacgtcgacgcaccggtcctaattataagcgctaagcggctccatagcgngcgcactgcgcgagacttcgagagcgcgcgcgcacacgccttgtcgggctgagatacaaaacgttgcgccgcgccgcctgcagctccgccctnaaacacctcgcacccccgcccgcgcctcctttgcgggcgcgcgcgaccnacatcgtgatacaagacaccctcgcaagcgcctgttcctactagatcactcgccacggccgactggaccgcctccgcggtaatgacgcggatggaggagagaatgctacgcgccaaccacacgcgccgcgataaatatcgtcgacanctgcctaccagcctcggctgccagtnagtaaccgccgcacgcatgacctcacgancgaacacacgcagccacatcaaacgatatccccgcgatacatagcggcgcacgcgccgagtcgtcatccgccagacgccccgngtaaccgggccgcctcacgttgcacaacgcggcgaggggccacggacgagggaaggangncgagcggaaccaccggcccgtgccgccataaaacatcaatacggcattaaanatacacggctagtgccaccgcgccatgtgtgccatcgacgccgggacctaatcctgacaactatcatctgctgtcggaactaccaaacaccaaaacaccaaatgacaaccgcgccccaaaaacaaccccacaggaaggcaacatcgggcgtgttcggcatcatacacgtgagaatatccaccacaccccgccgcg

SEQ ID NO: 414984 - DNA, 591 bp, Homo Sapiens
  misc_feature (54)..(169): n is a, c, g, or t
  misc_feature (183)..(275): n is a, c, g, or t
  misc_feature (350)..(350): n is a, c, g, or t
  misc_feature (393)..(393): n is a, c, g, or t
  misc_feature (522)..(542): n is a, c, g, or t
cggtccggaattcccgggattgagtgcctgcggtgctactcggagggttgagtnnnnnnnnnnnnnnnnnnnnnnnnnnnnnnnnnnnnnnnnnnnnnnnnnnnnnnnnnnnnnnnnnnnnnnnnnnnnnnnnnnnnnnnnnnnnnnnnnnnnnnnnnnnnnnnnnnnncaggagcagcacannnnnnnnnnnnnnnnnnnnnnnnnnnnnnnnnnnnnnnnnnnnnnnnnnnnnnnnnnnnnnnnnnnnnnnnnnnnnnnnnnnnnnnnnnnnncatatagtactcctgacactggaaaggtccttctcagcatcccagtttcagggtaaatgccacctcagagacaantttcttggacacattatttaaaggaccatcatccccatccagntaaaactctcctcccaaaaaatcttaaacattttccttccccatgggttaatacccattcgggaaaaataatttaacaaattggggccccctttcctttaaaaggggcaaactttccttggggggggcnnnnnnnnnnnnnnnnnnnnngccccttttttcccaaaacccttggggggcgcccacggggggtgggtgt

SEQ ID NO: 414985 - DNA, 1049 bp, Homo Sapiens
  misc_feature (730)..(730): n is a, c, g, or t
  misc_feature (850)..(850): n is a, c, g, or t
  misc_feature (868)..(868): n is a, c, g, or t
  misc_feature (910)..(910): n is a, c, g, or t
  misc_feature (983)..(983): n is a, c, g, or t
tggaccggtccggaattctcgggataaagacaccacagacacttaaacattagggaataatttaaaacaaatgtgtgctggagtccacacagtgcaaaggagaattggtttaatgtgcagtgaagcaagagtcttcctaaagctgcttctttcactggggaaaagagactccttcctgcactgaacacacccaggactggataaattctgccccctcctcccaccaccaaacacacacaggcaccttattattttatttgctgtcccaaagcagcctctagcccagtggaactgcctttgaacacaaattccctggtgcaccagctaagtaagttctggctgcatatagcaaaagatccaaaataacagtagcataaataaaataggcgagtgcttcttgttcaaatacaagaagtccatgggtagggattccaaggctgtggcatatagggtgtgagaatgtaccaggagtaaccagggaagaagccaccctgttggaccttgcagggacgtgactctgccctcatgtaagcaaggaggagggcatctgccctaatctgcctgttggcttccttattgggcatgtataatttttcattcattcaacctacaaaatatttcccgaaccccgagcagtcactgtgtgccaagcgctgtgctagggcatagtgtgacaaggcaactaaggtcacactctcgtgaagcccacagtctagtggggaagataganaagaaataaacaaatgaaattaaaattatagttaagtggtatgtaggaaacagccagactactgtgacagagaatagcgggggtgacctactttacacagggtggtaaggacacagctangaattcacagaccagggnaggggaaagacaaacatggagaaacatggaggagggtctcanggcaagcccgggatttctcaagcagccagacaggaattgcttggcagaacctttctgagccatgggttgccanccaaacccaagtgggccccccgggccacacctgggggcaggggaccccaaattgggactggaaaag

SEQ ID NO: 414986 - DNA, 1298 bp, Homo Sapiens
  misc_feature (795)..(805): n is a, c, g, or t
  misc_feature (978)..(1015): n is a, c, g, or t
  misc_feature (1116)..(1116): n is a, c, g, or t
ccttcccctccgcccctctcacacctcattcccccgctcctcgtggcaccggtccggaattctcgcggatcaggaacagcaatcctgcattgtgcctgtgaggtaggaaacccgaaatagtcagtgaacatgtgaatgactgttcacttccccactccagggcctgcgaccttgctgttctctcatcttggtatgatgttccttcacctctgcacagagctggctccttttcatcctttagttctagaatttcccttatacaacttctgtggtcagaattgcatgtcttgtcatgattgtcgcacagaagatatggaatagtgccacagaactggactaatagcattcttcaagtgggagagagctaataaagatagctgtaaccgacctgcatggtgactggaataatattcaacagggtaaccagcctgaaggtatcagggcttcgtctgggatcccattctcctccgggatcccctctcatgaggagacacgttccgctgcttcacttgtggcagccttgggggtaacgaattgacacccacctagtttgacaaataaactcggactttcagcaatgcaggatgaaaaggcctacgcatatcacaatcgcaccggactcaagggccttctattacaggactcccccccctccaatttttccatttcaccagcgcccacctgggagattacttccctttgaccacaacgctggaaaagagggaaattgccttgaaaatcttccctgtgaaacgacaccttacctgggtgcctcccctcccaattggatattgnnnnnnnnnnnaacttgttgaaaaaaggcgcgcggcaccatccacattggcgagtctaacaaaggggaatccgccccttttttccaaaagccccatgggacccatctcgtatcccatggggcctaacttcccctctccagagaggtattgttttcaattaacacccctcattaaatgcctgggnnnnnnnnnnnnnnnnnnnnnnnnnnnnnnnnnnnnnnacaagctggtctcttaaccaccttctgtatttccgcccgccttatatgtcaccgccccgcccttcttttttttcgcacacacatataaccccacctctccnaaccctagactccggccccaaatgggggcacgagattctattgcgcccacatgtttttttatattattaggctccgcccgcgccaaagaatgttccgacctcttgttaaaacaaacaccataattccccccacccggaggctatggcacaaaccctcccctccagaagccaccatatattta

SEQ ID NO: 414987 - DNA, 1244 bp, Homo Sapiens
  misc_feature (331)..(332): n is a, c, g, or t
  misc_feature (335)..(335): n is a, c, g, or t
  misc_feature (338)..(338): n is a, c, g, or t
  misc_feature (340)..(340): n is a, c, g, or t
  misc_feature (348)..(348): n is a, c, g, or t
  misc_feature (360)..(360): n is a, c, g, or t
  misc_feature (372)..(372): n is a, c, g, or t
  misc_feature (471)..(553): n is a, c, g, or t
  misc_feature (598)..(604): n is a, c, g, or t
  misc_feature (625)..(672): n is a, c, g, or t
  misc_feature (681)..(737): n is a, c, g, or t
  misc_feature (764)..(764): n is a, c, g, or t
  misc_feature (769)..(770): n is a, c, g, or t
  misc_feature (775)..(776): n is a, c, g, or t
  misc_feature (780)..(782): n is a, c, g, or t
  misc_feature (998)..(998): n is a, c, g, or t
  misc_feature (1070)..(1070): n is a, c, g, or t
  misc_feature (1083)..(1083): n is a, c, g, or t
  misc_feature (1098)..(1098): n is a, c, g, or t
tccgaattcccgggatatcccatcccgctctgctcagctctagtgttttctctccatccaccgatcgagtgaagctctccgtccgccggacgaaagatcgacgaccatggcgggcacggccaactgcatcgacatcatcctcgccatcatcctcccgcccctcggcgtcttcctcaagttcggctgcgggcacgagttctggatctgcctcctgctcaccttcctcgggtacatcccggggatcatctacgccatctacgccatcaccaagtaaactagctagcaagccgtcccaagtgttcggcgacacaatattttcaggatgatttgnnatnctncntttggtcnctagtccctccnttgcttgtgtgnggttcgtttaattcttttctgtgtgcgttgatgattgcgaaatttcctcccgtggtttccgtgggaccggggtggaaaaaacatccacccttccttttnnnnnnnnnnnnnnnnnnnnnnnnnnnnnnnnnnnnnnnnnnnnnnnnnnnnnnnnnnnnnnnnnnnnnnnnnnnnnnnnnnnaaaaaccccccacaaaccacctaactcccttttttttatttatannnnnnncaggccagtaggaacgattannnnnnnnnnnnnnnnnnnnnnnnnnnnnnnnnnnnnnnnnnnnnnnngcccgcagnnnnnnnnnnnnnnnnnnnnnnnnnnnnnnnnnnnnnnnnnnnnnnnnnnnnnnnnnaaaggggggcgctctttttttcaattnccccnncccanncccnnnccccccgccgctttttcggcgtgtgcgcggcgcgcgccctcgcgtcgttgcgcttggatcgagggcgcggctgctgcgacccgccttcaccattcctagagcgtagtggtatagccccacgtgtctattagaagaaggaaccacaccctagcaccgtgtaaccgcggcgccgggataagaagaagcctatccgcctcgccccagtgcggggcggtngatggggggcgcatgatacgcgcccgctatagcatccgcccccgcgctttaggtataggtcggcgccgtgcncccggattgagantaaggaagacggccncggctaggtgtacgtctaggctggagccgcgccgctcgttattatagttctttttcgccggccgactgatctagccccgacatgaagaggagataagtcgccgccgaccactccatagagtaaaccgcaggcccccgcctgggttt

SEQ ID NO: 414988 - DNA, 1272 bp, Homo Sapiens
  misc_feature (877)..(886): n is a, c, g, or t
  misc_feature (1173)..(1173): n is a, c, g, or t
  misc_feature (1212)..(1212): n is a, c, g, or t
cggaattcccgggatcaggcttccgacccttcctgggctctcttcacgccatcgcactggacagaggcgtctgaaaccctgccctggccagtggcgtgagaaaaaggaggtgcggcagatccatgcgggcagtcccaggaggcaacccgcagcggcactgcgccgtccggtccgcagtccgcagatcccaggcgcttgctgctctctggcggccaaagccgggatcccgaagacccgggactcacgccttcaacgcaccgcgcgcccaagggcaccagcgagtgaccgagagactcgggggagagggcgggaggaagagggacgccgctgacggccaagggggagggggtccgggagacgagcgggaaggaacgcaaagggcaccgctaggggacagcgccggcttgggcacctgcggagaggcgtgggtggctgctgcgggacccgagcgcgcgccagcggccgcagccccccggacccccgacaccgtcgcttgtcccgatcgaaagggccctccccccctgggagcgtggcgcccgctggctcggcctcgggtcgcccccctgcctgcttcctgtgcgatgtcttccccctccgggcccgccccccctgctttagagcttttgaaccgcccctaatccgcccgcctgcccgcctctgttcccgcgccaccggaatccggccggccttgtgcccgggccgggatagggtccccgtttcaataatactacccgcgcgtccttataggcgccccgagttttcccccgttttactaagcccgccctcggatcgggcgtctggcgcacacgcccgtggccgttattcagtagcgccgcccggttacttttccgatcacgttgtgcgccttcttgcgctnnnnnnnnnntcttttggcgcgggtattgtgcgccgcgtgtaatccgccgatgggttgatattttcccgccgcgcgcgaggaccgaagagctatgtgcgtgtccataacggcgggtagctgccccctatttaccgtccccccgcccgttaccgcacccgatggtagccgcgttcctgatgtgccccgcgcgggcccatctcactggcgcccgcgtcggcatataataccagtatgcgcgcacgcgccgcgctgagcctgacgcgcgctcgacgcctcttataccaccttcgcgtcgnataccggcccccgcgcccgggcctaaacgatgtccgccnctgtatatatttagccgcatacaccgcgtctctgcttttcgccgctcgttccatcgcgtt

SEQ ID NO: 414989 - DNA, 1083 bp, Homo Sapiens
  misc_feature (59)..(271): n is a, c, g, or t
tcccgggatcaataactgatggccaaaatggataattgtcatgatagaagttattgacnnnnnnnnnnnnnnnnnnnnnnnnnnnnnnnnnnnnnnnnnnnnnnnnnnnnnnnnnnnnnnnnnnnnnnnnnnnnnnnnnnnnnnnnnnnnnnnnnnnnnnnnnnnnnnnnnnnnnnnnnnnnnnnnnnnnnnnnnnnnnnnnnnnnnnnnnnnnnnnnnnnnnnnnnnnnnnnnnnnnnnnnnnnnnnnnnnnnnnnnnnnnnnnnnnnnngaagttattgatacaaatatttgcaaaaataaaaagttatttgatacccacaaacaattccaaagtatgtccatgtgctaatttgtaaataggaaggaagttcttattttgaaacttgcagcctggaaaatatttataaggttgttatgacattgataactggagtacttcctatatcaacttactggaattttggagactgactttaaaatataataaaaagggaaagacagggaattgaacttccttctcatgttttttacaaattttaccagggagccagagtctcatttatgtaatcacagatttattttacaagtttggacttgcaaaaatacgccaaaatttgaatgtcttacccatttttttgggaagcagctaaaaatatgtaatgcactgaccttttaatgttcactttgattggttaatggctacacctttacaggctcagtcagattgtaaaccagggggacaaaacctgaatatataaggcctaaaaaattatactgaccaacctttcatgaaccccctataccttttcctatggaataaaaaaatgacttaaaattccctacgttttggctgttttaaattatattccttaaataaacactccccaaatttcactctcaaaagctcatttttagccaaataagacttcctaaaattctgggtcttggaataaccctttcccttaagggggaggccttttttcccacaaaaaactaagggctcttcccttcacaacatttcttctcaaactctctaagaacttaatccaatctttctaaccgggcggcttttcatatttt

SEQ ID NO: 414990 - DNA, 304 bp, Homo Sapiens
cggtgacctggagggagccgagggcttcggatgctgcaggtgacatgagctctccagatgggcgcagcttcccgtaccgggccgctctcaggaggcacctctaccagtggtgacgaggggctacttcccctttgtgctggagcgtgggggactcatacctgggagggggcccagggcctgaggagcccgagggaccatagcctgtgcaggctgcagcgaggaagcgagcaagagagctgcatggtagagacgcgcgcagcgtcggtccaagatgcattcgggagcggaccaatgagacgagcgt

SEQ ID NO: 414991 - DNA, 1023 bp, Homo Sapiens
acgtatcctgtgccggctcctcgggtagtcgtccgcgcgcggtggccccgggacggctatgctgccgggggtcggggccccaggcattccagtcgctgcacgattgacaggggatcccggatactccgcgcgcaccctgcgcgctcaccgaggggtcctatgacctggtgggaagaaggtgcggggacgggtcccatgcagtgatcccgacttgcttacgagccaagatgcatcatcctttatagtgtgtgaccatacgaacatgtgacgtatcaccgtctagcttttgtgatccgttgaaattggacaagagttcggagacgctatcttcatcatgtgtctgtagacgacggacttaaactgaacagcaaatgtcttgttacataggtctcttttggctgggatggggatgccttcggaaaggcctagggccctgggcacgagcatgaggtgacatcgcttgctgttcaacacatgcgggtactcacgagttccatgcgaatgacaggatgcccccgctaggaagtcatggacctgctcagtgtgtggaaattgccacgatcgcccattcgtgacccatttcatgacagagcctgcatggcccgaaggaattgagcataacgcaggagaggttcggagggcccaaggggaccggtacgtaatagtagcgaagtgaagaaacgtcctgggaatttgggcaatgcgccaattgagtgacaatccaccgaggccttaaacccgcacagaccacgggtaccgtttcaggaattcccggggcgcaatttgcgagattgcgcatgaccaactggcataagggcagtgaaaatcgcaatgaattagtccgggttggcgccccacaaaggaatgaggcgaggttcgtgaaaacgtaggccacttttgccgtgggtggccaacacggggcgggaaggtcgttcgtttgaaaaccgaacctcacccctttccaacggggggccccgtaacccgccctccagtccgtcacccccccgaagtgcatggcaccga

SEQ ID NO: 414992 - DNA, 756 bp, Homo Sapiens
cggagagcggaccgacgcgacacgccgtgcgcctccgcggctgcgctacgaaaacgagtccggagcggcccgcgcccggcgcacccggcctcgcccgccgaagacaggcgccaagctgccccgccgtctccccagctagctgccctgtgcctgctgtcgcctcgctgggcccctgggctggaagggggcggggtccctgattcgcccctgcccccgctggagggatacgctggctgccgcgtgccaaaaacccccgggctgaggcgtgcggggctgggtgaggcgctcctgtctgctgcgcgtctacgcggtccccgcgggccttccgggcccactgcgccgacgcggacctgctcgtggctcgtgacggccggtgtcaccctggtgcgccgctcgcccggatctgtgccgcggtattctggcgcctggggctcggggtgctccgggggaggccggtcgcccgagatgctgctctccaagttcggactcccatggcgacaccatcatgcgggcccggccgggccgttggagcagcatcccggtgaagatactgcaggccagccaaggcgggacaacggagagcttacgaaaaggcgtaccaggtgggcgcagtgctgggtagcggccggcttcggcgacggtctacggcggcgtagccgcaatcgcccgaacgggctcacggtgggctgtgacgcaccgttgtgaaggaaccgggtgacccgatggcggaggcctgtcgcgtcgcgaacggtccct

SEQ ID NO: 414993 - DNA, 669 bp, Homo Sapiens
gtaattgactgtaaattaaaatagaactcaaaaggatgataaatttaatttatatgtgcttaacattatctggtgtttactgtgcctttcaaaacaacttaggatcttggaaaacataattagagaaaaatgtaacttggattagcatgtggctagatgattttttaaatgaaaatgaagatgcattttatatgaattattttcttttcacatggctaatcaaggttagtttttcattctatgaagaatctggaggtaggccgcatgacagcagtgtcctagtgagctaagagcttgagtcagggtctgactcgggcgtgtgagtttggatctggaaaaacagcgggtgcagtgtttaggggagtgttcccgtggctgggccgcaaggcctgaagaaacttgcttagtggttctgggcctctgagcctcatctatagaaggaggctatgatgaagcctacccatagggcttctggggctgaaacgagctaatgatgtcgaagctgctagaactgtacctgtgtcagagcgagtgtgcagcatacgttatcatcactgtcatcactccagcattctgactgtgcctttaaactagtgtgggattttgcccaaacctctaaacctcccctagccgtggtttcccccgcagtctgaagactctaatacttga

SEQ ID NO: 414994 - DNA, 680 bp, Homo Sapiens
  misc_feature (173)..(270): n is a, c, g, or t
cgggaagctgtttcgcctggaggctcgcgcgcttttggaattcagttatcaagctttagagcctggctactcacagttgaagcctgattgcagggttcttttaactcttctctccacacccgcactggagaccactggtaaccatctgtggccatcacctaaactctcacccnnnnnnnnnnnnnnnnnnnnnnnnnnnnnnnnnnnnnnnnnnnnnnnnnnnnnnnnnnnnnnnnnnnnnnnnnnnnnnnnnnnnnnnnnnnnnnnnnntgagccacaatgcccggcccacgttttgctgttaataatgatggtgctgaagactatggctttgatgactagttctgctttaagaaaacattccgttgatttgtacaaatagcacaagaggacaccaactccatgcagatggcagcccagcaggtcacaccagtccttctgtcctcacactggcagacagaggcctcctctctggagtcttcacaggggcctgagctagagctggaaatgcagctggagctgcagccaaagctggggctgcagggccttgatttgagacttggccttggtcttgggtgggcagaggtaagacccttggcaatgcaggcaggagcacgcttcccgagcttggggtaggcaatgtaggcaagtcaattgagcttctggatgatgtgctttgg

SEQ ID NO: 414995 - DNA, 1114 bp, Homo Sapiens
gcaaccctccgcgctccggagcctcctcagcctcccgcacaccccgagacgctcgccccgtgtgggcctcggtccccgtcctcgctcccccgtgcttttcccctctctcgctccccacattgtctctgcgctcattttctctcctagttgacggacttaaataatacagaatcacaatatcacgcgatcaatccttcgagggaagccccgcttcggccctcgcgataaacatagagcgcagaccattgagtccaggaggctcacgtggctgtctggaaaggaatcgtgccacgagccggaggtagagtaggggagcctgatagggttgcaaagggcttcagaccaaggagaacgtggtcagcggagacgacgggagaaaggcctcgcgcttaaagggagcagcaccttcgcaggcagggtagaacgcgcatgcgaccagcgaacaggagcacccgaggaagcccgcagtacaaatacggagggccaacgtggcggcacccaccgaggagaagcctgcgagcaagcactaggaatcacggacgcggagaacgagactacgacacgaggacagaacacaacctctggaggacagcccgcaaagcgcaattgtgaaccacgcccacgcggggacacgacgtgggcacgacgcgtggaaagaccaacacgaaaaggcacagacggagcacagtaacctgttggaccaacaagacggggagcatgccagccgcgcagccaattaggggccgggccctgacagcacggcggcacagactctaagaaacgagactgtggctccatactggagggcgcaacagtgggatacgacagaccacggcatcaccgtagagaagagcaccgacacaccacaccatagacacaacagcacgcgaagagacgaccagtaaggccaaaccacagccacacagggagcggtgacgacataaggggaaatgtccgcgacgaacgccgtaaaaccagccgatgggacacgatcggcacgcgacagtcatggcagttgcgcagaggcgccgacaacccacgagtaaggcagacgaccatatgggcgccaccatcacgccggctggggatgaacaaccccacgcggcgcgcaacg

SEQ ID NO: 414996 - DNA, 932 bp, Homo Sapiens
ctgcgcgcgtatcagcagcggcgccgcgtgggcggggggcgcagatgaccctccccaatcccggcctgccaccacctgtgctcgcgcgcagccccggcccagaatgccttaacctgcgccgattgcatgcctgccgaggtgcccctccccgtgtagggacctccgacgccgtcagtccccgttcctcctttcgccgcaggtgcgcactgcatgtgcttgcgggcgggtgggcgcccgcacgtctgcggtcgcggtcgccgctggtcctcccgccgagccccggcgcgggggcatgaggagcccccgggtgccgacccaggagaccattcaggcctgcgcgcaacacactagccagcggacagacggggacatgagcagacgcagcacgggggtcccggagcccgggctggtcaagccctatcccggccggaggccaggcggggtcaacgcgttgcccgggagaaatgaggccaggaggcccgggacgtgaaagacactccagttgtaaacccacttactcccttcgacccatttccgttgcgagacatccagaggcggtcgttcagagggatcacgggagaccgaggacttgagtcgaatacttgatcgatgttgacccccggaggtcagccacacataaaaagcgaccactttccgggcatggccagacctctattcgcggaataaaagccctggctaaaggggccacgaattagaagtgcagcatttatggcacaaacaaccgggaatgggttaaggtcaacatagttggaaaaactggatttgaagaacaggaggggaggatcaaggagaagagaaagggttaaaggagggagagtggattaggcacaataggctgggggatataacatcgggaagcaatagttagacccgagactttgatgaatcattaatgaggtcatcgaaattaa

SEQ ID NO: 414997 - DNA, 987 bp, Homo Sapiens
aggggagcgatggcagccgggggtctgagcctgctccgagcgcaaatgcggcgtgactgggtggggaggttgcgggaggagcagcagaggggacgcgcctccgccaggtgtcgcgcatcctgagtgaaggcggctggctggagctgcagcgccgagcgagtggcctggctgctggcctgagagctgcggacctggtaactgtgagctgcagggccgtgagccggtgctggctgctggaggggccattgaagcgggcggccaggcaggaggtgtgcgaacgaccctggatggagctgcggggggaaaggtccgggaggcctggcacatgctgcccgttcctggacaccgccaaaatagcttggtccgtctacaacagtgctgcggggaatcaggcacggtgccagcggtctatcccagacgtaccggtggaccctaattgcgagttgttggaccactggctttccagaaaacggggacgaacgcggtttcagttgcctgccccgacctgacgcggacgggcccgtagccaatagcccttcagcccaccattgaggcattcacccctgatcttgccattgacgcacggaaaggcgtgggattgcaagccactgctgcgtggtctcaggaaacctggtggaccgggggcttccaaccttgcacgcgcagttggcgcttggcctgtcggcaacggtgccaatcttcctgaagcttcccaccgggggaaacccacttgtcacatttcggaaaggttcgtggtacccttcccttggcggtttccccagggcaggggcaggatacgggttgccggggggttgttaccgacgtggtttaccgtgagtaccggcaacgttgtcccttccagcccgtgaacacccagaaaccatgggcccggcgaacctttgtccagccacagttggtggcggaacccaagtgcctggcgggtgtaccacccacttggttgccacatttagggcgggcacgcagtgg

SEQ ID NO: 414998 - DNA, 876 bp, Homo Sapiens
cctcactggtaacagagcactccaaggttctagcgggaggttggaccccaaagttggaggaggtctgggcacctgagtcacctgatggaggagctccaactgccaaccgggggcccccatatggacgtgtcacccagtgagaagtgagccttccattgtgacaaactgcaggtatttcaaggctaatctgttaaaatctacggtgagtatgctatatatgacttttgaatagtcagaggtgtgccctccacattagactgtgaggtccgttgacttgtgtggctcgtctctgacacagactcaagcccttaataggcgcctggaaacgtatgtgttcgttcacacaaaaaggaagttgaccaagcccccttgatgaagcctcactggggaggtggcccatcgaaggttgtatattgtgaatggggcgaaggcagcgtcgccgtctccttcaagtctgaccctccaaggtaggtgttcagattccccctccaaacccacagccgtggtttgcccgtctggattaggtgtataggggtcagagatgacgttcgggccgggcgtatggactgatgatgtccaaggagacagttctctcctttacccagtcacatggacaggcaagcaactaagcctcatggtgaccttcctggggagatacggtggtaagaagccacaagacggttgggactgagtctctgcgcacctgatcctgagcctctgcattctgcaccagcgggctggcgcaatgccagcacgggtgcccccttaacatgctttctgctggagtttcccttgaccagactcgggcacagcaggcgaggcattgacggaatgccgctagaacgctgggcgaacaccagatcttacctgggccag

SEQ ID NO: 414999 - DNA, 1363 bp, Homo Sapiens
  misc_feature (343)..(356): n is a, c, g, or t
  misc_feature (1315)..(1315): n is a, c, g, or t
ctggggcaaaaatggctctcgacaccgggggggcccccggggaaaaaaagcacaaatgggcgaccctatttactcttcctttgttaaaaaaaccgctcccacttcttcacccacaccacaacaaattggtcgtgaggccaaagtttctcgacggggtaaacccgcgggggtgggagagaaccgcggagacagggggggcatcaatgaagaggacacccgggggagtcagcaaacggtgggggaggaaatacccgcgagggggaactataccaccgccccaagagaagagtggtggggcgcccacatagtgcgtctcagagagcgaagaaattttcgcaccagnnnnnnnnnnnnnntccaccccgcgggggaggcactcttctctcgcgccgctgtgcgagtgccctcgaaacgatctgagtgggtctccctcaccacacccgagagatgggaactctctcgcgagctatatactaccgctggggagagcactgttgttgtaacacaaaaacttatgggcgggaggaaagtcctctccccgaagatattatatctctgtagggatgtactaaacagagcgctgtgttttttatacacccagagattttctccccgcgagagatgagatatatctaatcttcgtgcgcacacacacctgaccaacgtctgtggtgtgagagacgagccccgcccgcggtattgcagacaacaatcttgtgtgacgaagtgtgcaacgacgaaaaaaatgtgctgcggagacgacccccgctgtaggagtgatgagttgggtgtcgtgcggttccaaataaacaggcgcccgtgcgtagcagcgaggaggaaaaggcgtagtgtgtcagcggcaagagagggggacatatatctataaaaaccaccacgtgtgtggcgtagctgagacgctgggggcaaaacaaacaccacctctcattatacaccaaagtgatgtgatccttactgtggtgtgtaataacgtcaccccgcgcgggcccccaacctcagttggggcgtcggtgtgaatatgtcctcccaagcacaaacacaagagggggcctcaacgtgttgacgaacgagtgtcgtggcacagcgtatgagcccaattatcactacaccccacctccagacgagaggccttactaacggaagagcgcgacggagtgtgcccttctaaagaaaccagtctatgaacacgccctaatgtgcaaacgggcgaacgtgcaagcggatttaactaaacaccatcacgacaggcggggtggagggggcgagcaaattcctcccgtcgaggaaaccaccgccntgatgcacacagcaccggtgggtgaaggtgctatcaccgaggacgagt

SEQ ID NO: 415000 - DNA, 637 bp, Homo Sapiens
  misc_feature (156)..(166): n is a, c, g, or t
gggaggggtgtgttatcccaaaaaaagagggggggagacgcaaagaacacaaaaaagaacaagtccagagccggcgcgcggcgatgggactggcgagcggaagtggagggaagaaataccagagcgcgagggatacacagcagcagaacgccggannnnnnnnnnnccacccgccaccctaggcgtcggcctcgtggtgggaggcgtgggtggggcgtgtgcaccgcctggagtggagtgggcgccgtggtctcgaccacagaagaccagcacgcgcaagcaggcgagaggggagacgagccgcgcgaggagagagaggatagtgagtggtgctccctagatgccaaagggcagggagattggaactggggtgaggaggcaagcggacaatcggtgtaatggcacagaagaaagaaaggagggcgacaaaccaagaagagccctcagtgaccgggcaagagtcagacaaaaaagagaactacagaggagaggccccctaggtaactagaaaagatcaaccctagagagtggcacgcgcgagagtgcaaatgggggcgggccgacctacttagaattaggaaaagaacagaaagtgcagcggcggatgggataggccagctagatgacctacgatcag

SEQ ID NO: 415001 - DNA, 1009 bp, Homo Sapiens
  misc_feature (468)..(476): n is a, c, g, or t
  misc_feature (829)..(837): n is a, c, g, or t
gggggcactctgtcgtgcgtcacgcgaacaatatatttattcaacaagtgctgtatgtaccgcgccgtagatgagaagaaaattcctgagggcgagacaaaattgaggggcagacacaaccccggtgggtgtgcgtggcagcgacccatgacgatgtgtgctcgccgtcccaagaaccaccggacgacgaacaaccaaacgaatagacaaatataccgtggtggaagagatggttcctctgcgcgtgtgtgacacattcatggatagataaagagggtgacttccatatatctgttgttcccccactcatatgaatcagcagagaatgacgccacacgatgatccatcttagatatctctgtctgtgtaccacagagagaaaaaatatagcgcgctcgcctctatactatatagacatgaccatgagaaacatccacacgagagggagcataatattgtttccgcgcnnnnnnnnnattaacatgtctcacacacaccgcgcgacacgagccggagagcgggggtgctggaaacaaaacaagacgacgcgaagtgacgttcgctcctctctgctctcacatcactacccgacgcaagctgcatgcatgcgcgagcagaacaataaacaaaaacagcgcgagtgcgctatcagtcatgagacaagagagaccctagaaaaaacaacataaataactagatggagcggggtggtgcgggcccccaaccacaacacaaaagatgttcacgcgcccaacgacgcgagggtggagctaagcctacaaagacaagaaaaacaaaatcatctatagtggtgtatggtgcagtgcannnnnnnnnaccacacacaccgacgacgcgaggagagaaaaaaagagaaacatgcaacgcccaaccgcaaccgcgcggggcaaataaaaataacacacgccgcgggctgaatctgtcgctcaagataaaaaacacacccacaccgagacatagtagctagcccatacaggcgcggggaaac

SEQ ID NO: 415002 - DNA, 1264 bp, Homo Sapiens
agagaaaaaccaggaaaaatctttggggagaaaaaagcccccgcgtgtgggatagaaaaatctctacataaaagcggggagcatcgaggggggaaggaaaaaaacagtcgcaacgacatgttgtacacaggagggatacatgaaaccacccgaagaaaaacagcggtggagacggttgcttgctccacaacaccaactagtaggacacagctatcagtaggaaacgatgaacacgccgccagagcacccgctcaccaagacaatcgaaagagggtgctcccgtgtgagtgtatacaaacatgtatagtggtgccaagaagtagaagaccgccagtgagaaaagatagcctaggagtgatattcttagcaaacaaagatgcgagggcaaatagtgtgtattctagcagaggcagcaagtttgtccctaccacagtgctatataagagagatcgctcttttctgtcgtccacgagaggggatggctacattgcgggctcctcaaaataataatagttataagacagatccagacagataagagagagtgagcgcccaccacacgaggagacctcgatcaggagagaaacacactcgagagcgcgcgcgcccagcgagcgagagccatcaagcagggcacgcgcggggtgccccacatagggaggaggtataatagcccacgcgccaaagccagagacagagcatactgctgtctcaaggaggcgtcccatgaaaaaaataaaatacgacaccggagcgcgagagccaccacacgatcccccacgggcaagacgacgggagcgccaccacaaaaaacgcctggcacaataaagacagcacgcacgctgaacccaccctggagagacaaaacacatcgcgagcggggatcgatcgaccgagacgcacccaacgaacagcctcagagaaaacacttgaatgcgccgcgcgaagcaaacaaaaaaagtgtcggttcttgcatacaaccccagcacccatagaatgaaaaaaatatccctcccgaggagggcacgacaaacacaaccacaccacacgaagggaagaaaaccaccccccgcttgtgtggatgcatcgaccccaacattgggacaaccagagagatgccaacacgcaaacaattgaagtgttgtcgtggacacgaacggagagcggcgcgtcattctacacacacaccgacctggtgggggagtctcttggacgaccccccatcactgtggggggcccgccacaacacaataacacccaccgc

SEQ ID NO: 415003 - DNA, 1236 bp, Homo Sapiens
  misc_feature (881)..(881): n is a, c, g, or t
aaactggtaaaggaaagttttatttaaacttaaatgaaaattctggaaaattttgtttgatggggcccggggcaggatatgttatcttttgccaccaagcgtaaattctttctctctaagaaaaaggaatcaccctattgtggtcttggcgaagggcctataaatcgtggtgttctttcgagtggggaaaccacttcgctttgtgttgcggcctggtgataccccccagtgtcctggatcccaaccaaccaagcggcgggagaaggacctgtggtataaataaagagccttagtcaagtatcagtgtttgtgttagccgccaaaaagaacgctgtgtgtctgtggtgaacccgccggtgtcatctcttcgtgtgattcacaataaccgcgtggggagcggggggggcctcacgggaaacgccatagtgacgtccttgcccattggtaaagggggtgccggaaccgtgaaggggttatggtgggccccaacggcggtggaaaaattttgtccccacaagagcccacatgtgttgttaagcccccgcgtgtctcgcgtgaccaacgcgcgaggatgatggatacctcgtgtgtgggggggcgtggatatctcccccacatatgttggagagcgccacccacgcaacgtacgggcggccggtagaagtgtatacccgctacgggaacatgcctgatgtgtctgcccacaacacccgcagagaagagggtacacacacacgacaaaccgtgcgcgtttcttgtggtggggggcaccacacacaccgcgcgtgggtttactaagcaactgtggtagcgggggggcacacttcatgggtgcgaaagcgcgcgaaaaacaactctctgtagcggggggctctctcacntaaaaagaggcggcctgcaaaccagcctattatcgcggcgaagggcttggtgggccacccgcaggttggtcttgtttggcacctcaaaaattccgcggtggtggggccccagaactatcacacctctcgccaaaagagggcggagagagtctatagagggggagtatccacaacaatgatttcttgcccgtcaactcccagtgggtacaaaatagccgtcgagcgagaagggttcacagggggcgacgcgggggggcaccacaaacccgagaggggagaccacccgaaggggtggtcactgaaaaccggggggaccacgcacaacaaattggggcccagaaggggggaaaaacct

SEQ ID NO: 415004 - DNA, 1161 bp, Homo Sapiens
  misc_feature (54)..(71): n is a, c, g, or t
  misc_feature (295)..(311): n is a, c, g, or t
atagtttttatgtttttctgtgtgcgcggagaaccacaacgacggtgtgatgannnnnnnnnnnnnnnnnnaagaaacaagtgccgacgacgtgtgtcgagcgacgcgcggtgcatgcactcgcatctaaagaagatacgtggagagggagaaaacaaaagagccgcccgcggcagtcgtagcgaaacataggagagaaaatacactatcacgctcgagcgcggggatagagaaaaaaacgcaagtggagagaagaccaccaccgcagagctagaatataatatatatacatatnnnnnnnnnnnnnnnnncgtggcggacctcctgtcgtccatatgcacatacaacatccaacaaccggcagcacaaaaatgaacagagtatgtgaggtgcgcgagcaacagtatagtcgcctatcctcatacatcaagggggtgcgggggggagcaggcctctatccctcacgcccagtaatctagtcgcacgctcgcagagaaaggcataacaaaagacacgagagtcgtcgctcaactaatgagagagtgtggtggtgcggtgcgtgcagcgcacccacataaaacaaatatatattcctctgtatgtataaataaacaccccacacagcgatagacagcagagagcggggagaggaggtgggaacgatcatatcacactccaccaaacataaaataatatggaacaagagcaacgagcagacaagtgcgcacgaagccaattgacaccaaacaccacgcgcgcgagaagcgagaaatagaagaagcgagagggagagcgacgaagcacgacacaaccagagacgagagagcaaaagcggagagggagagaagagacaaacaaaaaagcagtgacactataatattgaaacacacgcaacaatagaaaacaacacaagcgcagagcggagagcataagaaatacctataccaagcgacaaaaaccgacatcgaccaacagagagatcggaggagaacccatacacaccaacaaatcatactatagagagaccgcaacgaaggccaaaacccgatcaacataaccacacgacgatcggggaaggaaatctataaggagaagagcacataagtgaccaacaccacacccctcgataccacaacccggagcgataacacaaacacaaac

SEQ ID NO: 415005 - DNA, 100 bp, Homo Sapiens
taatttttttatctatagaaaacaacacgagctgcaggcgaggcgagtgggggggaggcgtatgggaggtgtaccacccccgaagagaaagaaaattaag

SEQ ID NO: 415006 - DNA, 1064 bp, Homo Sapiens
  misc_feature (96)..(104): n is a, c, g, or t
  misc_feature (391)..(448): n is a, c, g, or t
  misc_feature (555)..(555): n is a, c, g, or t
gtcccacaaaagttttttgggattgaaacccgaaaccttgaaacacaggacacccacgccagaatgcgagaccagtgtacaaataaggccaaaaannnnnnnnnaacgggtctcacaggggccccaaaataaggctgtgaggggctgtggcccctataaggctcctgtggatagggtggggctcagctctctgcgggacaccactttctgtggggcttggtggtgggacaagggcgcgtggcggcgcccaaaaagtgctccaggaaggagcgcgtggcacataaaaagtggcgtgaacaccccgaggggttccagggaaggcccaggggctctccggggtattctcagggggtgtcaccccgcggggctatttataccgtggggagatctnnnnnnnnnnnnnnnnnnnnnnnnnnnnnnnnnnnnnnnnnnnnnnnnnnnnnnnnnntgtgtcttctgagaggggccatctcccgtgtgggtgtctccccacaaaaagcgcgttcggggagaagcgggtcttttggggggaggcccaccccccaaatgtggccnatatatatcgccgcgggagaaaaatctcggcggaaacccgcgtggtatcaccacgagcgcgccgtggggcttttttgtgtgggctacaccacaccacttgtgtttctccatattgaggtgtggtgtcgctcctataaataatatgagggcacccataagaggtggcggctccatataagcgcgtgtgtatcctcgcgtggggtgtgtagcacacacgtggtttatatctcgcggtcccccccgcgggggggcccaaaaagcgcaataaaaaatcctcccgggagagggcgcttgagaaaatcgggggcccccccgagggagtgattcgtctccataatgggggaggggtgctcaaaacccaccacgcgcctggtgggaaatgtggcggcgggtccacccacaagggggcgaaacatctagagaaccgggcggtcaccacctataaacaaggagagcgccgcggtgggttatatttatataaactacggcccgagacaggggaggggggc

SEQ ID NO: 415007 - DNA, 1350 bp, Homo Sapiens
  misc_feature (57)..(67): n is a, c, g, or t
  misc_feature (1263)..(1263): n is a, c, g, or t
atgcccacccaccaaaaattcttaattgctaggggggtgtagctatttttttaaagnnnnnnnnnnntttgtggagggccgggatatcccgacaagagcgtggagaacacccacccagccacggcgggccctatcagtttctgtcgtccacaaaaaaggaccgacccgcctgtatgctgtaatccccaggatcaccataacgccacaaacaaaatggtggggtgtagattgcttaggcggagcccaatgagctccgtcgactgtcatgaatagaaacgacaacgtacaaggccgggcggcacaaccagtagatagcgatgtattcaccgcgcgccttcgtcggcgcacgctctcctacctatatatgtaaacacaacacacacagagtaggtcgacgagagtgagttgtctctatagaaagaggagtgagcaatcacaccctctctgctctgtgtgaggcacccagcacggccggtgggcgaggagcgccgctccccagcggaggggtgagtgtgactcctctctcactcgtagttgcgaagcgagcgagtgatgaaatgactggcgagggcgcttaacctctgtctcgatatagtagagataggaaagcagaccgagacacaacacaaaagcaggcaaaacataactctcgcgcgcgagacgctgtgcgctctgtacatcgattctctgcggctatcgcacacaccaccacagctccggtcgaggccaggacagcgaagcgagaagtacgagtgaaagtacaaggagcagtttgaaccctgctctgtgtgtcgtgacgccgcagagccagtgatgggagggacgatagcggacagcaccgcccaaagcaaggaagaacacccacgctgctgtgcgtggggagaccgcgaggaaaaacaaccaacgcgacccgtcttggtcgagctccaatccacgatgcagagcgccgtggggttggaatcaccctgcggcgtacagcggacgcgaaccgaggcagagacgacctaattaccacacaacgccgcagacgcgcatgcgccacacgcgctgcgcggtgtggtgtgggcgagcagacgacaaccataatgacactcaccaacgctacacagccgaggaagagtaggtgagcagtgtaagtgaatagcagcacagccacccccgacgatgatggacgagagctaaacttgtatccaggcaccccccggcggggggcagctcggacaacccagatcttcccaaccgcagcggctcggtgagggaaantggaacactcagtacatgacgcgggaggcgcacgcccaacgacggctgtgacagtacaatgcgtacacaaaagagggcgattgtacc

SEQ ID NO: 415008 - DNA, 1233 bp, Homo Sapiens
  misc_feature (526)..(563): n is a, c, g, or t
caaacggaggacagagaggcgcagccgaccaacaaaagagattctgcgacgcaggaacgagatgcggggcaggcgcacgcccaccgcgcctcgcggcaggagccaccggagagtgatggcacgcgagtaatggaccgacggagccacgaatgatggctgtcttgtctagtcttgacaacacaacatgcaagccacagagcgagagggcgggaggcgagacgtaccgccaggaagcgaccgacgaccagcgagagcggggcggagcagcagacgagcgacgcagcgggggaatacagaaaggaggcgccaaacgaaaaagaaaggtgaaacgtggaccaggcgagcagcgaagcgaacagcgaacaaagaacttgtctggccataaaaacaaatgagaaggccgagtccacgtctcggcagatcggaactacacgaacgccgaacgcggcgtggaaagagtaccgatagagatacacgaggatacatccacctattctaggaagaggactggcggagaaaaacgacnnnnnnnnnnnnnnnnnnnnnnnnnnnnnnnnnnnnnngaccacggagcacacaacaattgtctggctacaagcgcagagccgcgcgcgagtgcgacgaacagacgcagagacagagcaaatacaccacggcgagctagcgagcggacgagagcaaacagatcaagaaagggaacaaggagcgtgcgccatatataccacgaacaacacaaagcaaaaacgaagagattagaagagaacatgatgagtggcccacaacagcagcgaacaccaacgacgcagacaacacctagtaaaacacatggagagcacacgcacagagcggcgacagcacagacgcaaacacacaggccaacaaaacatctcgtagattaaagacacgacacagagcgaagcagagaagaatcaagaaaacactgcacacaagaatgctacaatcatacaaccaacacatgcacgaacatggaacgaggactagcacctcgagcaacgacaccaccagagaaagtaagtcagaatcgccaatgtcgcaccacagagggaacaggcaatcgcgcgctatgtaatagaacgattgagaagagataataaatcagacacagagatagactagcataccaccacgcgagaactggcacgccaacacagcgtcgatctaacatcataggagagagggagacgatatacctaacagacacataaggagggg

SEQ ID NO: 415009 - DNA, 902 bp, Homo Sapiens
  misc_feature (356)..(369): n is a, c, g, or t
ggggggagaactgcccatttttattaaaaaatatggggcccaagaggtttctcctcgagggccccccctcaaagaaaaaagccccaagagaaggacaaaaaaaggaatctgttcacccgagatccttcttgtgcccggggaacttcgggctcggggaacagagtgggggaaaaaagaagaggtgggggtggctgtgcgccctccaagaggaggccctcaataatatccgagaggcctagggcaccagggacattcgaaaaggaacgccccgagaacgaggcaatctcggggaaggaataacacgtgtctcctcaaaagagtgggtggcccatgtgtgtcaaccgaaccctctctcnnnnnnnnnnnnnnagaggggggccctctaggtctggagagattcctagggcggacaaaagggggaaggtgtttattaacccccgattcttgtaggcgttatccccctttttgtgggccccaacacaaatcttcccgcgatattttgttgcgaagaccgccaaattggtgaacaccttgcggtggggcgccacctcgagagggaaaagaggcccccgggcaaagagagaccagaaaccctttctcgcgagaaaaacgcccggtggggcaagaagacatctttcgtggagacggaaaaaaacaccgcagaaatttctcggcaacccttcaacgccgattttttttgagcgccttttggtgggaacgtatgacaccaccctcacagtaggtgggcacctgcgagaatatagggagaaggagcggcgggctgataaacggagggaaatgcgcggttaaacccccacgggcgtgtgttaaaaaaccccgggaaaaagaggcccatagaaggcgggcccccacggggtgaaccactgtaatccgcgacacaa

SEQ ID NO: 415010 - DNA, 1009 bp, Homo Sapiens
aatctaatattaaataaattttgttattataatatgtttgtaaaataattgtaattacctagactcaacggccccgaccctacacacactcgccacaccgctcagcaccgacacgacgacatagggaggacaacatcgaaaaagaacacagaacaaaaacgagcgggggagggcgggaaggccaagcacaccagcaaagaaaagaacgccaccgaaaagacacaagaagagagaaggggaggaggagcacacaccacgcccaacacaacaacaagacacaaacagcacagggacaggagcacggcgagaacaagaaaacaagagagaagagcacagcgacgcagaacacaaagcattccacacacccaaccgagacaccacagcaccgaggcgacacaacgacaagcaccgagcgaaactccgagaagagacagggaacaggcagtggagcggaacccacacagaagaaaaaccagaaaaccaatccacccgcaagacaccgagaagagccagaacatgccaaccaaccagcggcgagagtagcacgcaagctgaacaacgcaccaaacacaaccgacagccccacacaaataacacacagcgaagacaacaggaccctggacgcacaaaagaaaacccaaggacaagaaacacagacagaacaaaaaccacaggcgcccccgaacctcacacgcacccgaggcgccgcacacgcaacgcaacacggaccacatggaacacaagagcaacaagaacagccaccgcccccaccacgcggcaactacacaccgagcgtgcaccagacagtcgaacagactagcccgcaccgcacccgccccaaccgagccaccccgcaccagcaaaacacaccgcagcaagcaaccacggagagcgcccacacaggcacaaacccccaccgaccacgaaacagccgccacacccaacacagaccccaactgaaccaacccagcgagccaagccacacacccaaaacactagacacaaccag

SEQ ID NO: 415011 - DNA, 1427 bp, Homo Sapiens
  misc_feature (228)..(228): n is a, c, g, or t
  misc_feature (479)..(487): n is a, c, g, or t
ggaggaccctaaaaccattctttttttggcccatttacagcccgtaaaatctggggtgctggggcctgtgtgcccaaggggtaatatggaaggtgggtatcctttatgggcctggaatcctcccgggatagctcttaccatgtgtgattccctccgggggtagaagtctcccttgggaaccctctggcgacatgggagaaccatatggcccgcttcaccaaaacacancagctcttgcctttggggccccattgaaaaatccatcctgtgtggacagagagggcacagtctccctgtgtaatgttcacactgtcagagatctgagaatattacatctcttaacgggagaggggagatcctgcgatatgaatattctgaggccccggggcctcccctcctatgtgggcgctatacgggagaactctctatattctgtggggcgccacaaaggcggtgcccctagagatcggaagaagaannnnnnnnntgttcccccagtgtattgtgcaccaccctcgtgttttgtgtgggtgcgtggaacatatatacactctataaaactggggggtgtttgttgcggcgtcttgggagaaaccctatccacagtgtgggtgtttcccaaaaaaactcgtccgcaagaatgattgtgtcctctctctttgaacactctccacgcggtggtctcccccacaaggcttcttttgtctaacaatcgtgtgtgcacaaaaagcgcgtcgcttatgggagtttcgcccaagtattgtgggactattccacaatagtctctctagtcaacgaaattgggaaacatactccataataaacagagggggcgcgcaaactattatccatccctctgttggggccccacgtggggggccacaaaaaggtggctatttcccccgagggaatatacatctcttttggtgggggactccacaatttctcctcccacaagaatgagaaacatcattcttttgggcccaccacgaatacgttggtggttggatgtgcaccccacgcacacagaaagttcttttgtacagggaaaagaggggggggcgccacttaacaaaatctcctttggtttcgtggagacacaacacagttgcctccgcgtggacgccccaagatgagaaggaggttctttttccccccggagatccacaccatggtgggtggggcggcccccacaaataatgattatccaaaggacacacccccccctttgtttgtggagacagtgttgtttatcatctcccccccaaagatacttttttaccaacaagatcatcactcactacatgtggtggtgatcgacacattgctcgggaccaaaacataaaacagtggggcctctcccaaccaaagagaactgccgtgttaaagaccttgtcatttgttgccaacaaaacacgccccgaaaa

SEQ ID NO: 415012 - DNA, 1209 bp, Homo Sapiens
cttatttaaaaatttaaaggtgggttatttccctaaatccctattttcccttaaagggggcgggtggtttttgagaaatacggggggtatattcaaaacttgggtatccccacttttgtaaaaagtggggtcttattatttttccctcaatgaggcggcggggttctccccgtgagtagtggggtggggtgacttcgtgagccccaccgtggaaccgagggcgttctgcgaaaaagctcttctccattcaataagccgccaaggtgcatcgaattaaaacacgtgatcgggtaaagttcaaaagcctttccggtttaacaacgagggagcggcttcctcttccgcggatataacgagggtggaacacagtgtcccgaggtaaggctcgtgttctcttggccctatgttccacatttgtggggcccccaaaaagaggaagaggggcgtcctgggggaaaaaatgtcccccgcagatttagttcacaaatataccacgttgttgtggcaagtggagggtcccaagaagggcgtcttgaaagaccctcggggtaaaatgcccgcggggtacaatattctctaagattttctccacagaagttctttcgtgttaaaccctcttgcacgaggtgaaccataaatttaagcgcaggtgccctctcttttaacagaccctcgggagagttgtgtctatagaccacgtggcgtcttggttgttccacaagcgcctctcgtggcgtgagtgtcacaaagtccccccgagagattgggctctacaagggggctctctgaaaaattgtcgtgtgcgcccagtagagatgtcccctttatataagaccgccttttaattgcgccccacaattatgttttcccccacaagggccctaggggtgtgttgtaaaacctctctccgggacgaaaagggaaaatctgcggtatggccccctcttgagggggtgttgggaccccttctgtgccacagagtgcacaattgtcgacggcaagaaaaaattaattgcggccaccaatcattggtcggcaaacaaggaacaacctcctcttggaagggggttttgaaaccccccggggggcaacaatcttgagaatctatcggacaagggagaggcctccttcaccaccagaagaaacattcttgcgggccacactgcgtgatgggtaaaacaccaatcgtggtgtttacacaacacccgg

SEQ ID NO: 415013 - DNA, 1329 bp, Homo Sapiens
  misc_feature (337)..(337): n is a, c, g, or t
  misc_feature (699)..(707): n is a, c, g, or t
  misc_feature (867)..(867): n is a, c, g, or t
cacattattggggaaattttaattaacccttaatattggactttttataatttggtcggaaagcccgtgtggaatattttcccttttttggaacacaaacctacgggggttctcttaatttttagcacaaatagtttgaaaaaatttgcagtgaacaccggtggtgtccctaatatgtgtattaaaacattggtgtccaatatatattacacaagatgttcacttcctatccaaatatccttgaacaaaaattattctgggaggagttgttgagaaacgctctggtttataacatttcggtggaatggatacactattaacctatgtgtatatttgngggtgcgctgagaataataaaacacgatttgttgacacatataaaaaagcactatgtggtgtgtaatatatatgacgtggcgtctaaactaaatagggggaggcgtagatgttcctatataagaatatatacgtgggtgtattttctaacacgcatgtttaagaagatataaaagacgctcttatatccgtcgggttatttatatcttttaatatgaatatgggagggacctcctctttgtttcccagaagtgcacagaaaaactctgtgtgtggtttttccccacagacagattatttatataaatgcggggcacaaatgttgtgcgcaagtattatcacccgttctgtgggtatgagggnnnnnnnnntgcgcacacaaaaacgaaagtgtgggcttgtgcccacaccgacaatgatgaaaagagaagaagataattacacggcgtggctttaaataaaaacgatagtgtgtggtctgcggtatcacacaaacagacgaggtgctcccactttctgtgaaagatgtgnggtgttccaccacaatttatacatattgtgggcgcgcgtcaacaaatctccgcttattaaaaacaagtctgtcggggtgtgggttgcccaaaaaaagtgcgggcaaaattttaacagagatttctctccacaacacgcttgttaaagtagaaacgaacaaacctgagagacaccgacatgtaacagcccgagagtaagaccaccagtggttactcctttatacgagatgactatatattcggcccccatattatataagacccacctcttttcaagcgccacccccacagtgtggcgggtttaaccagagaaactacaaaattcgtgtgggcctaccagggaaaatatcgcaccgacatttaccccacgatgttgtgtgccctttcgcgacctctcacgccagagtaagaagcgggccaccaactaattcttccaacgagaagaacgttttttacacaaacc

SEQ ID NO: 415014 - DNA, 776 bp, Homo Sapiens
gggaaacaagggtttttttattattgggaggtttatctacaatgtgtggcacatgtgggggagggtggaaatgctccggggagggtcccccaccccctccgcaaaacaaagataaaaaggctgactcaggggggccggcagagggcacggagtgcagagagtaaaaggcagcagcgtaaaacggtggtggccccccatcaggtggggggtgttctggaaaacggggggcaaccccgtgaaggaagtgggcagaggaaccagaaccccgagggggggaactcctgaactcctataaaccagtgtgtggggccacggggtacgagggcccgcggggaagtgcatagagaaaggggttgcggacaagtggggaggggctacaacttcaagacaacaaatacacggagagggtgggggacagggggctcccagggtgtggggtggccaccaaagggggcgcaggacaccgggggctcgtagaaagaagggccgtgctcactagaccaaaggtcggggcccaacccagaggggcgaacctctcgagaaaagacgcagtggtacaccgcccagggggggaacccccgcctatgtggttacatcttggcgccctcaaacatcgagaccggggggggttccccccggcaggtccctcaaccgcttgtgtttaaccacttctgatgtgttgaacaaagtctttggtaccagggggaagacacactcggcgaagtgttcgtcatttctgggccaagggtcacaaggcatgtaagtgggcccaaaag

SEQ ID NO: 415015 - DNA, 1296 bp, Homo Sapiens
  misc_feature (563)..(563): n is a, c, g, or t
  misc_feature (764)..(764): n is a, c, g, or t
aaaagcctaaaaaaaatcttttgggtcaagtaagtgaacccccgtaaaaccgcaataaaagggtttaaaaatgtcggggatcacttttttcccagaattccctcgggtaatcttactcgcaggcatgtataagcaaagagtttgcaccttttaaaaaatgtgccaaaggaaaattacgctattccatatttaggccgacagaattaagggcgccatcttcatttcccagggatctcccatatgtgtcggctttattagaccggggtgagcatctccgccagcggcggaagattgggagagggcgcccctgtttgtgtttattacggctagaaggcatgtgcccatatagcttgcagggtgccctcagagtttccgcgagagaacaccccgggggggccctcatgttcttggaggagagcgtctgtgagagaagggggcaggagtgagccttgcctctcccacaatcctataagaatcacggagaggggtccccaaaggtgtgcgctgtttatatggcatcccgggggtgaaatccctctgggcgagagtgttggtgacaaccncctctgttcccccggagaagggtggcggctttaagaacaaatcctctgaagaggcgcctggagcgtgtggggtgtgtcgagacaagggcggaacacagacagaccgagggcggcggcaagtgccgcccggagaggcttattgagcgatgggcgcatccatgcgagttcgcacaccgaggggtctccagagacggccccacnagtggcgcgctcttttcgctaaacaacgcgctgtcgtgacacgacggaggggggctccccactgctggcctaccacacccccgtttgcgttgtgtttttcgcaccctccttgttttgtctcgcacaaggcgcccccacaatatatatctccggcttctttgtgccaagggaggcagacagccgcgctctttgttgagcaccaccccggagggaggcggcccccacaaagggggggcctcctccccaagagaggggccccagcatgaacacacgaaacaagaactgtggaatgtattgcaccccccattgtagtgtccacttacgtgagagcaaattatttagtgcagcgccgggataatttccgcagactaaaaacaactatttaacacccccgtctctttcggcggaaccagcgatgggagcgaacaatataagcggcaaagacgacggggcggtgggaccaactcccggttgggaccaccgctagacaacaggctgtgtaacaaaaaagaacacggtgtcgttgcccact

SEQ ID NO: 415016 - DNA, 1214 bp, Homo Sapiens
  misc_feature (369)..(369): n is a, c, g, or t
atttataaacatttatagctttttttaacccaacccaagtccctttaaaatgggatttatctggtttccactttgccccctttcccaggaagaaatcctttggggacaaagaagaggggtgcccctgttcaatatagcgccaaagccttaaatatgaccgtggtgtggtctcccccactcatggaacaaaagccggaagggaatgtggacaaaaaaaacggtgtgtgcttcacacctgtagtccctttacacacacgagaggggggaaattagacaagaggctcttggggaactatgccccccattgtattgtcgcgcccagaatctcttataaataccaagaggcaggggtaaactagtgcaaagagngcacccctccctcgtgtgaaaattactggccatcgcgcaccctccatcattgtggggagtgacaacagagggcacaagtgtggcgtaaaaacacccaactggtcctctctccgaaagagggggaaaaggcgcttgaaaagagcagagacgctcctaatatcacgcgagtatgagagtgcggtgtggggaagaacacctcgctctctccctaataacgcgaggggggctctgtgagaactgacaggcacttctctgagacccacccgcgggaaagtgtggcggcacaaagggcgcggaaggcgaaaaaaggggcgcatttgacaaccgaccaggtgtgtggcgcagaaacgcaaactccctctctcgcgtgagaaaactcgctctgtgtgccgcccccgccgtgcacagagggacggaattacaactgctgttgtgtcgccaaccatatgacgcgccacattagtgtcagggagggagtagctgtcgtcgtgaaacacacacaactgtgggcgggtgtggggagaatacctcaacaaagggggcggcccgctattatcctcaactaatatatcgctgtgatctcccgcacggtcatatctcgtgggaagagacccaacagtgtgtgcgagcaagaacaaaacactagttgttcggcaccccgacggaaaaggggtctgttagagttgtgtcgcccaccaccgccccacaaaccacggggtgcgcaacaattgggggagcacacccacactaccaattggtgggcacaacacactcctgggggttgtttgacacacaaccgagcgaacaacacgctttattcggccccagttaaggaacacaacctg

SEQ ID NO: 415017 - DNA, 844 bp, Homo Sapiens
taatgccccatgaggggggtcccggggtccacaaagaaaaaggggaccccaggtggttggcaaggagcaacaatgtcttaattacggggcgaatggggagaagacccacagcccggtgtggagtgccccaaattgcgatagaaggggcatatgaagaggcccgtgagaaagaattctctccgcagaagaacccccggggcgggggacctcatgtggagacacatacggatggggggcggcacataacacctcacacggggttggcaataacccgcgggtgtaataacgcgaggagatatatatgagagagagagaacggtggtgcaacagggagaattcctcccaacccatgtatgatcacgatagaaggggtcccaaccgtgggggcaatatatccatagaagagtcgtgcgtagaccagggatcgacacaagaaagatactgtgcgcacataatcaatctatctctccatctggtgggcccccactgtgtgggggccggtgcaaaaaataagccccacctatatgtagtagcaccggggggggacaaacagtgtgaacaacaaaaagaggagccacgtgtgtgtctccccaacaaggtgcgccgtgaagagccctctctgaaaaaaccacacaacagcgggcgaggcgagaacgtgtggcgcccgggcacataatgaagaaagaccactctcttctatagagggcgaccagaagtgggccgcaaaatgaaaaactctgcgggtgaggaataaacagagggggcccacccgagataaaaatttttgtgcccgcgcgggtaaaataggggggcgggtgataacaatcacacccgcgccacaaag

SEQ ID NO: 415018 - DNA, 951 bp, Homo Sapiens
atttgggtcccaaaaatgtttttttgggttgaaacccggaacttgaaaccaggaacacccaagagaatgcgaacccgttgtcaaataaggccaaaagggggggtgggagacgggtctcacaggggtccccagaatgaaaggctggaggggctggggcctaagagcccgggaagggggcgtccagtgccggggacaccctttcgggggctggtgtgcggcgacaaggggctgggggcgccaagaaggcccagaggaggagcgctgggcgaataaatatggctggaaacccgggggtacccagggaggccacgggcttcccgggagtcactcagggggtcccccccgggggaatatacttacggtgaggagatctccccctgtgccccccgtgtgctcccacagtctgtgcgtgcgcgggggggcaccatggtgctctttgagacgcctttcaggagatctcccacacgatttgctgtgggcgccgcctttcaacctctcagggggacgcccgctttcaaaaaaagagctttctctttgcttccctgaaaagtgtgtgtccccaaccctcccttctcgtgcggtctcccccgcgcgggtggcgaactgcggggcacacgaggtctccactgcgatgcgtgtgtagtctccgcgggtgtgacgcaccccttgtgcaggcctgtcgcccccactccaggggtgtggccaccacgccgggggcgcccctttggtggtggccccattgtcgctagaagcgagtcgcacgtgcacagtcgcaagacgcgtagagtatcaaccgcgggttggcccccccattgtgtcgtgccaccacacaaacacagcctcctcgtgtgcgtggacaagaagcacctctctctatcatctactcgggtggggcgcccccacacaaaggagggggcgaccccctgtgtgagcaccccgcgctcgactaat

SEQ ID NO: 415019 - DNA, 1169 bp, Homo Sapiens
  misc_feature (110)..(141): n is a, c, g, or t
  misc_feature (798)..(852): n is a, c, g, or t
gaagaggggctcccctttttgatattataaaaaaaactcctggggcccccggggtttccaaagcttcccccaggaaccccgcttttttgttaaccgaccacaaaatctcnnnnnnnnnnnnnnnnnnnnnnnnnnnnnnnntagcacttgtgagcgtagccaggggattcacatatggggcacagctctttaacatcccctggtgaaaactgccccccgagggctcttgagaacatgtgggggtgcaccaagtggcattatcccctcttgggtttctaaatcttacgcgggtgtgagtgaataaaaactttctaactccccgcccgagaataacaaaaggaaggagacccctttgtcgcaagatgttaacacaagagaaaaactccggcggtgtaaacacgaagagaggcgtctccaatctcttgcgcatctctcgagggcgagggtgtctcctccgagggggaggagacccctcggggagaatgtgttcttaccaccctgtggtgtgccccaaccgccggtggggcgtgttcatgtgcgcagaaaactatcttcttctatttgcccttaaaaaagacaatccggcgtgcaacaacggggggcctcgtgggtgtggggactcatccgagggggcgcctcctcaaagtgtgccaaccaccccccgctttgagtccggcgacttttcccgtttggagaacgacaaacgaactctcttattccgcggagagaaagacccacaaggaaaccttcaaaaagagtggttcccccaagccggcgggggaacacccaggaaagggnnnnnnnnnnnnnnnnnnnnnnnnnnnnnnnnnnnnnnnnnnnnnnnnnnnnnnncctatattcccccccattagtacaccaggagaggagtgcggccccccacaacaaaaagagggggcccacatgatgaagccattcacccgcacttggaaaagagcccctccgagagaggtccaccctctttgtaaagagcacccgcgggagaaaaaccccacgggaggggacaggaaggacatagcgaaaacggggcgcacacgagacgtaggggggtgaaaccccggaagcgacccagtgagggacgcaacgaatttgctctcgcgccagacaaaaacaggaagagctcccctgtaaagtacaagaagagagattcc

SEQ ID NO: 415020 - DNA, 1103 bp, Homo Sapiens
  misc_feature (70)..(70): n is a, c, g, or t
gcggggggcggcagaaaaaataatactcaaacaagaaagaagccccggtgattgatgccatcttctcacncgatgctttatacagtattcttctcctccaataatatgtctctcccacgttttgagacggctcacactccgagtgagcgtactgatctcgccgtgttccaatgttgctcaaaacaagacgggggagaaaagggggtgtagtattctctcgccgagccagaaaagagatgactcgccacgcgggtgagtgccccccctctgtattctcttacttacgccgagaggcgcggggggaagagcagaggaggaatggtcacggttgacagagcggcttatctataaaaacacgcgcggggcagccccatgttgtggttgcccagcgggaaacaaggcgcgcggttgtttgttcaccccccccggagagaacaccccaccgcaaagaagcaaaaaagagagagagggcggccccccgacgcacactccgtcgccggccgtgacagagcggagccccgctctctataataaggcatcccaccacgcggggctccgccccacaccggtgtgcgcgcacccccagcgcgcggccgcagcgggggggcccccaacaaacaccccaccagagaaataataacagccccgggtggttgcgcgaaataaccacgccggagtcgcttttcagcgaggggaagaacaccctttctacacccaaaatgtggggggcccaccaccaaactccctttataaacacgccggggggagggaacaaactaacaactttgcctcccctactttaactattcacgaccgccccccactctattgtggggggagcttccctcagaggaagaagtcgagcgcgccatgacttttagcaagccacccagtcgtttctcccatcacccggtgtcatagaggcgctgtgacttatacaacgtggggctcgccccacgccattcctccctataataaaaggacctgtgggacggccggcccccaacaacttctgatggtcaaccccaccaagcgtgggcttgctattgcaacaccacccaaaacacaggggtacctactgactgtacgatacggaattacac

SEQ ID NO: 415021 - DNA, 1358 bp, Homo Sapiens
  misc_feature (72)..(80): n is a, c, g, or t
  misc_feature (439)..(439): n is a, c, g, or t
  misc_feature (789)..(789): n is a, c, g, or t
cacacacaaaagataacacggggggggccccctttttctcttttttctacccacacacagggggggaaattnnnnnnnnngtgtgttaattgcgtggggggaacaatcactgcgtccgacgctcgttggtgttgaaaacacccgtgtgttgtagaatagtcctctcttaagaagaggagcgcctcctcgagaggaggggtctcctcgcgcgacgaggaggagacccctataataatttctatgttgctctctctctaacaaaaacacgaccggtggtggcggtgtattaatcctttatgagtgtcgtgggagagaaactatctctctctgacagagagaggtatttcaatcaaacagagagacgagtgcgtctgtttgcgtaaacaaacaaaacaatctaactatatatgtttgtgagcaacttgtgttcccacacaancaaatgtgtgcgctcatgtgtgtgagcacacactctctctctctatctatgttagtgggcgctcatttgtcgcccccaaccgagagaatagtatgttcccacaagcgaggggtagcatactgtgaagtctataatcatatattgatgtgggcgcgagacaatttatatgacacgagggggcgtctctctctcatttcatcatcatcttgatgtgtgtagacgtagcgcctcttcatctagtgggcggcgcgcgctatgtagcgaagaccaacccactcgtggagagaaaaaaacatcacgcgagcagaaaacaacacagcgcgagaggagcgcgcctctgttgtaaaaantagaacacgcgcggggggaggagataaatcatcctgcgcgaagcgaagcggagccgacaacaccacgcgacgcccgcgtgtcgtcttattgagtcgaggggacgaaccaccacaggtgtgctgcggtcaccatataagatgtgtggtgcacgccccacaacaaatgagatagggcggccccaacaagagggaggacacaacaaacgagcagagacaccacaccgccgcgggggagaaaaaaacagtagtgggattacctatcaccaagccccccgcgggtggagcaatataatatagagtaaattaatacatacctgccgcgagaagtagagcgtgtaggacaataacaacgacacccccggcgggagtgtatcaatctcatcataatgtagggggggcgtactcacaaaaaacaccagcgcgtggtgagtgtagagatgggcgtctatcaccacgagaggaaagaaaactatgcaagggggggcggcaacaacacaaaaaaagacagacgccctctcgtctttttatttaataaacaccccgcagagcaaggcagcagggaggagggg

SEQ ID NO: 415022 - DNA, 901 bp, Homo Sapiens
  misc_feature (135)..(198): n is a, c, g, or t
  misc_feature (423)..(518): n is a, c, g, or t
  misc_feature (751)..(806): n is a, c, g, or t
gtctatttcatgaatgttgtgaaaccgaccagaaaatagaaaatgctacgccagatgacatcatgaacatagaatacaagagaaccacagcaagagacaaagagaaacaccaaaccaaggaaggcgacggtgcannnnnnnnnnnnnnnnnnnnnnnnnnnnnnnnnnnnnnnnnnnnnnnnnnnnnnnnnnnnnnnntgaaacagcaaagcgaccaaacaggacagaaacacagcacaacgagagagagagcggacggcgcgagagcagagtcgcgccaagcacagacacaacacaacagagaaggaggacacaccaccaagcaggaaattgaaggatagacacgagagaacgcgaaccacacaagagatcacagaaaaacagcagtacccgatcaaatgagaagacaagcaccacaaagcnnnnnnnnnnnnnnnnnnnnnnnnnnnnnnnnnnnnnnnnnnnnnnnnnnnnnnnnnnnnnnnnnnnnnnnnnnnnnnnnnnnnnnnnnnnnnnnnccaacaagatgagagaagacaacatacgaagatctacaacaccacaaaaaagaaacaaggccaacaaacaacacgaaagcaaccagacagcacagactacagtagaccaccacggaacaacaccacacgacgagacgaagagcaagacaacaaaaacacagcagagaccaacagaaaaagcgaggagaaacaacacgctaccactgacaaagaggagccacagaacacgagcnnnnnnnnnnnnnnnnnnnnnnnnnnnnnnnnnnnnnnnnnnnnnnnnnnnnnnnnggagagaacaactcacagcgcagagacgaagagaagcaacagcagacgggatacatcaatagaggtgaaacaaaacaagtagcagacaaacacgc

SEQ ID NO: 415023 - DNA, 625 bp, Homo Sapiens
cattttttgccccccccgagaggataaccaccgccccacacacgaagtagccggtgtgagagacgcagcagcgcggcgagaggggggacaaagactcctcgagacaaaagacgcgagaccacccctcggcgggggggagcagacaacaaccacacgccacatgaaagataaaaaaacaaagaagaggtgacgcttccttcttgtggggagaggacctttttgtctcgctcgtttcatgcccgaagcgaaagctcaagaagacgggccctcttctcttatctttattatgataatatatttgttctgacaaaaaagagatggcgtggcaggcgcgcgacagaaactctttttcttattattgcaccgcacgaagaggcagagcggactacagacacacgactgcgaccgcacaccgcaccacgcaagtaaataatataaaacacaaagagaattgggtgtcaactcgagtcaaagacacaggacgggtaggggatgagggtgatttactttacatataatgaaatagagaatgaaaaacctaaaactgtttattgtaaaagcaagcacggagtggcgaacgtatattctaaaatatcaatttgtgacttctactcgctcgaaagat

SEQ ID NO: 415024 - DNA, 1112 bp, Homo Sapiens
  misc_feature (619)..(648): n is a, c, g, or t
attccttcaacctttttatttcaaaaaaaatcctttcccaagcttttttcccggggaaggagggcccagaatttaccgaaaataacccgccggggtctactccggtcccaacaaatagttgtaaacaccacgcacaacaaacagaccaaaagtttcacagaggggaacaactctgtggaagcgaacatccgaggaaataaggtgccccaccactaactgcggggaacacagagaggtaataaagaggggtcaccccagtggggtttatccacagtggagtcgcccggaaactcgagggctcgaccgggtgtgagactgtgcgacacatgggcgtgtctgtgtggcgagcacgctggcgcctctctgtgcctctctcaggggggctcacaccacgctgttctcacacagtgagagcacacaagtgtgggcgcaccgagagaaaattatatgtgctcctcgctctgtgtgtgtagatatacctctccacagacacgctctccatctcatatgtgggggcgaacaaaaaacatttttcccacaaaatctgcgcggcgccacaggggagcaaaaatacactctctgtgtgcgccgatgtgtagcacccctacgcggggcgcgnnnnnnnnnnnnnnnnnnnnnnnnnnnnnntaatactttacatcttctcctccgactactccacgacatatgatgcgtctcccccgggggagaaacacacatatcacacacaaacaccacaacaggtgtgcttcccacagacgtggggggcaacatcaaataagacggaggggcggcggagacatactacaacaccacaacaaccgcacctcactacaagcgttggggacgggggcgccgacatagttgggcggagcagagcatctaccgacgcgctggtgtataaaatctctccacgaaaagacactctatggtggtgggcggagcgcgcccccacaaggagcgtgcgggccggggtatcctcaccacacgagcggcgcccccacacaaattggtggacagaccaccgatctccgggggcgccacaaccaacccaggggagaaaacccccgcggggggccctcctctaccatacaaacaccaactcaccagaa

SEQ ID NO: 415025 - DNA, 681 bp, Homo Sapiens
aagggggccacaccacagagtggggggttggtcccccaccgccgcggggggccaccaagagaacaacaataagagggaggagcaccagcacaacatcacccccgccacacacaccaaaacacagacgccgcacaacaagcgaagcgcgttaccccacgacgtcgcagacaacgactcggccggccacgacgacacaagaagacagtcgccagcagagaggaggacgcgggcgacagcaccacctcaacatccagcccagcgagagcgagcgaagacaagaacaagaccgagcgccctgctcatgcgtggactccacgaccactactcctctattatccgtcgcgcgcgcgagacacccgcgcgcagagagagaagaaaacaacaaagagaggcgcccagtgcgactgaaccctcgccgagcgagagaggagaagtgaggcgtcctgccaagagaaagaagtgtgcgcacgagaagcggagccacccccggcagacgactctcaccccaccgagcgcgcgagcgagaagcagaaagcaggcgggagcgacgagagagaaagacgcgcgtgcccccccaacgcggcgaatcactgaacgccgcgaccctccaccgcatcccggtctcgagcgtggcaggcacaccgcccgcgcggcgagagcgggcgagcggcgcgacgaaat

SEQ ID NO: 415026 - DNA, 509 bp, Homo Sapiens
gatgagatgaaaaagagagagcgtcgttgctggtggatttcctcatccagaagtctgcatcagcacgcgggaggacgcacaggggacggcgaagacgcaaggtcgccagcgacaggacatgccacacaccgacctcgagctgagcgactcgcccacgcgccagccgggcccgaccaccacagagccagcacgcaccacacgagcagagagacagacacacccgccacaacacaagaggacatccaccagccaaggaccgaccccgagacagagaccacaccaccgcgagcgcggggcaggagacaccacagccgacgcccgagggcgcaccgacgcgagacacaccagcatcagccaccgcgaacgccagacgcactcgacccgacgcccacggtgagagaccctagaccacgcccacacaccgagagcgagaagacctgccaccacagcggcggacaccagccccgaggcagacgcacacaaacgccgcgaccgaaccagcgtgagac

SEQ ID NO: 415027 - DNA, 1104 bp, Homo Sapiens
  misc_feature (72)..(81): n is a, c, g, or t
  misc_feature (277)..(286): n is a, c, g, or t
  misc_feature (655)..(667): n is a, c, g, or t
ttttttttcccccccacaaaaaatcccgcggggggggtattcccccccataataaacgaactccccgcggcnnnnnnnnnncaggtgagaagacaggggggacaccagcatcgccctcacccggcggtctcctcgacatacacgaggcagaaaaacaacacaaaaaaggggggtgtgatgaggaaaaaaccctcctgcgctggaccacgggggggacaccacggaggagaagatgtgcgagtaagccaacaacatccgccccgtcgtctcaaccgcnnnnnnnnnnagcccaagaagaactaccggcaggacgagaggtgggggcggccccaccaaaatattaagaggcggtggggcgcgaggcgggcaaacaccaccagtgggtggggcacgaacacacaacgaccgtggtgcggccgcgcccgctccccctcacggaggggcggaggagtgtggaggcgcccccccacagaaattatgttggagacaaaacacaagccacacatctaagacgcgcggcgctccacgaggggcgacgtaccacccgcggcggggcgggtggaccaacctgcctgcgcgacacatggttgttaccgcaagccccccaagtgcggcgaccccgcgcgtgtggtggtggtttacaaccgcactcgcnnnnnnnnnnnnncgagcgagagctgacccaacacgccgggaggcgagaaaaaatccactagtccaacaacaaaccttttctcgttaacaacagggagccccgcggggagaaaaggatcgagcgcgcgcatcgtagaagcaacccccccctctactgttgggacacaacccccctccggtggagttgtcgcagtcggcacaccacaccaccccccgcagcgagcgaaataacggcctgcacctctacgtggatctaattcaccccgcccacaacatttaacccacgcaactacaaaaaacaggggagtgcagcatcaccaccaaagagatccgtgcgtaaacaaccccgccgcggcaaagaaggggcgccctattttttgccccccctccacaaaaatagacggcgcctctatacaaacgcacggcgggctgcgctaatgaccacccccc

SEQ ID NO: 415028 - DNA, 933 bp, Homo Sapiens
  misc_feature (76)..(123): n is a, c, g, or t
gggggcgtacgtacagaaaacgacgagggaggggaagaaaaagaggtgcagccccgccgccgggcggaagaagagnnnnnnnnnnnnnnnnnnnnnnnnnnnnnnnnnnnnnnnnnnnnnnnntgtacacacacacaccgcgggcagagaaaaacacatccccgccgctctccgcgagaggcgtgggcggcgcgcaccgcggcgcgtgcatgtcgctcggcggggcggagcggcacccggcaagagagcgcgcggagcgcgcccgacgtagataagtgtgtgcaacacaacacacgcgcacgaacctacaccagcacggggcgggcgcctgaaacaaccaattggccgcccggcgggcgtgggtgagcacgaaccacactcacgagaggagatgctcattcaacagaactccccaactctccgccgcggcgcgtgagcgcccggacgtgccctcatcgtaaaccatctgtcatgtcgagacgagccgaggctctctacttatactgttctctccaacacacaatcactactctactattgttgtagagtgctgctgtgccgcgagcacagccaatctacactgccgctccgatcattcttctatattcctagcgcgcagggacagaacaaacaccaatcacatctcatgctactgtcactgtgcaccactcctgcgcagatattatcacattaatcatgaaccggagcggacgtcgacgcaaccacacaccacaccgatactggcgtagctgccggtacctgctgtagctgaagcagcaccacagactgcggctccttgtattcgcatatcatactaaggtcgtcgctctagcccatcaatataaccacatagcgcggctcgccgatcacctgcgtaggtgattcgatcgctatctcgtcatgtcctctctctccgctctgactgtgggagcg

SEQ ID NO: 415029 - DNA, 1158 bp, Homo Sapiens
  misc_feature (360)..(369): n is a, c, g, or t
  misc_feature (832)..(832): n is a, c, g, or t
cctttttatggaaaccccccagtacccgcggtggggtggcgcccccctccctcttttattttgtcgtagtgtgggaaaaacagaaacataaacaacaacgaagaaaaaactatcacccatcttgagtcctttataaacttttgtccgacctcttgatgtgtgtcctctcatttatcactaataatagaaactggtatatacctcgctgtggggaggcggcgtaggcggttgctcccagtggtgtgcggaacactcacagacagttattagactgagggacgaatcttgtagacacgtgtgtggtgggcgcagtctctccgcgggttcacacaacacgctggaggagagagagggtctatnnnnnnnnnntatgagggcggccccccctcttttcttcaacccagtcacccccccgcaagagattctaggggagtgtctttcttatatcaccacaaacagtgtgtgcttttatctaaggcgagtgttgtgttgttgtgtcgaaaacaaaaccaagcttttctttctctcccccatctattttttgtctctatctgtctcttttcattatatgctgtgctgtgcgcctctcttttatagccacccctgctcttcttctacgagaacagacataatgagatatgatctcgtcgctggccggagatgagatgtgatgtcctgcagccgcgaccaggtgcgatgtgacgatcagctcctcgctctgccgcgcggcgcctctgcttctgcgcccacgcagacgagatggagatgatgaaacggcaaccaccgctgctgatgtgatagagcagtgcaacgcaaccacacagctgtggcngcgacacaccgagagcagcgacatcttctactcagatgctggcgtgacgacgccgcctgatcataactagtcgtgtcttcaacagactgtgtgaggacgggacaaacactctccgcccaagatgagctagatgttggtgtctgaacacacacccaacacaaacacaatacaccgacgccgcagtgacagacttttatttctgtcattacagccaccacccctcttctctgatgtgggaggagcgtagggttagtttcatcttactcggagcaggaacgttatcactctgcttatcacaacacgacctgcgttcggtgcaagaaaca

SEQ ID NO: 415030 - DNA, 447 bp, Homo Sapiens
  misc_feature (48)..(57): n is a, c, g, or t
ataaaaaacaggaacaaaaagtttctttggaaacgtgtcaaacgacannnnnnnnnnaaaaaagcagcggcggggtgtacccccgaggggccaaccattaaagccggccgcggaaagaaaacaccccctaggggaaacacaaacacaaaacaaagactggtctggcgcccaccagatcggtcgcacagccgacggaagagcagctcacgtccgcacgagcgaagtgcgcgggaacaaaaaaagaacgcgactcgaccccgcaaaggtgacgcacggaggtgcgccgcccgaacagagtgagactccctcgaggggcatccaacgacggggtctgcctcagccgagcggtgcacaaaaagctcccggagcaataaagagaaggggacgcccccccggaacggccatcgcggcctgccgtcccggtggtacactcgtctccctctgaca

SEQ ID NO: 415031 - DNA, 1551 bp, Homo Sapiens
  misc_feature (1480)..(1492): n is a, c, g, or t
aaacggggtggagaaaagaattttattgccggttttggaaaaaacttggataaaggcccgcgggggtggccacaggggggcaacccggggaaattagaaaacaaattccccagacccgaggggccgaggaaaaagagggcgtggggaacaccctgctaggagaggcggggcggtaggcggcaaagcggacaccagaacaccctacaacaaacaaaacaactgggccacaaaattcactccgaggtgtaaaaaacacacaggagagaactccaagaggggggtgtttagttctctcaacaccccgagggggtggtgccccccgagagagcgcccacgtagtgtgggcgtcaatgtataggaggcttgtgcctctgtggcgccctaaagtatctctctctccagaagaaatatctccccactcacagtgagggatagatagatgcgacaggggtggggggcgcacccaatacttctagacgacggggtcttctctctccaagagagagtgtttcgccccgcgcttcacagaagaggcgccagagtggtattgttgtcttgttggaccaccccccagcaggagcgcgtctctacttatgacaccactgtgtgaagaagtggggccgcgccttctgtgtcctgtcctctgtagagggagcgcggtgagaggggagcgctcttctctctcaaactactcaggaggaggcgcttccccctctgatagcaacagagatatagacaagacaagagaactctctccctctagtgtgtgtctctctcgctgtgtgtgtataacacaacgccctgtcgccagaggggccgcctactgtcgtcgagtcgtggtggcgtgcctcgtggacaccaccttgtgtgttatacgttgtcgcaagaggctcttctctctcgcacaacacgtgtgtccttctcacgcgaccctcctgttgtccaatgagggacacgagcggctctttcgtcgttgcgccaccacactgtcgcgtgctgagctctctctcggagggcaccctcctctggtggtggtgtattctgtcgccacacatatagtgtgtgcggccccccacatctgaggggtggttgtctccccccctgtgtgtagtagctgtcgcccagcacaacaacatcctgaagaggggggtcggcgcccacaataacaacccgtgtggttgtgcgaccaaaacaccctcttttctactgtgggggggaaaccacccccccgttggttggtgggtggcgccccccaggcgtgggtggtgccgccatcaacataatgagggagcgaacaacttatgtgtggccggcgttcttgtgttccacctacacaacaattgtttgacactctcccactcaagggggcgctttactcaatagaacacacacctggttttctatgagaggggtatcgcccccctcctctgcacccttatctagttagggagatgtgctctacacgacgaagaacataatnnnnnnnnnnnnnggagaaagtaaaaatattgctctctgtggcacacactagtgggcacgcttatttaaccc

SEQ ID NO: 415032 - DNA, 592 bp, Homo Sapiens
  misc_feature (80)..(230): n is a, c, g, or t
cactcttaatcttcaatattacatattaaaaattcttatttcatttattcagtcatcatcttcatacaatattcaccatnnnnnnnnnnnnnnnnnnnnnnnnnnnnnnnnnnnnnnnnnnnnnnnnnnnnnnnnnnnnnnnnnnnnnnnnnnnnnnnnnnnnnnnnnnnnnnnnnnnnnnnnnnnnnnnnnnnnnnnnnnnnnnnnnnnnnnnnnnnnnnnnnnnnnnnacagagagagcggacccgacgagcccgcaaaccccgaacccaccagaccgcagacaaaacccacgctcgaacacgccacagacgcaccacgaacctagcccaaacgaccgcacaacactacgcattgaacacagcatgaccccgacagacaccgaaatccgcgtacatcacctaacaagcccccacacctaagaacacataacactcccaccatcaactcacaacacacaccccacggatcccctcccaccctcaaccccatcatcgacccacaccagcaccacccatcctcacgcccacaccgcacacctcactccccgcccctcagccccggacgctgccccctcaccaaccgccgcccg

SEQ ID NO: 415033 - DNA, 1281 bp, Homo Sapiens
  misc_feature (90)..(105): n is a, c, g, or t
  misc_feature (445)..(445): n is a, c, g, or t
  misc_feature (1057)..(1065): n is a, c, g, or t
cagtgctgccacaggtcgccactaaaaaaaataacaccccgccgccgacgacaaaaacatcgacctgcggttcgtcctcagcgtcccccnnnnnnnnnnnnnnnngatggagggggagacgagaggggcgggcacaggcgtggaagtaggagggcgcagcgccccacccacccgctgcacgattacagacacgggcgccgccccccgcgcggaggaagaacaatgttgtgtgtgctgcgcgcgtggcgaggcgcgcgccccccaagcgaggacgaaccacacgggcgcccggcgggccatctgaagagcagcggagggggcgcgcgcgcgggagtgagcgccgccccacccggacagtagaaaagacgacatgcaagggcgagccgccaccctccgcatgcttgtgggcgcgcgccgccgtcgtagacacgcacgcgggcgtaanataaccacatagaaaagagtgtgatcggggccgtgagccacggagcaggcacctgcgcgccacacaaaagcaagccggcctccaccgaacggaggggagggggggagggacgcaaacagcacaccgattgagtcatgtccataagaacagaagagcgagagggagggcagggcgagaggcgcgaggagccgcgcgcgacgggtccacttggaggagtccgcaggcacgcccgggcgagggaccaccgccacgcgacgagagggagcgtgcgcgtatggaaggagcacacaagccaagggtccccccgagcaaagcagcggtggtgcggccggaggctacttgacgtgccctgggagagggggcggcgaagaccccgctacgcaggtgccccgcgagcgacccgcagcacatgacgcgcgccccgccgaaacggacgaggccaccgagcgtgagagggaccccccgagcatgagaaggggcgaagcctccccgcggaccgctacccaaagagtggggggcccaccccccgagacagcggagggacgcgacccgaccccacataacgaagcaccgccacggccacacccaccaggcgcgagaagcaaagcgacnnnnnnnnncaacacacccccacctctgagtggcaggcgcaggagggagggcgcgcgcgcgcctatagggatagatggatgtgaaacagcggacatgccccgccgcaagaacacgcgccgcgccgcgcaccacacccccaggagcaggagttgcgtggcgggacgagccactacgcaccgcaccccagccgcagccggccgcctcactcgccgggcgcccccccg

SEQ ID NO: 415034 - DNA, 1184 bp, Homo Sapiens
  misc_feature (702)..(727): n is a, c, g, or t
  misc_feature (1052)..(1115): n is a, c, g, or t
gtttcctttatttcccttttttccctggtttaataaactcgtggtcggttcccttttgtaccaaaaaagacacccaaaaagggggccccccccaatgaattagcggggggggcaggaggacggacgtaagctctcgagcgagataattgtgtgccctatttaacagaaaaacaactcactacacccctcgtgcgaaaaagaaaccgggtgatgtctttatccgccatttttccgctgaagaagagggggcccctatatccctccctcctccatctcatagtgtggcacaatttctctcccaagagtgggagaagagacaatataagagggacatgtccccgcccgccaacacattctccaccagagagattcctctcctcttcttctcttatgggagaaaacgcacaacacaaggggaaatggcggaacccttgcgagagaaggagtgcccattacaaagggcacacaacaggtggggcacgccacccacaaacgagggtggcaggtgcgctctcaaacgggcacagaggtgagtgcggcgccacctgggggcacccagacagaggcgcccgcggacccacccctagcgagcccgcgggccccaagagagacgtctaacacacaatctagagtgtgtgaataaaccccagtgtgtgcgggactgtcactctctcttttactttctcggacggaggggcacgnnnnnnnnnnnnnnnnnnnnnnnnnnctagtataagacgtgttatatgacagcgcgcgccggaccctcgtctctagtaaagagactgctgcgcgctaaagaggtgttgtgccaaaccttgtcggctgtatccaaaaaatagatctctccgtcctgtgaacgacacgacgtgctactctatgtacaaacactacaccagtgcgtctcctctctcgtggcggaaaaaagacgcccatcctctcccttcagagagtgtgtgtgcggaaccacatcgcgctggcaccaactccatgagacaatccctcccgcacagcacactccgcgccatcaaaacacgtagcgaaacccaccnnnnnnnnnnnnnnnnnnnnnnnnnnnnnnnnnnnnnnnnnnnnnnnnnnnnnnnnnnnnnnnncaacaacactcacgaaccatgtcggaaaacaaaccccgccgcaccacaagaagcgggtcgccaacacac

SEQ ID NO: 415035 - DNA, 710 bp, Homo Sapiens
  misc_feature (155)..(239): n is a, c, g, or t
  misc_feature (342)..(398): n is a, c, g, or t
ataaaattgtatctctttgtcatacattactgattttacttattatcttattccatcaactgtcatctcacagtcatcatctaatacaacaacaaagcagaaccactaatcccactcactaactatacacctgctacacaaacaaacagaaaatnnnnnnnnnnnnnnnnnnnnnnnnnnnnnnnnnnnnnnnnnnnnnnnnnnnnnnnnnnnnnnnnnnnnnnnnnnnnnnnnnnnnngagcaacagagagcgcacacagagacagaaaaaagaacgcacgacgcagcgtcagctcagagcagagaccgaccagcgagcgacagcaacagcacccaagacnnnnnnnnnnnnnnnnnnnnnnnnnnnnnnnnnnnnnnnnnnnnnnnnnnnnnnnnncaacacagcacacacacagcgacccaatccagcacaaaccagagggctacctactagacacagcatcacgagcgcacgcgaagcaaaaaacatacctacaagagcacgcacgaccagcacacacgtatcgaagactccagcacagcgccgagcaaccacagcaggagctgagagacactccacattaaaagcaggacaacgcaacgcaccacgccgatagatagccagcaaccacagtgaacataacaagcagctcactgtcgatatgaccagatatacgagacaaatccccaacgactctcaccccacact

SEQ ID NO: 415036 - DNA, 1517 bp, Homo Sapiens
  misc_feature (468)..(468): n is a, c, g, or t
ggcgaccctcctctatattctcctctccgccactctttttataaacaccacagcacacccggtgggggagttgccttttattacaacacaacacacaaacaatattgttttcacacgacacacaatataggtgagagaagcagcgagggccttgtgtgctctcctccataccagcctgtggatgtgcgtgccgcccacctgcttattaagaagaggatacggaaaaacagcacgggtgggcggcggaccttatattcaaagaagtggagagaacacaatggggggcgcggcacacaaaataataagtgtgtgtatgtctcgcgagacaacaacatatgtgaagggggagaggaaaaaagattctccgcgaatatgagggcacaagaataggttctctctctcgcgcagatgaggtgactcctcactctcatgcagtgtgtaggaataactagagtagtgtgtcacatngcacgcactgcgagagagcatactgatgagtgagagggattatcaatccctacaggacaggagatatatctcaaagcggcgagcgctgtgatggatgagatgtgctgggtctctcctctctaggatgtgagaacacacactagaagagagcgagggaagtctcctctcacagactagataatatatcatctccttttgctcgtaatgagatggtgtgtcatgtgctctcctatactctactatcatgcagattgagcggggaggaggtccactccaacaacagatctatctattctcgacgcaatagggggagggatgagccacggaacaacacacgagaaacaaaacaccagcgagcgacgcgtgccgaccaggcaacacactacgccactgagcttgctcgtcaccacccgcgtcccatcaccacggccaatgcagctaaacaacacagagacaagacaccccacgctacgctgccgtgcgcggtgcgagcagccaccatagcgatatgattatcactccaccctagcaaccggccgagggctggagactacaaaaaatacagcccccagcacactcacgcgagagtgaagagcgcgagtagtagtctcactcccatgtgaggacaacacgcgttatatcgtgatgcgagcggagtcgtcttatatcctttcatacaccaaaacagaggagcaccctttctatctcttctgttacagccgtacacttaggtctaaccaaactcgtgtgtgtgtcatcgggccaaagcagggagggcaggggcaacctacaacacacactacagctgacgcactctcggggcacacacatcggaaccgacccggccgccggcgcacaagcacggaccgcacagcagcagcgaaccacaggcggaaccttctcgagtcgtcagccaagaccgcccccccgagacgcgaagtatagctggagcagcacgacgccgtgcggcgcctcgcgcgggggcgcaatccacatcgggctcgcgcacaccacaaagggacgctgcacaaacacacaacaacaaaacg

SEQ ID NO: 415037 - DNA, 1485 bp, Homo Sapiens
  misc_feature (700)..(700): n is a, c, g, or t
  misc_feature (776)..(789): n is a, c, g, or t
  misc_feature (916)..(916): n is a, c, g, or t
  misc_feature (1247)..(1247): n is a, c, g, or t
  misc_feature (1300)..(1300): n is a, c, g, or t
  misc_feature (1375)..(1375): n is a, c, g, or t
  misc_feature (1382)..(1382): n is a, c, g, or t
  misc_feature (1409)..(1409): n is a, c, g, or t
aaaaacattctcgtatttttaattccacatttttataataaatctccgggaaaatgcttttaaaacaaattactttggttctcaggtccattgtctttaaaggatagactttatatagttgtgttaaccaccttatattaataaaggggttcccaaagcgcgtgccgtggtaaaaaactcgggcaaattttatcccactaaggcaataaaccatctccaagcccttctccagaaagagtcctccatagccgccaccagctgtggcaaataagctttacaccaacgcgaaaaccacacacaacacaaaagagccactctcgcaaattgtggtggcggtgcaaacacgggggaacagaaaacaaagaggtgtcccccaccttgtgcgtgtggaacctccccacacggctccaatcataatttgagggggcaccaataagagctccaaacagagggtgggaggggcgctccacagtgggtttctcaaaaagaggtgtgaaatctcgctgcgtggtatggcctgaggggggggtgttttaaacaagagttgtgcgtatctctggcgctgttgtgtgcttttgtgcacccccggtttcaccccagtgtgtaacacccaacacctccccacacgagaagtctctttgtgcgcttaatcgcgccccaagacgaggggggtcgcccgcgtcccgaaaaaactctcccncgtgggcgaaaaaataaagcgcggggcgacctcaaggggggggccgctccaacccccatttcccaccccaaaccannnnnnnnnnnnnntgctaccatttatctccccaccaggagacgcgcgcgtggggcttccgacacatccacccacaatctctctcccttctccaccgcgcaaaacctcttcccgcgcaacaaaaacaactttttctccggngggggcgagccaccaaccaacatgtggcaaaccactgctgtgacgcctcctataagaaagaaaaccacattacttccgggcacagctgtgcagaaacaccccccccaaaataacctctcttaaaacgccacgatgttactaatatattaaacacgcaggcccttccttgtccctattcaccacgaccccaccgctggtgggtcctctcccccaacacacccaccacgcctcttctcccccaccacgacggccacgcggtttcatcctataaataattccaccttagcatcggggggacaaacacaccaaacatacccgcttgtgggctctntcaaattccacctcaacgacgagggctggctccgccatcaaatacttccctanacatacctatctctccccaaacaatctatagttctgatctacatccccaaatcttaatattctctctccgccgtngggaggngaactagcttgattgcgggcgccccgnatacataggtgggtacaacgacactcgcgaggataacataccccccccgcacctattctctattccacgacacgaa

SEQ ID NO: 415038 - DNA, 1090 bp, Homo Sapiens
  misc_feature (231)..(241): n is a, c, g, or t
  misc_feature (434)..(448): n is a, c, g, or t
  misc_feature (963)..(1024): n is a, c, g, or t
cacacaaagaaagaaagaaacacatctacgactctatctacgcgcgtcctaataaatatattcttgtggtggagcacccctctcttgttgtataagtacgaatgccgcgcgcgcggcgtgcataaaatagaactagggagaggacgtgttggtgcttctattcactacccgcagatcaaaaagattgtcgtcgcgcccgccagacgacctctctctcttgctcagcggagnnnnnnnnnnntgctgtggggcgtgggcgccgaccacagacacaacaaccagcggtggcgcagaaaacaaattctttctccagtacaacaccacgaaaacacaacaagagagcgtgaggggagccaaaaccacccccaccacacgcgagcgccgctcgctcttctctcatttcgcgcgcagggggagccggcaccgcacgggannnnnnnnnnnnnnngcccgcgcgcggtgagagcgagtctccctcctatagagacgagaggagacgacacaaaaagaagaggagggtgctccctcgccgcgcggagtaaccacgaacgcgaggcgtgggccggcggcgcggccccccaaatcaacacacactctcacaaatatctagacccatacaccctatagtgtcgagagcagaatcttcgtccacctaagaaaacgcaaggcgcgaggagacactcgtcctcgtccccgcaccgtctctccccactctcgctaacactctatgtgagagggaagcgacgaccccagcgcgcgcggagtgcgtcagaggtcgtggcacccccacgctccttgatagactacaacccaccgcccgcgtgcctgtgctgcgtgcgcgccaagcagccacacggcgccgccaacacacaccatacaccgtgcggatggcgccatcgacccatgagccaaccaccacaccaaccaccgacacgcgcgccaccaacctatgttgggccagannnnnnnnnnnnnnnnnnnnnnnnnnnnnnnnnnnnnnnnnnnnnnnnnnnnnnnnnnnnnnaaaaagcatacgagcgggggggcggacggtgggtcgaggagagccgacaacgccccagtctagtga

SEQ ID NO: 415039 - DNA, 1136 bp, Homo Sapiens
  misc_feature (249)..(249): n is a, c, g, or t
  misc_feature (385)..(385): n is a, c, g, or t
  misc_feature (699)..(699): n is a, c, g, or t
  misc_feature (979)..(987): n is a, c, g, or t
aaaagcctaaaaaataatttttgtggtgaatgtaagttgaccccccgtaaaacaccaatagaaagggtttaaaaatggtcggggattacttttttcccacgattccctcgggtaatttaagccaggcaattgaaagccaagaagttgtgcccttttaaaacatgtgccaagaaaaattagcctatccattctagtctcaacgagaagtatagaggccccaatctcattttccgaggaactccacatagntgctcgtgcttatagtgaaggggggtgagccactccgcccaggcgcggtagatgtgggagggcgcccctgtgtgtgttcttttagagcgatagagggcaaggtcgcccaaatagcttgcaggttgcccctcagaantttgtccccggagaagacaacaccgcgggggggccctcttctctgagaggagaacagtcttgtgagagaggggcgcggaaggggcctgtgcctcccccccaattccataaattccaggagagggtccccccaagaaagtgtgcgttaattgagaccagcgcggagagtaaaacccgtgtgtggagagtgtgtttaaacaacccctgttctcgcgagagagagggtgggcctgatgaaccatctctctgtgagaggaccgtggagcgtgtgcgcgtgcgtgacacgggggcacacagaccacaaccgaagggggnccaaggtctcccccgagagcacaatatcgcgcggaggaccctcgttgacgttttcctctcgagggggtctcgagacgcccgagaatgtttggcgtctctctgccgagacaagccactacgttgttgaccaggaaggggaggtgcctctccccgtgcacctcaagccgccgtgtgtggtgtgtgtttgcccctctttatttctctcgcagaggcccccccataatttctctcccctcttttgcccacgggacaacagacgccgttttttgggcaccccccnnnnnnnnnccccacaaaaagagggggattttccccaagagaagtggggcccccacacagatacactgacaacgacgacctttggcactcgtttgtctccctccttgtgtataccccttgtgggccgtattttgtgccccccggtatttcccctactt

SEQ ID NO: 415040 - DNA, 1420 bp, Homo Sapiens
  misc_feature (1106)..(1125): n is a, c, g, or t
gcacgccggcaacctatctgattcctttttggggagaaacacgcatataaaaaataactttttataaaaagaaaaacactccgtcctgctggggagatacatttttctctatctactatcgcagaggatggtgtccttgctagcgagggagctaaataaaatagatacgcctctactagaaaagaagagtgagtgttgttagggcgaaccagaggaggtgggggctcaaacatgctggaggggggacgccccgaaaacaatatatcacacacacgagaagaaatatccatcggacgtcttctatcgtcgtggtggtgacgcgaccacaccgctacacccagcggcgtagagtcggatgacaagacaagtagacaagcgtcacacacagacaaatacgagagcgggcacagagaaaagacgagaggacacaaagaaaatagccagaggacaggcgggcgaagagtggggggcgcgcgacaactagacacatgagatagaccatacaaaagtagacagagcaggaagccggcaaggaagtctcttgccacccaagcccccacacaccccaccatctctcactcacgctgagtggaggaagagagagaaagcgggctgcacaacaaaccaacaataaaagaggagagcggcgggccagcaaacaaaaaaacaagaaacgcccccccctagggggagtgagaaaacgaacgaccgataccgacgcggacgaatcgtttgacacggaacaccgcgtagaggggtacagacacacaaaacacccagctgtgagagggcgtgaatcacagagaggcacccacataaaaaaggggagaaaaaacccacaacgacattggtgtgccgctgccccccccaagcgaagatgcacgtgcgagaacggagaacaaatccataccaacccgcccctacatcgaagtatccaacgcacaacagcaacacaaatcagttagttacccagacacgatacacaaaacagacaaacatgagatacgtagtcggaccagcaacaaacaaaaatatgagtaagagaaacttagaaaagagccagcgccccgcaacaaacacacatcggtgccgactggaaggcactnnnnnnnnnnnnnnnnnnnnaactgctaaacgagtaggtaggctaggcatcgcagtgcgaagaaaaaagacacgccccaagaagagaaccccaccgagcagcaacagatgaacacacaatgaggcgtgcggctcccaaacaaccacccacacagcacggcaggatggaataatgccctccaatcggagaaccaagcaagtaaagggggtatgatgaagcagacgacagcctcgccctaacaaaacagacagccatcacacgagcaccagcaaaccaacaccatcccgacgcagcgggtagagcaccaacacactc

SEQ ID NO: 415041 - DNA, 445 bp, Homo Sapiens
  misc_feature (78)..(405): n is a, c, g, or t
ccacaaccacccgccgacacaagacccgcacgccagcggcgcggcagagcgggcagcagcccagccccgacacaaccnnnnnnnnnnnnnnnnnnnnnnnnnnnnnnnnnnnnnnnnnnnnnnnnnnnnnnnnnnnnnnnnnnnnnnnnnnnnnnnnnnnnnnnnnnnnnnnnnnnnnnnnnnnnnnnnnnnnnnnnnnnnnnnnnnnnnnnnnnnnnnnnnnnnnnnnnnnnnnnnnnnnnnnnnnnnnnnnnnnnnnnnnnnnnnnnnnnnnnnnnnnnnnnnnnnnnnnnnnnnnnnnnnnnnnnnnnnnnnnnnnnnnnnnnnnnnnnnnnnnnnnnnnnnnnnnnnnnnnnnnnnnnnnnnnnnnnnnnnnnnnnnnnnnnnnnnnnnnnnnnnnnnnnnacccgagacgagagagagcagaccgccgacgcgcgacact

SEQ ID NO: 415042 - DNA, 603 bp, Homo Sapiens
  misc_feature (103)..(140): n is a, c, g, or t
  misc_feature (181)..(191): n is a, c, g, or t
  misc_feature (239)..(291): n is a, c, g, or t
  misc_feature (306)..(354): n is a, c, g, or t
  misc_feature (400)..(465): n is a, c, g, or t
tcactcttttttttggagggggggcccttttggggaaaaaaaacccctcttctctggctgaggggggggcgcaccccgagggtgcttaaaacaacagcagacnnnnnnnnnnnnnnnnnnnnnnnnnnnnnnnnnnnnnntctggtgtgtgtgaagagagtgggggcgtttttgtgggggnnnnnnnnnnntatataaagccaaagagtgtgatatttttctccaaagatttcttcgcnnnnnnnnnnnnnnnnnnnnnnnnnnnnnnnnnnnnnnnnnnnnnnnnnnnnncaccgcgcgcgcgcnnnnnnnnnnnnnnnnnnnnnnnnnnnnnnnnnnnnnnnnnnnnnnnnncgacccaaaagaagaggcgcgccagagaggggcgaaaaagagctgnnnnnnnnnnnnnnnnnnnnnnnnnnnnnnnnnnnnnnnnnnnnnnnnnnnnnnnnnnnnnnnnnnagagagagaataagacagcgcgcgagggagagtggatgtgtgagagtggccgcgcgcggtgtgtgcctcctacatgaggagagacgaggagccacacacaagagagacgcgtggagtgagagagtgtgtctctctcgc

SEQ ID NO: 415043 - DNA, 1090 bp, Homo Sapiens
  misc_feature (267)..(267): n is a, c, g, or t
  misc_feature (1001)..(1001): n is a, c, g, or t
tgcccaccacaaaaacacagaaaatgggtgccctccttactgaacaaacacaacaagaacatcgtcgggcgaagattgtttgacgtccttctgcgtgggcagtggttggtgtgttacacgcttgaggtgggggtgatgaacaaacagcgagggggcggaggtgggtgagttattgcatctcactctctcttcttcatgacagagcgcggcactgctcagaactcacctcgaacactaccatattttacctacctcgctcacctgaanatagcaatcacccagtcgaccgcgccacccccggaccacacacctgatgagagtgatggtcgagcacgaagatgagcagcgacgacgccacgaatatgcgaaatacacacatattttagtaagcacagaacagcgcgcagcgcgtgtgtgcgaagggacacagggagtcgtagcgacactcaactcgctcgcactgacaatgacacgcaacgcccagtgcgctgcagtggagcgcaatcagataacagatactgagaggtcatctcctcgacgaagagaaatatcatgggtggggagacgaacaaacagggtgtcctactactctatcccttgacgcagctacgcaagaagggcggcgcgccaatagttacgtgagatattgctgtgcacacgacgcagctgctgcgcacgccaaaggacacactcagtcacacgccgcctgcgcaacgcgccgacaacgatgaaaaaaacagacaagatgaaacgcgcgacaccaacaccaaaaaagatacagttcttctctccacgcaaaagacgagcgcgtgtaatcctatgttcacagagataataagatagcacatgtcgcccaccacgggacacacttgtcgtgtacaaggagaagtagtaaaagaattgtcatactcatcccactcaaaaccaccatgtctccctctagtagttgaaacggcggctgctcgcttcctagaaaggtaatctactcctagtatcaaacnaacacgacacgatctcatcgtgttgagtatgtgatataatagtagaacaccgcaccgactctcgatgctcttttcataacattgtagag

SEQ ID NO: 415044 - DNA, 473 bp, Homo Sapiens
  misc_feature (58)..(74): n is a, c, g, or t
  misc_feature (126)..(134): n is a, c, g, or t
gtgggtgtgaaaacaacacggggatttttttggtggggcaacacaaaaaagggggggnnnnnnnnnnnnnnnnnttttataagggggtcaactgggaaatttggaagaggggagaaatcaatggtnnnnnnnnnaatcattaatgtatgggggaggaaaccaccccagcatagggaagtgttctttcttctttctccttcttggtatctatacggagggggcctgggtgacaccaggggttctaacacactcctgtggagcacctattgggcgcccataaagtgtcaaccacctcctgtgtgtttgttgttcacacaaaaaatgtcgtggtgtatttaactcgcgcgagaaaaaaagatgaattgtctaaaaaaagaggttgtctctgtaaggagaggtaaaatatggcaaccccgcagaggtgtataaaaagaggtgtgggcgagagagagtggagtgtattcaatgtaatg

SEQ ID NO: 415045 - DNA, 866 bp, Homo Sapiens
  misc_feature (44)..(53): n is a, c, g, or t
  misc_feature (108)..(119): n is a, c, g, or t
  misc_feature (340)..(386): n is a, c, g, or t
  misc_feature (750)..(750): n is a, c, g, or t
tctaaaaagatgtgtcactccccccccgctgtgtgtgtgagtannnnnnnnnnctcctcacaaaaaagaagacgaccgcttcttctacaacaaaaaacatcacagcannnnnnnnnnnnagggcgagcggcagacaacaagatcgtgggggaacgaggcgggaaagaacacacgccgcggtgataacaccagtcgtcacgacgccagaaacaaaaaacatccgcggtttctctctctcgctcgcgcgcgggagagaggaggaggggcggacgctcatagcgacaagaaaagagagcgtgcgcgcccccaacataatgggcggcaaaacaaacatcatagnnnnnnnnnnnnnnnnnnnnnnnnnnnnnnnnnnnnnnnnnnnnnnntgaaggagagtgaagacaccaacgaggcgtgtaggcgaacctgcaagagagtgtgacgtagacaaagcaccactcgcacgcgcgcggtgctcacccagcatcagtagtgaagttaataatgtatcgacacgacgaaaaagaagaggtaggggtacatgtggtgacctaagcaccggcgattgaagagaacaccaactcgagatataatgatctctctccccctctcgcttatgtcccggcgctggatgcgagtacagtactatacaaaacgagaggagaggacaaacgacagatgtgttgggtggttatcgcaccacccgacgccacagaaagaagaaagagggagtcgtgagtgcacgagacnccatgaagaggagcgagggcagagggagtgtggcgagagcaccccccgacacacacgaacgagagcgcgcgagcggcctattgcgagcgaaaacgacagacatcaaatgaacgtga

SEQ ID NO: 415046 - DNA, 1097 bp, Homo Sapiens
  misc_feature (524)..(524): n is a, c, g, or t
  misc_feature (947)..(957): n is a, c, g, or t
gggagtcatgtgcccctttataagttgacccattatttgaaaagggataaacgggaaggatggggtggccccaatgccgggccggccatgtttaaggggtttgtaggtgatgggaaaactcgccacaggtagtggccgatacatctggggtcttgatctccactcgggttagaaggttcttgccgttgtaaacgccacacacatgttgcccacacattctgcgggtagagatagatacatgtcccgaaggtgctgttttcacccatcttgcgcggtcttcctccacaggtggggcggggcctcctctttctgtggactctgtggcgccgggggcgttcttacagcccgggggaggtgtctggtctatcgcgccgcgagagtgcccccgcgtgttatacaggcgcgccgcgccgtttgtggcgcccccatcgtgtaacagctcgtgtcatatacagagtgtacgtctgcgtatgagaaaacctgtgtttcccagaacagcgtgtgtgtctacagaggtctcacanagcgcgcgggggaaagaggtgtaaaactctgtggcgaaaaagggggtcgcgtatatacatatccttgaggtggagtcacaaattttcgtgacacactcccggggaaaaaatttccgcggagaacgcgggatcacccaagcaccgcgtgggtattttctgggggtccacaacaacacgtgggcttctcactatatgagggggtcgccacccctaataaaagatagggacccaaaaagggggcgccaaaaaaaggccgtgtgtacccccgtggtgggtgcaaacaaccaactgtgcggtaaaaactcacggtatccccgcggggggggcaacatgagtggactcaaaaacagctcaccgcggaagaggagcacgtagaatagactccgagcaccccgcgggagggtcatcccttccaccataatnnnnnnnnnnntgtcacaacaaaacggaggggggggtaagaaagtggagggaggtatcaacacacgagggggggacaacacctgtagaagggcgttccaccaaatataaaaaggaaaagccccccggggattatatattataagaacccag

SEQ ID NO: 415047 - DNA, 408 bp, Homo Sapiens
aattgggttacactggggagcctggcttcctataaaaattctccacaaggaaaaactcttgcctttcctttaaatgcaaagtgtgggcccagaggaaaaacagagacccccagtgtcttgcacaagcatttaaatttagggacatatttatgtgcccctgtgtaaccacttctcaataatgtgtctccatatttctttatctcccatctacagaagtttttgaagtctcacaaaaacatgtaaagtctccactacacctaaacaaaggtgggtgcacgcgtgtatatattcaccgcgtgggggtgtgtaaaacatttgtctgatgttgcgccccactatatatacacccaatatttttgttaaagtttgtgggggacaatatttgtgactacccgcgggggaaatatt

SEQ ID NO: 415048 - DNA, 888 bp, Homo Sapiens
  misc_feature (352)..(396): n is a, c, g, or t
  misc_feature (782)..(817): n is a, c, g, or t
aggcggcgctcagtcctctggttattagatgcatggtagtagcagtaagcgcggagggtggtgggcggcgccagcaagaagaaagaacctcatgctaatacaaaagaacaacacgtcactagaagaaaaaaagaagaaaggacagccatgcacacaaccaagctccgcgacgggcggggcgggcggcaccgtgacgacgcaacgcagcgaggagtggagagagaacgtctgcgcgcgggcgcaccaacaaaagaacaaaacaagacagaagccaccccgcggggggggacgacacacccaagaaacagaaaagacaaatagcgcggggcgggggtgagggcacgcctcgcannnnnnnnnnnnnnnnnnnnnnnnnnnnnnnnnnnnnnnnnnnnngagagtgtccatgtatataatcgcgagagagtgaaggacaacaaccgcgcaatccgaggaagaaaaaagaagacccgcgcgagagatggcgtgagaaagagagagtgacaaagaatgagcgtacctaggcagagagcagcgaaacacaataaggaagaaggaaaagaacacacacgcgcgtgtgggacgagagcgtcgcgccaagagaaccaagagagagggagatggagcgtgtcgttctatgataacgagctggagccggaggaagacaaggaaaggaaaagcacagacagaaagacgaagacgatgagagaaacaaagaggacaaaagacgtcagaaggtgggcacatacgtgagtgagggaagcaccacacgcgcacaaccnnnnnnnnnnnnnnnnnnnnnnnnnnnnnnnnnnnnttgagcgtcgatccgcaggaaaagaacctaacacgacgaagacaaccgagcgaaggaagagcagagcagca

SEQ ID NO: 415049 - DNA, 902 bp, Homo Sapiens
  misc_feature (501)..(501): n is a, c, g, or t
  misc_feature (791)..(791): n is a, c, g, or t
catactgacacctcgcttgtctctctcccgcacacgattaatggagaacaattatggtgcggcgcccacgtggtggggtatgttcattattgtctttgcaaagaagagctcgattctattctatcctcctccgccacaaataatgatgcttcttctcacacacataaaaaacacaagtttagtatcataacaaaaacaataccaacgagaggagtgcgccgtcgcctctccgacgcagcggagggggcggggagggaggtttgcatacgggatacgcaaccaaacaaagaataacatacaatacaagaccaaacagaagaggggcgcgcgctccctctctatgtaagaatagaaacacacccgcgcgcgagtggagtgcgtgtgaggagcagaccgacatactagcgtgcgtggggaaccacaacaccacgacgcaggcaatcagcgcccccacgacagagacagaaaaacacacagaaccacgcgcgcgagagagagagngcaacccgcgcgcggagaaaaaaacatatgctcagcgggtgagagaaaacaaaatacccgccacgcgagaggtgaagagagaaaaatggaggagctatcatcaatgtgtgtcaaggtccccgtcccgaagacggaagagcgaaggccgcgccaggccgagaaagtggatcccccctcggcgcgagccgaatcaccaccacccacgacccccaacgcacagagacactaaacgaacacgagagaagcgccggacacaaggtcaccagcacagtagagaagacgcagaaggngagaccgagagaaaagaaaaaaccccccacgaattccttttatttaacacccctaccaaacgcgctaacgaaaagagaacagcagcggcacatcaaaaaaagaaagagcac

SEQ ID NO: 415050 - DNA, 714 bp, Homo Sapiens
  misc_feature (189)..(224): n is a, c, g, or t
  misc_feature (293)..(346): n is a, c, g, or t
ggcggaggagttgtcttctctatctcatatgataataatataagtgattgataattatactataacgaggaggtgggaggggagagaaaaacaaaaacataaaatcgaaggatgaaaagagagaaataagattatttaatttcgagagaaagaacaagcagtaggggggaccagtagatagtaacaccnnnnnnnnnnnnnnnnnnnnnnnnnnnnnnnnnnnngcgtacgaacctccagacgaacgaggcaacaaacaaatataacacacgagaatcaggagagacaacagnnnnnnnnnnnnnnnnnnnnnnnnnnnnnnnnnnnnnnnnnnnnnnnnnnnnnntcacgagggagccatagagctatcagagaagagacaatagaggagcagtgcgcgtgcgacagcgagcacgagcgagccaagccgagcaaagccacaagaagaaccaccgagccgcacaaccacgaaagaacggtgcgacgacaacaagagaccaaaagaaagacgagacgagacgtagagagcacaaccgaaagccgaacactgtgaaatggcgcccagagggggcagaggagccagaaaacacaaaccagcgagcatcgatcatagattagcacacaccagcagcctctacggatagctgagcgacgagagaggcggaggtgcgaggctcgacgcgcccacaacagcaagtgagagggagagacgac

SEQ ID NO: 415051 - DNA, 1298 bp, Homo Sapiens
  misc_feature (655)..(665): n is a, c, g, or t
  misc_feature (1248)..(1248): n is a, c, g, or t
attaatcgacaacaatgtggggtggattctataaggcgaggagagaaaaaacaaattattcacggctgcctcctgaacaagagagggtctaatcactcttaatacccccccacacgcaccatggtgtgggagttcttccaagacacaagtgccagaagacagcacgtgcggaggatgacgactggggggcgcgccgccaccagaagaaatgacggggagaggacagccaagaggagaaggggggatagaaaaagaacgagatgtgggggtgcgccgcacatagtagtctcatcatcttgtcgacgccgggggaggggggaggagctgtgttgatactctctctgcaatgaagaaacatatgttctggcgacggcgcgctctccctgtctatgcttcggcgagagagaaaaaaacacattgattgagccgtgagcgaaacaactatgtcgtatgtccgaattcgcgctcaccctatgtatcgtctgatagagagacaactcgccacctcgcccgcctacgaccccagatgtcgtgagagtggctgcctttgtggactgtaagtaggcgaggacacccccccgcacgtgggtgttcgaacccgccgggtggagcgagtgagagtgcgcatgaacccgctgccatggatccccaaagnnnnnnnnnnntagcacgagagtgggcgagagaagaaaccatcgccccaaacaacgatgtgcgcacccgcgcgacaaagggaccatccgaccgccaccagataggcaatcaagacacccgggcgtggagaaaggaggatggaagcaatcaaaaacccaatcccaacagggggggagcgggtaggacgagcagtcgtgagatgtcgcaccctgcaccccaccccacccaggaccacaccaatcacagaatcagttgcgtgtgagcccactcgacgacaagcaaccacggcaaggagggaatgaggtctccgagaaaaagcagacatgcagttcccgccccggccgggacgcccccagcaacaaacggatgaagaaattcgtgcgggggtgtgaccacaacaagggacgatcaaccgaggcagcgcggcgccagaagaacaaagcaaggtgaaggttggaacgatccgccaaagaggagaaaaatgcaaagtccacaacgagacaagtccacttgacgccacggcgggccatctcggtgtgataaacaacaaccaacgcataccatcatgtaatctgccacggacagcaagtctgncacgagcgccggcttcaggagcgcccacacattatccaaaacagacagag

SEQ ID NO: 415052 - DNA, 938 bp, Homo Sapiens
  misc_feature (41)..(49): n is a, c, g, or t
ccccgggggttaaaaacccttttaaaaaaatttaaaacccnnnnnnnnnccccctccccactggggggcgcagaagaaggggggaaggtgcaaaaccaacattctccggggggaggaggatagagcgcccacctttattacgagaggggaaatgcggcaaataggacccaagaagggccgtagaccctctaagaaccagtggtgaccccgggggcgtatagacaaggagaacacccgagggagggggggagaaagacacaatatccccggagaaatcccccctgggggacaagcagaggctcctctaaaagagaaacaggagcgccattatttacacacatcgccgtaagagaggtccttgggacaaaaacataagactaaggggtataacccccccaagggggggtgtccccgcgagaaaaaatggggggaacaccaatgagtgggggcagaaaaatctcccgcaggaggacgagaatagcccccacaattataaagccccccgtgggggagtgtgaccccccccttgatgatgatacaccgtagggagggagcgaaaaggccccccacataatggcggcgaaaggaacaaaatgtgtgctagtgtacacccccgcagccaccaagggtgcaggcgggccgggggacccccaaaagaagaaccgcccccgcgagaaagaaggtggtagtttggctacccaccccgtggtgggctgctcacaacacccacaaaaaacaggggtgtggcccccggaaaaagggctgtgccaaggaacatcatcagtaagaaagaggccccccagagtagaatgcgcgggcccccaaagtgagggagggtggccaccacaggtgggccgagacagcaaaaacttactgagaaccacccaactttggcgaagagttctcggggggagagaataatcagcagggagatacaa

SEQ ID NO: 415053 - DNA, 990 bp, Homo Sapiens
ccctttcaaaaagttggttttttttgggggccccccttggttccccaggccccaaaaaattggttttttggggcacaaaaattttgggggtggctttttaaaaaaactgtcgtggtggtgttctccaaaaatgagatgttggcgcgcagagagatgttgtgggtgtctatgtcagcaacgcgcaaaacgtgtgtttagggagaaaaaaatggagaccccaaggggtgtgtggtggttatgtgtcactcgacaaatgagatactctttatatagccccctcctgggtcccttgataacctttctgccacattgttggaatatccccaaaaaatatattccctctcatgaacccctggaggggtggattggtggtcaaacaagatttcactcttaaaagtagtcaccgcgggaaaaatgtgggcggtttgagaaatgggggtccacaagaattttcttgttggaggagaacactctctgcgggagatgtttgtgtggtcttgttgtgtgcccaacacctagtttctcgcgggggggtcacctcgggggaggatgtgatgttttaaaagaccactcggacaaataacacccaaagtgttgtctctctcagaacaccccttttttgtgtatactgtcgggagaaacccgttggttggtgggggacaaaaaaaggaaagtgtggtccccttttccccaaaacaacgggtgttgtacaattttatcgtggactcagagacgcctgttggtggtgcctgggaaagagcttccttctttgctcctcgggttgtgttgactacccagaaattgccgaaaaatttccctcttgtggagaaaacttttcgggggttttgtggacattggtgtgtggcctccccggagggaaatttcttaatccacggggaggattgggcggggtccagggttataaaacgtggttgaaaaggcctctacaagggggcgggcccccccaaatttaaaaacccagtgtatttc

SEQ ID NO: 415054 - DNA, 933 bp, Homo Sapiens
  misc_feature (185)..(219): n is a, c, g, or t
  misc_feature (531)..(540): n is a, c, g, or t
  misc_feature (783)..(796): n is a, c, g, or t
  misc_feature (852)..(861): n is a, c, g, or t
caggggggtcataaaaaaacgacgccgaccaaacaaacaacgcgggccgccccccgcgaggagagagagagaagaaacgcgcgtgcggagaagaaaaacgacaaaaaagaagtatttctcctactcgaccgaaggaggtggagaaaatctcataacaacttgagaagagaactactgtgttgtannnnnnnnnnnnnnnnnnnnnnnnnnnnnnnnnnncatctcgtgtagaaagaatagaaggagagccagcatataataataagacaagatctgattcagccgccacaaataaaaggtgaacaaagcgagcgggtgagagagcacacccctggacgaaaagcacggttgctaccaacaagcacgcgggggagggaagaaatatcatccccccacaaatattacaatcgagagagggcgcgcacaattcttcgctgagaagaaaaagagagtttggggagggagagcgaagtaatagaagtacatcacaccgaggagaagaacgccggcgggtgtcatcccccacccagnnnnnnnnnnccatcagaaagcagagagggggaggagagcaccaccgtggtgagcagcaataaaaacagaagtggtgtgttactaagagagcaaacacccgcgcgcgtgggggtgagtggacgaaagagtgcgctcacctcgctcggtaagtggagacgatctacacagagggggaagatatccacccccaccagtgaaagaagaagagagtgcgacaacaacaaatgagggaaagcaaaacaaaatacggcnnnnnnnnnnnnnnaaaacaaccgagcgacaacaatctctcccccccgatcggggagaagagagtgcgtnnnnnnnnnnattaaatagaatggggatgcacaaccagcaccacgagagagaaagagagggaaaaacacatcgtcgagcgac

SEQ ID NO: 415055 - DNA, 1020 bp, Homo Sapiens
ccagggggaaaaaaacttttttggaaacccccccaatggaaaaattggtcccgggaataaagcccctttttctcttggaaatggggttcttttcttacaggggccccataaatgcgtgttttctttctcctccagggtctgagaagcgggccaggggccaaatctcgggaggtgtggggtgtcaatgagaactttaagggtacaaatctttctcacaacaagcccggccgcttctgttctggcaccaacacaaggacttcgcggagaggggtgagacccccccggttttctgttgtctcccaccacaaaagagagctcttttcaagacgtagtgaacaaaagctctgtggtggtcacattttccaccagaatgagtggggcaaaaaaaggcaccccccaaagagaggtgtgtgtgaagtagctctctgtgtgtctcaaagaaaatgagggctccaaataagtctcgagggtggagaggctatttgggtcctgtgagatactccaggtttgtgcgcggtcctgtgtgaaaaaaaaggggagacgccccctgtgggcgacaatctctttataaaaacctccctctctgtggtgggagagacctctcacaaggggcgggagagaaaggggaagcgcccttctacgttgtgccccaaggggtcgtgtgccacaaagaaaaaggcggcgctacacgcaaaagcagagagattgccaattggcccccaaaaaaataagaggggggccaccctttgtggcacgacaacgcggcctcccagggagggagtccactcagaggagggggggagaccaccgtctactttctcggggcgtgggtgcgcccacaacagaaggggtgggagcacccccctcttgtgaggaaagctctagaggggcgctctagggggaacaaccccccgagcaaagaaacggtgagaagaacacaatcatgtcaaatccgctgcggccacaacaacctgccggtcggccccaccacggggtacaccttaagaacccgggggaaaa

SEQ ID NO: 415056 - DNA, 1289 bp, Homo Sapiens
  misc_feature (51)..(72): n is a, c, g, or t
  misc_feature (623)..(623): n is a, c, g, or t
  misc_feature (643)..(643): n is a, c, g, or t
atttaatagaaataatatttgtggtttttatgagggggggcccgcgggggnnnnnnnnnnnnnnnnnnnnnncgacacaacacataggtggggcgggcgcgcccccgccccgcccgcacccagaaaacagccagaagaaacaacaaaaagagagaatcggccatgatgagcgaggaaaaaaacacaccagggggtggcgtagacgaggaacggttagaccatccagagcaaaagccttacccacggccggcggaggtgcgtctacatacaagagacaagacatccgtggcgacacgaacctcacctggcctaatcaacatagagcaagaagcacgcgggcgacactactctctggatcgggacaacgcaccagcccacggactctatcgagccgagggcggaagtcccctactagtgcacaacaaaagaaagcaacttcccccaatattaaaaacagagaaccacctctctggcaaacaagcacaccactgcgagaggccagaaccgccagaggaacgaggagcgacgctaccctactcctctacgcaacacgcgggcagcgcggcgggggcataccaactgcccgcatgggctgtagcaagaaagcaatggtacacccccanctgcaggactctgagtcgtngtaaccaacattcgaacgtgcgacgtgcagccacagggaagtggagcgctaacctaatccaaaatccgccacaacagactgcgctgagtcggcggacccaggcccgacagagggaaagaaggaaaccccccccacacacaggcagcgggcgcatgcaaccaaaccagtcccagcgcgtgcatcacaccaacccgacaagaaataacctccacaaggcgctgccacgaccacaaacacgaccagcgacgagcacctacacaccacggacacgaacctacacaaaagacacgccgggtgcaacacactcaccaagccaccgggagaagagcacatccactagcgacggagggagagcggcttccaacacacaatcgctcacaagagcgggtggcaaatgaacaacaacgccagagcgagccatcagccatccgtaatttcgcacgaacagacgaaagccgaataccacgttcgagacacgagacccaacacaccactggggcacgcgagaataccaaaccatcaaacagaaatcgctcagcccaccccccccgccggcggcaccctatggctgcggcaacacaaaccaaacaaaaacacacgggccaacaaccaggcaggcgcttcctatccagaaaagaaagccccc

SEQ ID NO: 415057 - DNA, 1040 bp, Homo Sapiens
  misc_feature (404)..(412): n is a, c, g, or t
  misc_feature (642)..(642): n is a, c, g, or t
  misc_feature (866)..(879): n is a, c, g, or t
cacaatcacaaaccggtttattttacccttccaccttttttccaaaaaaaagggaatttacgcaaagggcacggggccagggtggcccataaaaaacccggtgttttgggaggaagctgggggtcctttacattcttggagacgcgggggttgccccacgcattagggcgcgcaagaagctgtgcacttgtgtccagacgcgcccctttgtgcaaattgcagcgccctgtggcgccacactgtggtgcacacgcccaacaggggacacgacagagagacgacaggacacgcctttatctttgtgtgacagagagagggggcgcatatttggacgcctctcttgtggcgattatgtgcagagagaacgccgggccacaggtgtgtcgcgagagaagtatccaccnnnnnnnnncccacaagagacacagtgtgtgggaaatctcccgtgtggagacagcgctttaaaaaaagggcgcggataaaaaaagatgcgcgcgcagacacgcgtgtttggcacacgcgccaaaaaccccgcgggaaaatatcgcgcagggaagcgcgggatcccacaagcgcgcgggcatcttttgtgggtgggcacacacaacgcgtgtgtgttcccataaatggtgtgtcgtcacncccataaaaagagaggagcgcccaaagagggggcacaataaaggcgcggtgtgtaaccccccgtgggtgtgtacaccacagcgtgggtatactcccgggtcacccgcgcgggggggccaaatgaggggctatagagaactcctcgccgaaggaagaggcgtggtgagacacacagcggagacccccccggcggggggtggcctcatactacaacacaataagannnnnnnnnnnnnntgtaccaaaaacaacacacgagcgctgtgagtgggaagaaagatgaggaggggatacaccaccacagagggggacaaacaaatcaggtgaaagagggggtgtctaccaccatcaaaagaggagagaacgacctcgcgcgggtaatatatatatagaaaccc

SEQ ID NO: 415058 - DNA, 824 bp, Homo Sapiens
  misc_feature (255)..(255): n is a, c, g, or t
atttttcctgttgccaaaatcacaacacagcaacaccccgcgagttagaaccggcgccggcgtggaaagagtggggcggggggcaacagtgtgcacagaccgtgccctcggtggttgtggcggctataaaaaaaagagggctctcacaaggtataaggaggagctctcgcgaggggtcgtccactggtgggcacgttccacgggggcaccctttggaaaacaccacgtgtgtgcgggaaatcggggaagaaaccncgttcggccgcggaatcttcgcgctatataaaacaccctataaaaatggtcatacaactccgcgcgccaaacgccgtggcagtgggaaggaaggccaaccacggggaggggggagagggctctccccagcgcgagaaacccgaaaacccctggggcccgtgtaacacaatgcccccggcggggtgtgtgaacaccgaggagcgggtattagagcacaaaaagatagatggggcccaacaaacacttaaccaagagggctctccagagggggggtgtgcctctaaagagcggcagagagaaaacactctctcggaaaatatggcggggaaaaaaggggctcttcttaagagaggacacgcccctggtgctacctatggcgagggcgcgcggtacacatgggacacccgggggtacaacaaaatctgtgtgcacaagaccaggagagggaggggagccctcctccctggggcgcccccaatagacaccttctgtggccgcaccaaaaccctcccgtgaaaaattccccccacagggagaggagggggccccccaccaaataattttttccc

SEQ ID NO: 415059 - DNA, 1164 bp, Homo Sapiens
  misc_feature (349)..(349): n is a, c, g, or t
gtcccagtgtttaaaaaaactgggtttatttgtttaataaaaagtttttccccaaatttcaggggggagcagtgtacccccgtaacacacttaagacacagccaaaaaccgcggtgtggtggttaacaaccggggggtggaaaaagccctaagagttcctgatatgacagcgaagatatgatatccgccatgttgcgttcgagagggccttcattacacgaattttgtctcgacgacagaaacacgcggagaggagagccccatgtgttgcgcccaacacacctctctttgagactctctcttgttctaacgttatatctctcgcggaaagagggaagaaagaggtctntcccaacagtcgtattaacaaacatttcccaacgccaagtattctctcacaccaccctatattctctcttatgttctccgtaggtctccgaggggaatataaccacaccggggggagatatcttctctcacaaagaaggggcctctcttcccatctttttttcacaaaatctttacatactccgtctcgcccaaagaggggtttcgcacgaattccctacttttgtgtgccatcccagagagggcattctgtgggaaaaaatattcgggtgggtctctctcttgaaaactctcggtgtttttaaacaagtctcctctgatgcgaaaaaagcccctgtgttgggagggagtgtggtgtttctatagacccccccggccaaatagtagttgtggggcgccttatattctctcgcggaaaggggagcgcgaagatgtaagagggtgatatatagagaaaacacgtggtgtgactccggggctctcacaaaggggctggataaaaaaacccggcgcgcgcggttactagggggggcgtttcacccacaaaaagagatgttttaaaacagtggagggtgcacaccttgtgagaaccgaaccaaggggggggcggcaactacaaatggaaggggtcccctagagagcgggaaaaacactttctggtgggagcaaccaccttcttagctgtgttcgggtggacccacacattttgctctctacaaaataatcgggcatcttgttgtcgacgagaacacccccctgtattattatcctcttactcacggagggtggtataaaaggaagaacaagcccgcacat

SEQ ID NO: 415060 - DNA, 1028 bp, Homo Sapiens
  misc_feature (325)..(333): n is a, c, g, or t
  misc_feature (626)..(635): n is a, c, g, or t
  misc_feature (915)..(923): n is a, c, g, or t
tcctcctttgagctctcttgtctctccccttgtgtgtgggtgcagggaagggggttggtgccctcgctgcatcaacacaaaactcccacgagggggcggacgagaggagcgcacggcgggagacgaccacaaagggggaggacgatgagtgtgtggacccaggagattgacgccggagagagagagaggccgccccaatcagcacaagagggcagtgggcagagaacaacagagagtggagcacggcgggtgatgtgtgtggtagaacacaaatatagatgtcacagcgtgtgtgttaggtggtcttttgcatagaagacaaacnnnnnnnnngaagaaacaacaaaagaggtgtggtctagaaatgtatattacaaagacacgcgcaggggcgcttgtgtgtaagagacggtggggtgggtggagaacaggagcacacgcgggagaactcccggggcgcccgaaagaacgcgacgagagagtgtgtgtcaggcccccgggtgtggggagcgatgataagaggcacacccgcgggggatgtttgtaaagggagcgcccaccgcaaaatatgggacgagggtctgccaggacaacacagttcgataaaagcagacacacggagcgtnnnnnnnnnnctcgcatatttattaggaaaacacacacaagagtgagagtaagtagagatctatcgagagaacaactcgctcgagcgtggggtatctcactatatgtggctctttcacaagaagagagtgtgtcgcgtgcgatgagtggtgtgagaagaaaaaaagaagaaattaatcgagtgggtgtcacagaatagacgagaagctctctagaaagaaagcgcgggggcgtggcacacaccccgcagaggagtgcgccgcgaccccacaacagtcgccggagtggggnnnnnnnnngtgagagaaggggggggaccccgcccagcagcgtggtagaaaacaaacctggggggacgtgagagaccaaccacccaaaggtggggagccaaccagctctccgcg

SEQ ID NO: 415061 - DNA, 1470 bp, Homo Sapiens
  misc_feature (194)..(247): n is a, c, g, or t
  misc_feature (414)..(432): n is a, c, g, or t
  misc_feature (468)..(540): n is a, c, g, or t
  misc_feature (614)..(632): n is a, c, g, or t
ttgatttattatgttgttataatgaggtacatgttatacttgtttcgtgtttatagctaatctttatatatatattaaggtatggtaagtaagtaggtgatgatggtgtgtaatatattgtctttttattttgtgatgtgtgaggaagaaagaaaaatacaagaaagaagcagaagaggagagcgaggagcggnnnnnnnnnnnnnnnnnnnnnnnnnnnnnnnnnnnnnnnnnnnnnnnnnnnnnnagcacagcgccactccgacacaccacacgactacatactataatacgagcacacacgacacgcacgacagagagagaagaagaggcgagcgagtcagcactggccgcgcgcgcgaggggaagccatcctagggtcaaatcggtaatcaagtcagagcagaacaacannnnnnnnnnnnnnnnnnnaaagcgcgcgcagcagacagcagaccaagcgcgggnnnnnnnnnnnnnnnnnnnnnnnnnnnnnnnnnnnnnnnnnnnnnnnnnnnnnnnnnnnnnnnnnnnnnnnnncggcgatcatgccgacacgtaagttcagataaacattcccacacaccgggaatcatagagattcctgagcaacnnnnnnnnnnnnnnnnnnncaggagaccacaccacgcgcacgacgacgagacaatatgacggaagagcgcgagaagagagtgtgtgagcgcaggaagagagacgcgcacggcgagaaaggtataagacgctaggcagaatcgcgcgacgacgcgaacatggaggcacagatagactggaacgacgaggacgagacgagcagaagagagggcacaagataatagagtactgtggcgaaagcaaaaactaacatcgacgacgatatgataacgagcatcgcgccaggacgtacacaccagactgttacggcgaagaaaactgcaatgctaagaggacatgagacgcagcccgaagacgagccgatgcgagcgcacacaacgacaaagcaagacagcacaaccccacaaaccgcggcagtgcaacgcacgctggcaaagcacatgcacgccgaagcacgcgaacaaaacaaagcgacggacgaccaaaaacaggcagcatagcatcaagacagccagcccgggcgcagaagaggcgcgataccaaggaaacgagacgagtgacagatgaaaccagccaccatggagcccatgaggaagcagaacacaggagcacaggccgaaccgaggagcacgagctgaacggagagagtagaagacgacccgagccacgcgctgcctagtcacgcgcgacaggagacaggcgcgacaccagcagggcaagagctacgcgcaagcgtcccgcgagatccgcagaacagccacacgcggcagagaacaagaatcgagtgcagcagacaggcggatagcggcaccgacccgccgaccagagccgctccgcggagccaccgaaaaggacagc

SEQ ID NO: 415062 - DNA, 1050 bp, Homo Sapiens
gtgaaaaaaaggggttttttattgggagggtgggggaaaaaatttggcgcttgtgccaaaaatgttttaaatattatagaagggacaaaatgggggtgtgtaccccacctccgtggggcggggggagtggctgcaaagagtctagaggcgaccacagaatcatcccccgggtgtgcagacaagaatgttgagccgctagaaaagaagaggagagaagagggacgcctcaaagacgactggtgggaagaacagcccgtgtgtgggcgcccccccgcgatggataaactcgcggatagaacatctctgtgtggggtgaggagtgctcctcgccgagaggagagggccaccagaagatattcttgtgtgctcaccgaggtgccctctttattacaccgcgccggcgctcagctctctcttagtgggaggggagtgaatccccacattgtgtggtgaggggcggtgattccacacacaaaacacctctcatattatctttccaccgatgtgggaataagtggagaggagcgcctcgcaattatttttggtgtgtgggcgccccaccctagtgtagcaccgagtgtgtgtactccagagagagagagatctctcagcgaaccgccacacgaaagacaccttccttattggcctaatgttggccgctcttctttctggagacagagcgcccccatccttgtgtggggaacacaccggtggggttcatattcgtgtcgtgggagtcacaccacacacagcgcgggtgtacccaagaaagccccccgctcttctgttgtgtgacttctctaaacgagaatcacccccatatgattgtggtggggcggtctatgttagcacgtctccgaaacacacaaaagtctgtgcaaaaagggttcgtcactgctcacaaaggggctgccccacactctgactgtgcatcactacccctctcgaagaaaaactactgtgtgcttacccggatgacgccgtctcttaaccaaggaacgctccttctgtaagacatacccccataactttaattgaatttaaccccag

SEQ ID NO: 415063 - DNA, 821 bp, Homo Sapiens
  misc_feature (561)..(603): n is a, c, g, or t
tttgtgggggaaaaagagggagagggggtcaagaggcagaaaaaattgctttctcctatcgcagttaatatgtgtttcgtcgatcccgggtggcagcaattatatactagcacgacagcatgaattgccgccctcccatctaccgaagatcatttgggcgggagaagcacccaccaccgccgtgcggagggcgctagctgaacacacaatccactgtggaggggcgggaaagaaccgcccccgcacgtctctataatcgaggcggggtgcgagcagcagagagggagtagtgagggtgggaggtgcgtaccacacagaaagagacggtcgtagtgcgtggcagccacaaaaaaacaaagctgggtgagagagggagtggtccgcagagcgcgcccacagaatgtgtgtcacccccgtgtagtgtcgcgcccgccaaaaacaatcaccggggggagggagacccaacagagaaacatcgtctgagtaggagtggaggggcgcgccggactaacaaaaagaagggtggacaaacccaatcaattaatttgtgcctcagcgcgnnnnnnnnnnnnnnnnnnnnnnnnnnnnnnnnnnnnnnnnnnnacaccaaaagataacagtggggtgggcacaccgcacgcgcgagagagtgggcgatggaaaaagaatatacgacccccgccggaaggggctcagtaactagtgcagacaggcccacctggacgctgccccgcacggcctccccagcgaacacaacgacggaaaacggtggccccccgccaaggggcgggggcaccccaatccagagccccccaacgacc

SEQ ID NO: 415064 - DNA, 1301 bp, Homo Sapiens
  misc_feature (802)..(846): n is a, c, g, or t
ggaacccgacagaagagaagagtgagagagaagattcaaccgcccacacaccatatttcctagccttgccttgcgcagaactcgccacaacacaaaaagaagaggactaaggagatccaccctcacgtgcaggggcgtgcacatcacatacatttcttgctgacacaatacatgtactaccactcatgaagagaactccttcccgcgcggcgcgggagagagagagaaacactagcagaagagagtgagcatagcatctctctatgtataataagtaaaatctatgacaggagagtagacataaatcatctatctcgaaacatgtgttatagagtagagagataactttgttttctctctctctagtagcataagagagacgaaaaaaaggataaaaacaacacgcacgcgagaagaggagaggcacactactctagtgaatgccagcacacacaccgcgagtgcgagagcgacgacgtacaaataaactatcatgtctcgtcacgtgatcgagagagaagagtgccgcagatgccgaccgcggcgcgcagcgcacgcggcccgtcacataagactacacagcagagtcgcgcgcgagaggagagagagaagaagcagccaacatggcacggtcgaacgccgacggagggggaagcagtacccgcagcgcgccctcagacgcacaggggccgccgcccgccgactctctcaacgacgacgaagaagccggagcaatgagcacacgaccatcgaccacagcagaaggaggaaggagcaagaagaccgaatcgtaatatcaatnnnnnnnnnnnnnnnnnnnnnnnnnnnnnnnnnnnnnnnnnnnnngctgaggtagacgtcggaggccgcggccgcgccggcgcaccttaccaacagggacaaccaaacgcccacgaccgacatccctccttcctatcatcactataatacaaatagtaaaatcacaacgaaaacgagaagagagggaggggagaccagtagccaccaccagacacccaccaccagaagagcaacacgaagaagaacaacaacaccaagcaagaagaagacagagacagaggacggcgaactacagcggaaccaccgcccctcgtcatcacttacaatgatcacacccccggactacccataagtcatcctcataaacaacacccagaaaagcacgattcgggcgcgatcgagcgcacacagtcatacaagacggactgcggtacaccacgtacgtccgtctccccccgcccccacacgccgctcgcgccagacaaacatagaaaacaaac

SEQ ID NO: 415065 - DNA, 677 bp, Homo Sapiens
  misc_feature (504)..(512): n is a, c, g, or t
ccaccacacaacacacccgcttattcccgccccgggaggggaatcccctcgccggggcgagaagcaacggggacgggccaccctatcgatgacaagaaaaaaaccactctcctcaccaacaagagagaatgagtggaggcaccactaggagagcagcccgaaaaagaagagaacaaaagcccccgaaaccagaagaagagacgaacaagagagaagcatatagacggaagacgccacccccccacccctacgcccacacaaaagagaagagaaataaagaagccgaaaacaagcaaaacaagaatcggcacagaacaaagagagagggccgaccacggacggcaccaccacacaaaagaaagaggacaagaacaaacatagacttggcgggtcccgagaagcagacacaccgccacaccgcgccgcggcgcccctacaagcagaagagagacagagaaactgctggcggtgggcagggccctcacgcccagagagtggggacgnnnnnnnnnacaccacaacaccgcacccccgctccctagctacacaacaacccaacagctcgcgacggacacgacacggaccataccccaaaaacccaaaactccacgcgacatcggaaaccaaaagaccggcggttgacagcactgacacccccggcccccagagcaagagaa

SEQ ID NO: 415066 - DNA, 1494 bp, Homo Sapiens
  misc_feature (1210)..(1220): n is a, c, g, or t
gagaaaacaccacaaaaccagttttttgtaaaacgcaccgggaaaagcgtccctgaccccccctcctggcctctattcgtggctccgtcatgggatcaaaataggctagattttcttgcgcacgggggtgccgacgagttgtgtagtatgaaaaggtgggaggcagctcacttggggtagacatgctaatgctctctctgtggaacaaaagaggagaaaagattggttcgctgcaacaaataccgctggagtagcctggtggagcgcacgagagaaaagtcgctcgctggacagacccctggataggagggccaacacacagcgagctgggggtgcacagtatgtaaaccctcgcgcgagctagtgtggcgggcaccaaccaatgagagacagcctgcatagaccaccctccagagtgcccccgcgcgtagaaaaagagtgcccatcgagcagctcgcaggctcttccctcatcccaccacatgatgtgccgacagaaagagggggactcgaactcttctctcgcccgcgccgaagaagaaatgagacgaaaggacccactccggcgagacgcacaaccgcggcggggctgggagaactcctctctctcagctgcgagcggagagggatctctctcttagcagaacgcacagcagcgctgctcgcgctactaaaggaggggcgccacacaccccagagcacgaccgtggtgtctctctctccacacacacagccggctctgtgggtgtgcagaagagaacatagtgagtcgttggtgcggcataagacaaccccctgcgttgtgtttacccacccgccgagaagatccgcccccccgcgtgtggagaggggccacaaaacaccaccggcgtgggtgagaaagaccaaattgaggtccctcccaaacaaaacagctcccactgcgcggggagagacatgtccgaataccaccaaagtacaggggaaacgaaacagcgctgtgcgagtcagacaagcagtcggaggaaggagaaaacaacacccgggggctccccctatagagagaagagcccacacctcttggtagggtgtgctgcccaatcgcacaaagagaacaaacatctatcttattgttttgggcaccccccccgcggagatgaaagatacctgtcccgtagggaggggtcattaaaaaatcgcgggttcacacccctcggttatgatattattgnnnnnnnnnnngtgaattatgttgttggccaatgcgggcgccaacaaacccccctctttgttgagaacccagtaggaggtttcgtccacagggagatagagggggcaacccccatgtgttcggcatcgctacactctcactcgggaagaataccatagtaaagcgggggggaggagagtagtcaactcagagcgcaggagaaccacaccgacaaaaaggtagtgcaacaccccttttatggcggcacccctctccttggctaaacttaattattgcacccagcgg

SEQ ID NO: 415067 - DNA, 782 bp, Homo Sapiens
  misc_feature (257)..(305): n is a, c, g, or t
gagacccgccggcgggcgttgagggtggcgaacaaggcaaaacaaaaaagcaaagaacaatgaacagcaggcgggggcaaggcgagaggcgcggcagccgcacgcgcagcggagacaacagcagaagaagggggggaggcgggcgctcaccaccacgacaccgacacattcaggtgctgggcgtgtcagcagacggtgaaaacaagaacatatggtcagtgagagagagaagaaagccgcgccctggccaacaagannnnnnnnnnnnnnnnnnnnnnnnnnnnnnnnnnnnnnnnnnnnnnnnnagagagagtgagtggccttcaatctagctactgacgccccctcacgcgcgcgcgaaagaagaagagcgagggtgcgcgagagaggggcgcgagcgcggcgaaggcagccagagcagaccgaggggccggcggccagcgaccgcgagacgagagggggagggtcgacgggaccaacgacacaggcacgcgtgggggcgcgcggtgtggcacaacgacggagcgcgtgccccactgcgtcaaggatacacaaccaacccagcgccacgataaccgatgcaagacgcacgagagccgaggtgcgcgatgcgcgagcgagctgagggagcgcacgagtgtgtgaacagaaaacaaaaaagacaccccgcccgggggtagcgcagcagacaccgcaacaatgactccacgcgcgtgcgggtgggacggtacccagcacggcccgcagaaatacacctagacccaaaacaacggacaaccacg

SEQ ID NO: 415068 - DNA, 741 bp, Homo Sapiens
  misc_feature (175)..(175): n is a, c, g, or t
  misc_feature (245)..(253): n is a, c, g, or t
  misc_feature (381)..(381): n is a, c, g, or t
  misc_feature (408)..(424): n is a, c, g, or t
  misc_feature (569)..(581): n is a, c, g, or t
  misc_feature (603)..(611): n is a, c, g, or t
cgagagactgggtgccaccacgcgggcgggggtgctacgacacaacaccacggacaaaggcacgcacgcccgcagctccgcggcggaggggagacaacgacgtagcagaggaacagaggaatgcagacggagagcggacaccttccgcggcgaggacggcgggggagagaacccnccttcgtaggaggcttcactcaacacagaccgcgagagaggagagagagcggcgcgccaatggaggcgannnnnnnnntggtggctactcccacacgcaaacagccacgccgcggaggagagagggcagcatgggaggcgccccaccactagcagggcggtccgcgaagggggggtctcccgagggagagagcgccgtgcgcgcgngagggagagagcgcacacacacgcggnnnnnnnnnnnnnnnnngagggggcggcgcgcaattgaataatataagagagacgctcgcccgccagtggagagaacaaccagtgatggcgtcaacaacacagaacccctatattgaacgcaaagagagagagagacacccaagggcacagagagggaagannnnnnnnnnnnnaacaccacaacaaatgagcgcnnnnnnnnnagtacaagaggtcgactcaccacccacgacccaaagaaaatgacgaacatcccgcaggagaatgacatagaaactgatcgccgaacaagaaagcgtgcggcgaggtgaaaagaaggatagaccaccaaag

SEQ ID NO: 415069 - DNA, 1076 bp, Homo Sapiens
aattggtggaccacccagagagagaaatttctcgtcccagaaaaaccgtggaaaccggaccaaagggcccgaagatggggcgccccatcggtgagtgtagtccccacgagagagctggcgggaggcgaggagggcgcgtcgacgagagaaaacgcgaggagaaccccacagaccggggttccaacaaagaggtcgggaggggaaaacacctcccagccgggggtagagtgtgtcgggcccaacaagccatggtatgaacgacgccacaggaggtcgcatccaaaaccgagggggagacacacacgggggcgccaccacaaatgtacgaggccggagcacacaccatacgtgtggaagggaggaagacaaagcagtggacaccacccacacgggagagaggggggcgggacaaacccacccgacaccatgtgaggaagggcgccacccccaagggcgtgcgtagaaaaaacaaccgcggtgggtgaacgccatctgtcatgcacaaaaaagaggggtgtcaacacctagcacaccaacggcgcgccacagagaaaaaacagaataagagagatgaggacccacaggggcaatctgatctcaagaggcggaggaccgccacctgagggagttagcgacagcccgcagggcagaaaatcgtatcaaccaaaacgacagccacgcaggtgggggtgaggatacaaaacccccagcctcgggccaccaccggaaagagcaatgaggatctgtggagggacccaccacgccgcgtgtggtggagacaacaaacgcagcacggcgttggagagacaccccagtctgataagagagggacaccaacagaaagaagaggggggaggacacaccaccaatagaatggagcggagctgacaggggatcagataaccacccgcccccaacaaaacactgcacttcctaaagggaaggcgtggtatggggccgcagacgaggaccactaccttaacgggaacagaagagagagggacgcacaagggggtgtggcggaccacaacctactagaggacagagcaccggacaccgacagagcgagcagcgca

SEQ ID NO: 415070 - DNA, 904 bp, Homo Sapiens
  misc_feature (705)..(714): n is a, c, g, or t
cttgtttttattagataaatataaaaatataaatctggttgtacaacaatgtttgtggggcttactatttctgtgaaaagatggggagttcaggagagatggccctagttgacccccgtctccttcataggaggagagggcatccacaaggcgactctccctctctacctcaccgcgggacaaatctcgcggccgacaccagggataaaggcgtttctgcaaacaactgtgtactaaaaaccgctgcgagaaaaaccacgtcgcggagactgccaaaagggctcggccaacaaagagggatgcgcgaccaccccccatttaagtgtctccctcgcgccgcttataacgccttctgtaaaagaacttccgtcccccacagagccctaccaacacatcataagaaccaatactcccggtggaggcaccaactgggagaaaaagtgggacccacacctgctgctacccctctcccgggaacgcagggcaacatatgcgaaccccgccgcagccaccacaaaccccactcaaaaaacactccactccgtgccacacaatcccgcgagggaaaagagaaatccccacagaaagggcgcagagaagacccccacagaacaggagcggggaaaacccgagaaacaaccagaaaacacagggtccccgcggggggactcaccacaagcacggcagagagattcaacacaagannnnnnnnnnacagtggaaagaggtccagtggacccccacaatacgaggggaaaggcacaccacaaaatccagagagacccggggtgaacaaaaaacactgggaaagccacgctacaaagcccgggagagaatcacggcggagagggccaacaagccccaacaccccaggagatcccccggaaaacaaaccaggaaaccc

SEQ ID NO: 415071 - DNA, 1188 bp, Homo Sapiens
gtgattgaaaaaaacaacaacaacacacacagcacagtcaaattgaattactaggtagatggagggcagtgaaacatcacaacacacacacggaagcaaacacataagatggaaccgaggaagcaaacaagacaagacgaggaacaatgatggcggcgaggcgcgcggagggggagaccaggagagggagaaaaggacacacaacatatatgaagaacaaggaacacacacggacaaacacagcgagcctcctgtgagagcgaggacaaacaaatacatagagaaaaagacgccagtccaaggagaagcgacgagcgcgcacgagggaatgcgtgcgcacgcagagagcaagccgacagcagagtgaagagcgcggcgagagacaccaagaagcaagatagagaaacaggcagaaagtaaagcgtgaggagcgagagagcgagagacgccacaaacagaaacatcatgaaaaaacgaacgaccgacagcggaaagtaagcaaagcagagcaggagaacgcggacacatagcgtccgcacacatgacagtaaacaaacactgggacggaagagacgacacacgaacaaacacgacgatacgctaagagcgacggaagctccgcatgcaggcacctacacacgacacacaccggaaaagagaaaaggacaatagaggaaaagaaacacaccaaggaacaaaggcgcacatcgaggaaaggcgctgggggaagcgaaaccgccgcagtggcaacgacagacgacaccagactgatccttcgggcaccagaaggcgctgaagggacaaggacagcacatagacgacgaacccgctaagcaccttacggcaagaggagacacaggataacaacgacacgccagaaggaagcgcagggtcgccaacgccgagacatcatggcgagcccagcagcaaagtagacgagagaagcagcggggcatgaaaccaaagcaaactggcaaagtgcagcgcagatgacaaagcgataaaagagataccaaagggaaccgcagagcatgagaagactgctgagcagacacaacagaccaccaacaccacagaaaaacaaccacttcagcgcgcaacaacggacccccccaccagcgcacaacgtcgcacgcaacaccaccctggagcacacagccgccgcacaccgggacgcacaggcgacac

SEQ ID NO: 415072 - DNA, 1718 bp, Homo Sapiens
gtgggaaagggtgtcttttttgggcgtttaaaaaggcaacctctttaaggggccctcgcttggggcccctccacccacatgtttttgtcctctctttatttttaacaaaaaaatcctttctgcggccaggggtgtgcacacaaatctttcctcctgaaaagtcgcagctcacgcgtccctctctcgcacagggaggagacaccgacgtgtgggtcatcacccgggtgcctctttcagacgagacacaggcggcgccaagtttcttggcagcaacactcatcgttctctagacaacagcgtcgccgtgtgtgtgcgacaaacaacagagctctctctcggtgggcactctcttgtcctaacggtggcctcacacccactcggggccgacgtgcgcgcactgcttcgtcttctctcacaacacactacacgtcgcacctcatgtgaagacaaaacactacctctgatgttgacaagccgtatcaccgccctccatataaaacacttcgctcgcgtcgtgcgccaccaacggagtgttggtgctgcgtccatatattgaaaaaccatctctctcgctctcccccacgctgtggtgtgtggagaccacccgatgtgggaagctctccgacccatctccacttcacatacaccaaattgatgagtggtcatctctcctccccacgacatattctcttctactccacaacccggtaaatcagctgtcggcacacgaccactcctctcctcatctagaaggggcgtctactcccacgcagttgatgtcgtccccacaaaacaccctctcttatgatgaggtggaatccagaaaggagaccaccagcctgtctctttcgtcggggacaaccccccctactctccgacaccgaacagaagactcgtgcgccgctccccagccaccagtggtcatctacagtcgcagtgcgagcgcagcggacgatcctctcctccgccgggcgaacacaccccacctgcgagctggcgcgcaccgaccgatgaggcgtgaggccgcagccacaccccaacccgcgtcggttggcgaacccaaatcaacacccgcccatgtcggaccccctaccccaagcagaagccacccgcgtcgaggagccacagaagcctgtgttgaactaaccgacaccgctcttgtccacagacactctccttcccctcaacgagggtagaaagttaatagctcgtacgtgccacacaacaccacaccgccgccagctgtgaatgtgcttacttgtgggatgcaccgccacatgttgcatcactctcctcacccacctgctctgaggtgccgcgtcgcctacacgaaccacaacctcttcttgacgatgcgcgccatcgcttaatagactaggcgcccccgccactcccagaccagtacgaaagcgtcggcctagcgctgtacacgagcgagccaacaaccttctaagtcgactaagtgagctaaccccacatcagtagcgccaacgtcggagtgtcaatactacgaacgcgagacagaccccgcccgcgacacctatacgattctccgacgcgaacgcggaggccaccccgcagccaacaactctggccgccctcgccagtcaacagacgaactccaccacacgaagggactacgaccgcactgcgacgacaggactgaacacgaccgggactacacatccctgccggaacgccgcgtgctcacaccagat

SEQ ID NO: 415073 - DNA, 1206 bp, Homo Sapiens
  misc_feature (303)..(303): n is a, c, g, or t
tatacgggacagactatctcggacgaagccacccccggggggggaggcggacagctgcggggagggcgtgcgacgaacaacgcggccgtacccaaggacgaagagcagacgcggggccagcaacaaggacggcaggtcgagcgacgaagaacctaacgtggaggggggaggacacacagagagggaggggcgtactccgccacccaagacaggagacggaggtatctctatctcacgcgcgagggggaggaaagcacaacagaaccacgcgctcactcctctcctcacgcgcgaggagcgganacaaacgcgccgcgcgaggagagagaggcgctgccacgactgaggagcgcccataggagacacagctgcagctcgccagaccagcgcacggcgacccacaagagagcgagggggagtcttgcactccgatgagagacggcgcgcgagacacgacaaaacaaacatctctcacgcgcagcagcgtcgggcggggagggacaccgaacggaggacacaacccagaccatacgcacacacgcgagcacggacgacagcaaccacacccataccccagggacgcgggcgcgagacactgactcaaacgagcaccagcgagaagtcgcgagagcgagtacaacaaacacaccaccccaccaccgagagagaggaagagccgtgcccaccctcagccagtcagaacgagaaagaatcgacaactacgtgcgagcaaggaacagagacaacacagcaacagcaaaccatgcacaacgccagtagggatgaacgacgggaagcaaaccggcgcaaagacaacagggtggcggataggagcgaagctcgaagcaaaaggtaacgaaggggtacgtgaggggggaagggacacaccacaaaacaacacataaccatacacgcctcggcgcagccccacttctgttaagaggagagactgatgggctgggtccaacatccaacaaccacgaagtcatgaaccacggatctgcccttgtctcctcgacaaccacggaggggtcgcctcgccccccgccagcagacgatcagtaggttgacacccatacactactcctccggaccggacgaatccacctgcgacccgcgccagacgcaacccgcgtgccgtgttgtggagtgtgcacaaccaaacacgcacatagtctctgaacatgatgacgcgaacgcccacta

SEQ ID NO: 415074 - DNA, 1239 bp, Homo Sapiens
aacgaaaaaattgcctacgcttactgacaacgaagcggagcgcagcgtagagacagacactgcataaaaatcgtacacaacgacgagagggagggcgcggggtgcagcgacacaagaaaaaccacatcgggcaggaagcagccaaccggaaacgaagcacagcaagctggtgagtgcggaggagagagcagacaaggaagaggcggaactcgggcatccactctgtcccaagcgcgtgcggcctcctcgctagcacgcaacagacacatacgcagccaccgcggacgcgcaaggagagtcacccgccacggtgtgatgcccacaccccgcacgccctcatatacacagaagagaagagcgactacccagaacgaccacgagctggagtgctcgcgagagcgcagcagacacaccgcagcagtgcagagaaagaggaccaaaggtacacaggctccgccgcaaacagacggacacgaggagcgacgcgccgacgaataagaggagcgagtgcgtcgagcagcactccacacgccacagacagaaaacacaacacaaggcaacagagaagagcagagcggcgcgccagtacgctcacccgacgacggaacgcgcgccgccactccccgcgctacagacgaatagaagcaccccacggcacgcacaccgacaccagacaacgcaccggccaacgcgtgcgactgtgccgcgagcaacacagccaacgcagcgcaagatcgcgcaacccgacacactaaaccacaccgactgagccgcggcaccaccgaacaacaccaccgcagcccgccccagcaacaccccactaccacggcggagaggagacgccagcgggggtgccgccgcgaccacccccacacacaacaaccgcaccacacaaggacccccagaactgagaccgagctgcacacagcaagaacaaggtctgttgaggaagaggaacgcacatacaacacacaacgcgccaccgcaacacgcagcagcgacgaactgagaccgagacacacagccgtgagagcgtcacaaccacgcgagcagggtgagacgcaaacgacgcacaacaaacagcacgaagcccacgaccctcgacatgcggtctcgagcacgagcggaagtggcgacgccccacaagcaagctaaaaatagacgcagatcacaaactaaataagaccaacaacagagagaagagacacagtacccagccccgcccgccggcgacgaaaa

SEQ ID NO: 415075 - DNA, 1202 bp, Homo Sapiens
  misc_feature (151)..(151): n is a, c, g, or t
ggtgggtttggtggggaacccccctaaagcctaaaaaatcttttttaaaattcttatgggttatgctgtaaaaaaacgcgtgattggacccacaggtttcccgtgcaccgggttcctcgaggtccaactcatggtgcaaagctatccccanggctgtgggagaccgtgggaaaatgcttaggcaggggccaggccccaaagtggggaagactgtggtcacctccaaggagccttcaaaagggggaaaagcggaggcctatcaaagaaaaggccctccaagggggtggaaaccaagaagagggtcaggagaggatgccggcgttataaacgccaagggcgcccaggggggggctaaacatctccacgagaagatgtaactgctcaagcgcccaaggccacctacctcggggaggtctccacagagaacacacaccgggcggcatacaggtggatggggcgcagcaacgcactctggtcgagaaccaagggcccccgacagaccactctgtgtctctctctcaggcgataatgttcgtttggggaaacatctgtgtgcgagaagaatcatcttgtgtaaccacattgtgcgtctttctggggtgaaaaatcggggtggtctcgttataacaatcctcgcgtgggacgcacatccgggggcgctctctcctcttgggtcaaccttagcaaccactggggggaccaagggcggtcgaaagagaactccctcgttatatgggcaggaaaaacaacgctccaagtggcgccccacaggtgggtagtgacgggaccgagagcaacactaacaccccgggtcctccccaagtggtgcgccctcccgtgaccgcgggggatcagacctaaacaaggtattacgggccaccaggggaaaaaagacacgtcgccactgtgtcgagttttgcccccgcaaagcatcgccccaccacaaatttctatcaccatttgacacacaccactctagtctgtttccaatcagttgccgcagcgcggcaaaaccacaccatcgcatctgggcgaaacctctcttgcgccccacaacaccaagacgcagatcatgtgggggaggtaataaaatttccatctctcacgcagaggccccgctataggttccagtcgcacgacttttgctatcaccgcctcttttcaatcatatcctcttgtgacgatccttggagcacaagcac

SEQ ID NO: 415076 - DNA, 1149 bp, Homo Sapiens
ggggtgaaaaagagttctttttggataagtcccttcacctccaaaagaagggggcccaccctcccgtcacaacgaagcccactgcccgcaaaaccgcaccgcccatcagacgtagcgtcacacatgtcgacaggggcagcacgcgtggcggcaacgcacgggtaccatccttcatatagcaacggacgaaaaagcaccgggcaacaccgtggggcggcccacccccaccccacggtggcacctccacacaacagcaggctcacacgcatatatgaaaaacaacggagaaagcgcggtgtcctatgcgagcccccgagagtacagaccacagcatcacaaacacccacaccgcgcgggggctgcacagacgtgagaagcagacaaccagcactccacgagatgatacgccagagaactcagccacaccgcattagcggaaacaaccgcaccggccggcatgccacaagactgcagacacgaccaaccacgcacgctgccgcgccgaccaccgccaaagaggaagcgacgaagaagccacaacaagaaccccagcgactagtgaagaagaaaagcaactaaagactgagactgcccagcaggcggtactggcaccacccgaccaacagtatgaaatagcatacaacaccacactagcgaacaactaatcctatcaggtgcgagacgaacacacaagccgatataacgtagcgatagccacgagtaggacgagcatgagacgcagaactcctcaacagcagagcggaaaccagcgacgacagcaccggaccaccaacaggagggcactagcatccaccacccacacatatgagcgcctgcgagcacaaaccaactacacttcgacacgcgacaacacccacacaccactcgtcggcgcacaccaacactgtcccgtggcgcaaccaccagcaccgcaccgacactacagaccaccaggagccacagccagcacacaagccgacactagcacatataggccaacaccatggtgtgcagacaattccgacaagccgggcgagcgcacacagccgaacatacacgtcgcaacagtacgccgcgcctcacagaactgacaactctatgacagcctgcgactgaataaaagcatatcacagtgcagcctaagcgacg

SEQ ID NO: 415077 - DNA, 963 bp, Homo Sapiens
caatatttgataacatctatttaaagtaattggaaatgttctggagaggtctgtggaaaaaagtgtgttcctgaaagaatttctaaaatccgccccgggtcttgttgtgataacttatttagctggtggatccacagacgggtcgcaaaaagacgtcctaacatgtcctccacagtgcgggcactaccgcggcgacgtaggaggggaggttgctgaccagaaaaacaccaacagacgtctgatgcgccttaaccgcgcgcggccggaggatgattgccacgacaaacgggtgcgggatacagaggtgtagcgcacccgatcgacgactgcgtgagacaatcacatgaggtgcccccaggaggatgtcgaacaaggagagacacagctagtagcggagaaaacacgcgcgggagagatgacatgccacctcgatacagaatgactcgagggaaacgcaagacaaacacgtggggcaaaactaacacgggctataatatcacaacgctcattgaactcatacgcatatatgtctaatacgatggaaggcctaagagtcttgctacagggagttgcagaaaggaacacacactcatgtgtatctgggcaaaaactccgcgtgggtgtccgggagtactcacatatacagtgtctcccgtgcgcacactcgctcatcgtatatgtggggcacaacatcgttggagagccacgcccttaatttgcgccaaaacaacaaaaacgtgtctgtgtcgcggtgttaattctctagtttgcaaacccacgtcttgaaacccctcgcacgattggctcccaacgactaggttcgacactcctcactcaacaagtggtgtttctctcagcggagaaaattttctgccccgcgcagcgaaagtgtgccctttgcgccaacgcggccttccgcggtgcttgtggtcacaacacctatccgagttagaacccaccagt

SEQ ID NO: 415078 - DNA, 1131 bp, Homo Sapiens
  misc_feature (157)..(157): n is a, c, g, or t
  misc_feature (961)..(1020): n is a, c, g, or t
tgttgtgcgagtctcaccgcatcctgaatactgccaacaaaaaagaaaacagaagaaagagagggagggcggagctccagcatcgcccgcgagcgcagggacgagcggaggagagggaacgagacaagaaaccaaacgacggaggaacgcgcgacanccaggcacgcccccgcgcacacgcaaacagcaggcacacacaccgcgcacacgggcgatgcgagcggcgcagcgcggcgcgccgacgcgcacaccagcgccgacacaagcgagagacaaagcgaggacaacagagagaacgacaccgagagaagaggaaacgagtaaacacgacagcacccaagcacaacgagaacgtacgagacgagaaacgcaagctactgacccataccaaacgcaaaaccaaagagaacagaagacaaaagagggagaaaggcaaacaaacacaacgcggcagatgaagacgggggaacaccagatatccaaacacacaacagaaaccagacgagagagagaacgcagagaccacggagacccgagcggacacaggacgtggtcagaacacgacgaaacgtcccacggagccgaccgacagcaaaaggaaaaaaagacgccgcaacaacaggcaacccctcacgggacaaacccagaacacaagggaccacaaagaaacaaaagcaacgagcaccccaacgaaacacgcagacaaaccagaacaaacgaacacagagaagaacaagcagggagaagcggcagaacaaaaagaggcacaacaaccaacacgaacagacgtagaactacgccacccaccaccaacgcgcccaaaactccactaaggccaccacggaggacaacaacaagagcaaacgaaggcaagaaacgaagcgcaaaaacgcaacagcaggaagaccataacagacaacaccgacaaggaaggacacagcacacgcccgcacacatcccnnnnnnnnnnnnnnnnnnnnnnnnnnnnnnnnnnnnnnnnnnnnnnnnnnnnnnnnnnnnggggaccacctaacccgcggcgagcacaccagcaaaaagcatacaccagagcagacacagacatcaaaacacaaaaaagacgacgaaaccaagcagaccccgcaacaaaac

SEQ ID NO: 415079 - DNA, 609 bp, Homo Sapiens
  misc_feature (49)..(112): n is a, c, g, or t
aatatatgttgtaaatatagatgatgtaaaaggaagaatatgagaaaannnnnnnnnnnnnnnnnnnnnnnnnnnnnnnnnnnnnnnnnnnnnnnnnnnnnnnnnnnnnnnnacaaaacagacccaacacagcacagacccagacgccacgacaggaaaagagagacaaccagacaactctcgacacgcacccaacaagatgatctagctcaaacacagcgaccacccccatcgagaccacaaccaccaagaaaagatcaacgcacagcgcacgaaaaagcaaaccaccgacacacaacgcacaccagacgccgcaaacgaagaagacagcagaaccctacacagcgcacacaccacccaagaacagcaatgccaccccaaacgaatccaccacaaggcaaagaccgctcaccacgaaaacaccacacaacccaaagagcataccacgagaacaccatagaccaaaacgacacaagagcacgaaggagcaatacgcaagacgacgagaccacaacgagcacaccgcacagagaaagcgataccccccgagccacatggatccacacagacggagatgaccaaaaatagcagataccaatgagaacacaa

SEQ ID NO: 415080 - DNA, 1068 bp, Homo Sapiens
  misc_feature (174)..(174): n is a, c, g, or t
  misc_feature (264)..(305): n is a, c, g, or t
  misc_feature (699)..(739): n is a, c, g, or t
ccagaatgagggagaaaaccttattttttccttaacactcttataaggggggataaaaaactcttcatttcattggaaactgttggcgaccggggtgacccctcttataataggtttctctaaaacccacgttggaaaaacctctccagcgagtgctgtgttgtaactactcgngaaccaagggaatttcaaaacccagcgtttatctcgtgtggtaacttttcaggcagggggcataaactacgcagaattatactcatagtnnnnnnnnnnnnnnnnnnnnnnnnnnnnnnnnnnnnnnnnnncagcgtttactctttgtcacaatgcggcttttgggagtgatattcagtggggcaacgattttttgtgggtgacgtagaacattcatatatatgggggtgggataacataaagaatgtgtttctgtggagacccgcgatatataatggaggtgggattaaacattaagagaaccattcgcgagacacgcgtggcatagaggtgttgtcagggaaattgtggaacgctctctttaaccagagcgtgtggcacgacactgtgtcaaaagtctgagcggcctctctgtggccgcgtgtgtaaaacacctttgatgaacgctgtggtgaggggcgcaccattgtgggggagctccctcaacttttacatgtgtgcgacaccccaacacgtgttgtcccnnnnnnnnnnnnnnnnnnnnnnnnnnnnnnnnnnnnnnnnnagaaatcaactggggcgcgtgcactatattaattgtggacaccccagaccaatttataaacgcggggggggaaccgtgtatatattctttccgcgacagaaaagtttgtggagtcgcgcgtattacgcttgagaaacagaaatttcccagcccctatatattttttggggaagtgttgtttaaacggaaggaattctttactcacacgagggggtgggcacaccctaaggggaccgctgtgaaaaattatggggggtttgaacaccaagggtggccacaggggggttatagaatatctttgtgggcgttgcaaatattttataaaacaa

SEQ ID NO: 415081 - DNA, 830 bp, Homo Sapiens
cagaaaaaaatttctttttatataatggccctatttttacacacactcggcttgcattccacccgcgggccaaatacaaccctttaagggaatttccacacaaaattttgtgaaaaattccaaaagagaggggggtatatctatccctcctttaaactcagttgtaacaaactcttgttctgtgttacccccccgatagagggttaataaccctctctcattattccctcccccttaaagagtgacgtgattaaacaattgtacacccccagtgagtgtgggcgcccacaaacatttaaaaaaggggggggctccccggggagaataaaagtttgagtactccacagatttctacacaaagggggcgccacaaagactcggcccgggtggaaacccctggagaaaaactcctccaaatcttctctattcactcaaaattctccaaatataatttcccttaaagatgtttctcccacaaggtggacaaaaaaatgggtggtgtcaccacctcccggtgtcccttttaaacaaaccttataaaagggggacccactctaatattcttattatctctcctgagaaaaatttctctcccctcgtggcaacggggaaactgcaactctccgaggggtccccccaaaaatgagagtgtgaccccgggggaaaaagggaagaaagactctggcacgcctccccacagagagaggggggcgccccctctaccccaaagactctacaaaaaagaggcgaagaaaaagacaaccccttgtgtgtggacccctctggtggaaacacccaagggagaaaataccctattcgtccacaaccga

SEQ ID NO: 415082 - DNA, 539 bp, Homo Sapiens
gtgcaaaaaaagaggtgaaaatgggaaagggggggatacaagatgctcatgtctcccacccaaacacacagagattaccacaacataggaaacacacggcacctgaggcagggagggagactctttattcttatggacacaacacacgacgaaaaaaacaagaccggcgcggcagcaacagtacaatatggtacaacgggagcacttactaactagatatttgacaagaccaaaacacaaacgctcaaaagattaagccaatccgaaacacccaaacacagcgacgagcgaggtgagccgtgagagaaaaggggtagcagggaggggcaacgataaaacacagaaaacgaaacagagtatatggcaacacacaacactcagcacagccacacgagagacacacgcccccccatccagaaaggaaaaggcggagccatcccacgaaccaaaacacagtacagtagagtagcgcacgagacacacgacccacaacgacacacgaaacccgcggagcgcaaagcgcatgaccaccacaccat

SEQ ID NO: 415083 - DNA, 1568 bp, Homo Sapiens
  misc_feature (902)..(914): n is a, c, g, or t
aggaggggtcccataggtaaataggaggtgatccttttaaaaaaaggggccgcccccacaggaaccacagagagggggtggggagagagagcttccacaaacacacaaaaagccccggaaaaaaactccccccggcggtggggtctctctgtggcaccagatactaacggtgggggaattatcaccttgttgtccagtcatatggcaacctctccttggtgagttttggggagaacaacttctccagaccaatgtgccgccatggtttggtccgagaaaccactgtgattctgaggaacacgacccgatgttgtccccatattcttgttgacaaagcgaaagatcgagtgacgagtgaaaagtgttgcttcttcacacccacaatctctccctattagtctcttgtctcccaaaatatttctcccaaggtggtgggacccagtcctcttctgctgtggaatgtaacacacgtgtgatgtgtctaacagtacctctaacacagccctatcatcttttatgaggagagtgttgcaaagcactattagactccccacttgttgttcgcaggtgtggggaccactaataggtacacacacaaacgtggtgggagagcacttgtgtgttctccaacatgatggtgaataatttaacccgccacaagaaaaacatctcctcgagagaatcagaaagtttgtagctcgaatgtatgtgtgttcattagatgcaggcgtgtggggaaaatatgatatgtccctccagtgatttgttatggtctcaccccccctacaatccccgcaatgctgtggaaacagcccccaccacaccagtgaggatgtgactcaactccacgaaggagacctactccacagacggcatccaacacccatctaaagatgtagcgnnnnnnnnnnnnngatgcaatacgaatcagatcaccacgaggcgatgtggagaatcacgtatgaagagagaaccaccacaccccccgtctgcctcgatcaaaacaaacggctggtgggtcaaaatagcaaaaaaacgagagtcgcataaacgagagggcacaatcacacggcgcacacactgttagtctttcaccacacgcgaccaaatcacaacaacagcagtgtagatgcgtcagtcatcaccctctacggttaatcatacacacctaggcggtgacactcacacatatgtcagcccagcgagtcagcacaaatatcagatgaatatgatcccaccacaacggctatggagcaaaccatcctgaggagtacaaggcgagtgaacacaactttgtcaccgtggatgtcgaaccacgcacgcgaatgcaacaacatactgtcgccacatgggcacccacacaacctccacgaccaaggacccgcagcgtccgtactactcgaaagtggaccccaaagggggagtgctgcccaccccaaaccacaggtgcggcaggcaaggattacccccccgctggcttctcacgagcgaagacaccccgttagcgagcgtcaataaaatagcagcacataccaagcggataacgcagccacaccagccacaccccg

SEQ ID NO: 415084 - DNA, 1049 bp, Homo Sapiens
gaatgtccctccctccccccacaaaagggggcacaatctcgccgcgagaaacatactaccaaccagaggagggccgccagctggcaacaataaatacacatcgacgagggggagatgccccaccccgggggcaccccaggtgtgttcggaacaaaaaacgtgctgcagtgttctcacagagcactaccccttgaccctggagacagcccggggggccgccccctccacaaataaatataagagaggcgacgcccccagcggggctgtgcgtagaaaccccccacaccagcggggagcactacaggggcggcggaacaaattaactgccgcagcaattggtggcgagcaaaacaaaatgcgggggcgtctcaccccacccggtgggggcgccacacatgcgagcgtattcaaagggagccctgcctccaacggcagagacaacaacaccctcctcgtaagagagagtggcgggcgtcgatcccagctagccccccgaggaggccagagcggaagggggaccttgcttagcgccctcatcacaccagcgataacaaaccacacccctgtgcgaagggagggcacccaccaccaagagggggggttgcgaacgcgaagactcccacaacagtgttgcgtgaaactaacccaccaatcgcgggcaaccacctagggagagaaatgcacttcgctacaaataccccccaacagggcggaggaagcacaccccccacccgcatgatgagggggtgaaggatgccccccaccaaaaaaaggggccccaaaccaacaggccgaccacatgacacacagccacgcaccctagagttatcaccccatcacgagagaaccaaactgcgccttggacaagtaggcagcaacatacgaccccgcctgttatgagaaacactcacacacagcacacaccaaccaatcgcgcgagacacatactaccctcccccggccaacaccgtccccagcaacgccactccacaccggcgctttaccaaccaccacccccctcaaaaagagggcccccccacacaccagcg

SEQ ID NO: 415085 - DNA, 937 bp, Homo Sapiens
gcccttttccgttgacccaagttcgtagggagaaagaggaaaatggcagcaccctggttgtagagcggagacgtcgcccaccgctcgatatgagacgccacagcggggggggccccgtaacacacctaagagaggcacccggtggtgtgagacaggggggccgccctggtggtagaaccgggagaggcccttgcacgagggaaatatgcggcgcccccgcgtggtggggtcggcgtgatagacagcgcgcaacaaaaggtgttggtggggagtcacaacagctagcggatacagttttctctccccgcggggcacacgaacagatgagtgtgtggggagagacccgccgccagtgaaaaaaagcgcttcgcgtagcccacaaccgcccgccaaggaaaggaacatgcagcacgctctgtatagaaacaaacagcccacgcgcgcggaagtgaactaacactccacgcgaaagatcaggcccgcccgcgatatagtagctgggtgggggcaaaccacccggaaacagacctccaaaaagagcacggacgggcagtgtgtgcgtcccccaacgagaagtggggggccgccacatatatataggtactagtgtctctacccaaatgagtgtgcccacacaagagaggggggcggcaaaataatccgcgggggaggcgtcacactatggtgagtacgtcagggcgccccaccaagagaggatccatagaaaaacaagaggggtgggatcatcaacatagaaacaccccgggtggagcaaaaacaacattttgctgatgtagacgagacaagacatcttccttccacacacaacccagggtgctggagaaagaacacccagcgagagaaaacatcaacccaaagacgaaccaacatacatatctattggggggaggcaacaaatggtggataaagaaaccct

SEQ ID NO: 415086 - DNA, 1007 bp, Homo Sapiens
  misc_feature (61)..(71): n is a, c, g, or t
taaaagtgtttatgctcgcccgctactcgtactatttttctgtcttactcataagactagnnnnnnnnnnncgaaaggaaggagattccgatgtggcgctgggacatacaaacaacagcactaatgaatagaagagctattgttacggtagagcacagcacaaacagggtagtgagggcagcgcgctgacaccactaagagacacaaccaacccaccacacgcgctaccgcagaggcccaggagtacatactccgccgaaccgcccgacaacgacaccgacagcggcgcacacaaggaacaacaccacaacaaagcagcccgcgcagccagaacaaaaaccagcaacacacgaccagaagcgagcgagcaccgaaacaacaggaccccacggcaaccaagcacctcaaacaagacatcacagcgagcaacggcgagagagcgagtcgacggaaggagcagcaaacaagcaatacacacacagacagaaccagacgaggagggagcaaccacaacagcacacgaagacaagcacgaacagacaccaaccacgagggcgcgggcacaacacacaccaaagagaaaggacgggaggccgaacagaccgagaccgcacgagcacgggcaagacaacgcacaagagaaaacagccgaagccgcagcgaggcgaggacgccagcacgaatgacgagagcagatacagacaccccaacatataccagccaaagaaagcaggcaaagggaacggaccaccaagtggcaccacgatccaagcgccggccacaggcacgaagctgaaacacaacaagaggcgaagcacaaacagaacctcaagacgcatcagacccacggacaaacaaaaagcaacaaggaaacagaacccgcaaggcaaaagaagcagaaacacacgagcacaagaccacaccgtacgcacccaaacaacgaagtagagaagaagcaggaaacaagaatacaaaacggacgcccaccaaaaagaaaacacacacaa

SEQ ID NO: 415087 - DNA, 1314 bp, Homo Sapiens
  misc_feature (70)..(78): n is a, c, g, or t
  misc_feature (294)..(294): n is a, c, g, or t
  misc_feature (455)..(455): n is a, c, g, or t
  misc_feature (698)..(710): n is a, c, g, or t
ggggagatatttctatattttatttgggtttactccattaggggggccataaaaaatttttgtggatatnnnnnnnnngtttcaatttgaattgtccccctttttaacaagggtggtttcttttaaccccaacagtgggtggtggcccgaataatccccaccaatgtggtgtatcagacgtgtgttcccaccacaccacctgatatttcttcccacaatacatattgtcagcacaccatcgtctctaataataagacgcgctcatgtattagcacagaatcctttctataaganaaacagctgggggagaccacatgttgttctgactcagacaaaaaaactctgggtagctctcacaataatctaaagaataatattgtgggtgagatatatatgtgttgtccacaaaaagaagaacattattgttgagatagaatctcacacatatcatactnttaaccagctacaaataatatcttgtaaggagtggtgggagaaatattgtttgtaaacacacaaaaaaatattaacgcggggggggatataagaggttgtgataactattttttatatctcgcctctcttgctgcacagaagacagacaccccacagctgtgggtgggaacaccatggtgctgtgtgcgccgcaactacaaacatcaagagggaggcaaaggtaaaataaaatcacattcacnnnnnnnnnnnnncacctaaatgatacaaaataaccccaccggggggggccacaacccactcaaagacgcccctcaccacaagacgaaacaaaattctggacgagatgggctctacgggcgcccaacgacgtcgccaacacaaaagatttcttctgtcagcgacacaaacaatcgttcgttcttatacaaaacacgagggtgcgcccaccgcgggggactgataaaacaaaccgagatctgtttttaacagctcatccattaaccacaaaacaatccttttcctggtggaaacgacctctcttctctcttagtatatccctcccagcagcatgagagggagaaaaaaacatagtttgttgttgcgcgaggacagcatagagtgcgtgaccacaactattatctaccgagcggcacgaaagtaacacccttgttatataactttagcgcagtggggaggttgttagaaaaaaatcaatcccctatcgtcgggcacccgacctgactatcacagaaagggcgcgcacaactatttattctagttatacactccagcgagtacgatactagcaacacgcccacttgcctaacacacacatgacgaatcaatactcaaggt

SEQ ID NO: 415088 - DNA, 1124 bp, Homo Sapiens
  misc_feature (90)..(98): n is a, c, g, or t
  misc_feature (410)..(410): n is a, c, g, or t
  misc_feature (415)..(435): n is a, c, g, or t
  misc_feature (858)..(858): n is a, c, g, or t
ggtcctaaaaacctactctattataaccattggcaaacccccctttaatttaccatcctaaaatagtaaatgaaattcctgggaagtccnnnnnnnnntcttcacaaattcctttcacatcacaaaagagtgggaaacccgtctggttctccagagttggtcaaacttttcttatctggtggcttttacatgtgtaggactattctaaatctggtaccccttagggtttgtacacccggtcaaaaatggtcattctggctcctacaattttctggtccggctatccccagggtctatgctccttctcgaacacaaaccccgagtctccccaaggggcaccgggctctcactcatgagggtggacgtgacgcacactcctactcgggggtgaaatgagggcctcgaaaagnggctnnnnnnnnnnnnnnnnnnnnnaataaacgccatctcgagaacacctcagtggccgaaaaaacccgaggccccctctcgggggggccaccgaggggtctctgtgtatatctcaaactccccaccttctattcctataagagcgctatgagggagagtgggcctgtggcgccccgtggggctcactctgtgtggccattctcccgtgggtccctctataacacgagtgtggctcaactctaatatatataggcatctctgtttataccacacctctgtgggatgagtcttggcgacgctctgggacaagggctgcaagggggggtcgcccccaactttcctgtgtgttcaccgagcgggtggagaggggggctccccaccaataaccggggggtattgtggaggcacactcagtcgaccacgcctcaacttgtgccacaccagggnccccccccaaaaaaacaaaccgctcaccaatataagaggggccatcagtcgaagcacgtggggggctacacccacggggcgagtagagcccctctacacaacactccctggggggcccccacacttccgtgtggttcccacacccccaattctttctcccatcggtgtgagacgcgcctcacagggagagaaccccccttcgggcgatagcaacggggggacagaatagctaccccttccggggaaaaggagggggggaaccccca

SEQ ID NO: 415089 - DNA, 1615 bp, Homo Sapiens
  misc_feature (330)..(330): n is a, c, g, or t
cattttgcgggaattttttttaaatattttgctccaaatttttaaaagcctcccctcttggtcttctttctttgggcacaaatccgctgggccctcctgtgctgtcatcttacaaaagagcgctccaagacagtgctccctcttatataaacagcaacgccccatgtccccacacctcgtgggaaggggctctgtgtgacaccttgggtgaggggcaggtgtagaggagtggaccctgagggggaacaccgttgtgtgcgccctcacatgctatgtcgcctgaagatagtgccgccagcccgacagaaaaagcaaagaacataacatctnttctcaactgacttgtattctctccctgcgagagggcacttccatgacgcgcagtttgtggccacccctctttgtggtgatgtatctgtctgcaacccccgtgttgagagcgagatcgagtgcgggaactacgatgggtctaataggaggggatcttctccacgaggtgtgtagagacctctattatcgcgtgtggcgcgcagaatctcaacctcgggtgcgctatcaccccccctatgagagagagagtgccgcctgtgcgcggcgaagactatctcttacgcactctggtgtggccacccacccgtgtgtgtggaaaaaccccttgtgtgggaccagacagagagaacacatatgttgtggggccccactcccgtggaagagactgtcgtctcgagagcagagaagcagacacaatataatagacagcccatttggaggggagagtgggggaggcagaacatactcccgccacagagaaggcggaccccatctctggggaggtgtgaccaacccccggacaaagcgtcactcgtcacgcaacagttgcagaggagacagaccaactcgtgtgtcgactcaccatgtgccgacaaggagcggcacgacacgatgcaccctgcagcacccaagtgttcatggggggcgtccaccaagatgtggacaccacatccacgtatgtgggggcccacctctcagagccgccctggtggcagcaagagggagcgcccccaaggggacgcagggggcgcaccataagcggtgtatgacacccgactgcagaatgtgcgctctcctcacacaagggtgtactcacgagctacaggagcgtacagagcgactcccttccggtgcagcgaggacaccttccacacaacagagcgttaactaagaacaccccccggagaaagtcgggagctcacagcactactataggaagaggggtctccccaacacaaacggccatgcttggaggtatggtcaaccacggggcacgcaaatcgctctctgacaacgagaggaagggcccgcagccacagtgtgcagcacaccacaaggctggcgttggcagctggcacccccccacaatgagctagcagaggggggtgcagcaccccaaggaggccccacgatgaaaacgaggcaggtgtgcgcacaacgcgggcccgtaccgacaccaaaggtcatgaaacaaaaggtgcactccatatggtgaggtaacacactagcgcgagaggacaaaccactccgcggtgggggcccccccagcataccagaagacagg

SEQ ID NO: 415090 - DNA, 1202 bp, Homo Sapiens
ataacaaaaaaaacatctttttttctccacaaaaagttggggggggtgtgtatttccccgccgcgaaggggggggagagcacacagaccgaacgtcctcgctggggggctgctccaccccaaagagattggggaacgccacacgcacgaggcggacggcaggaccacaagcagaggtggtcagtgaaaaacaacctcgccagcaggggggccaccgatgatatgggtagtgcaaaatagatagcaccgcccgactgaacactgaagacgaccacacacagagagagaggagtcggcacttctattctccacgcgcgcggcgagagaaaagaaacagacacacgcaagagacaaatgagcgcggtgcgtccgtaagaagaaaacaaacacaacatcgtgtgagtcggcaggaaggaagagaaacatgctaagtgtgcgcagcaccaccagcaggcagtgcgtggagaggacaaaccagtcgaaatggtgagagtgagacgcgactcacacaacagggggggagagccgatctactacaccacgacagagaagagacagttgaggcgtcgtgcacctcagacaagtgagagtaactgtaacacacagagagaagatgagtagtgtggcacgaggcgagaggtcatacacaacaaaggcgagatacacatactacacgagacgagaggaggagtgacacgccaccgcacgcgactcgggagccacgcatactgaagcgcggcgctggggggaggggataacatcacaacctaaaaaaagagagatgtggtgcgaaggagaaccacacacaaaaatgctcctcctctcctctacgcgaccactacagcacaacagcgacgaacaaagaagaggggatgccatcatctattagggacaaacgtctccccgcctagcagtagcgctacagacgaagagaagagcagagccgtgccagcaagcaaacaccacatactgtcaccaacaaacggacgtgctcctatccacacgaccaaccagacgagatggcggcgggcttcaacacgacaagaggcgagtacaaaacaaaatcagcaggagcgacacgatcagacccagagctagaaagacacaaacaaccaaaaaaacgaaacagcgccgtagcggcagcaaacgtctccaacaccacacttcccctccctctcctgaacaaaggcgcacacaaacgac

SEQ ID NO: 415091 - DNA, 597 bp, Homo Sapiens
  misc_feature (76)..(187): n is a, c, g, or t
gaaacaatatttgccgtgagaaagaggacagaaacagccagaaaattaaaacgaaccgcccgcagggcacgccgcnnnnnnnnnnnnnnnnnnnnnnnnnnnnnnnnnnnnnnnnnnnnnnnnnnnnnnnnnnnnnnnnnnnnnnnnnnnnnnnnnnnnnnnnnnnnnnnnnnnnnnnnnnnnnnnnctcccgcacacagccacgtgctgcggccacaacgggagagcaccgcccaccggagctcgcttgactgtcgtgcggcatagcgcagcagtcgtcgtggatgaaacacgcgccggggggaggagagggaatatagcgcccaccctagaagaacagcgggggagagaagatgatcaagggagagagaaaaacatcatcgtataatgatatagaaggggaggcgagaggaaaacgggcgtgggtgaggcgtcggacagaggaggtgaagagcaaggaagagggctggcggggaggggaagccagaaagcgggaggatgacggcgggggaggagacaaaaagggggagcgggacccaaacaacacaggcggcggggcagaacaaaaaatgctatatccaccccacggacgcgcag

SEQ ID NO: 415092 - DNA, 1215 bp, Homo Sapiens
  misc_feature (786)..(794): n is a, c, g, or t
  misc_feature (1017)..(1017): n is a, c, g, or t
  misc_feature (1108)..(1108): n is a, c, g, or t
gggatctcttttcttcctctagggttggccaaaaccccctcgggccaaaaagggcggggggagaaaaacgctcttatgtgtgccacccacaaatatatggtgaggagaaatagatgtgccccatcttctttattctcagcgcgcacaaaacaacactttttccacagtggcggccggcgaataatgtggcgcccacaaactctccaagaaaacacaataataatctcgtttttccccacagaagggtgggcttaaacaacgagtgtgtgcgtccgcgagcgaatctctctcgcgagagaatattgtgcgcacccctcttatataaaactccccgacgggtataatatcatctagaagagagagtgggtatataatacgcgccccgcgagaagagaagagtagtgcgcaaaacagtgtggtctctcccgccttagagagagagacagctgtggtgtgatgagacactcactcgtgaaggatgaggcccccctcttgtgtgcgcacgacgagtacttcctccaccgtagagggagcgcagagcagcagcgcgcgcgagtgatgtgcgcgcgcgacgaggagagaggagaggaccaccctcttatataaaagagaaacacaccaccccgaaggtgcgtgcgagaagaaaacacatccgcgcgcgagagaaaagaatactcgcgagcgagcgggggactccaccacgcgcacgcgtgtggtatttgagtgcgtgggacagacaccaaagcgtggtgcgatcaccacatgatgagtgtgtgcccacccctnnnnnnnnngagaggcggaccccatatgaggggggacccaaaacaagagagtgaaaacacgcgcggggggggaggaaaaatacagtggagtgtataactgcagcgcccgcccgcgcggcgcgaacccaagaagcagggcaaacaacaagctcgccgcgagagagggggtgatagagaatgcagccgaagccccccgcgaggaggaaggatactcaccaataatgagaggggnggagcgggaccaacgacaacacacgcagcggaggtggggtgaagcagagagtgaggagcggttctacatctccaacgaaggcggagaacanaactaggcatcgagacagaaggagcggggtactaccactcacactaaagcaggagaagcagcgctgtgcgcagcgtgtggtaatatataatagaagaaccgccccga

SEQ ID NO: 415093 - DNA, 709 bp, Homo Sapiens
  misc_feature (129)..(190): n is a, c, g, or t
gaagatacacattgaaataccacagatacgatcgagaagtacggaacgctcgctcctctcttcttttctctgctagctcgcacgaagaagggcgactggacataaaagaagacaaatataagaacaagnnnnnnnnnnnnnnnnnnnnnnnnnnnnnnnnnnnnnnnnnnnnnnnnnnnnnnnnnnnnnngtgtgttattttggcaggaagacagaacagcatgaagtctctatgacttagatagaagagaaagaacacgcacaacatagacaaacagagagagaggagagaaggtgaatactctctcagtgaaatagagacacatagaaaaagaagaaaagaagtgtcagtgtaagtgaaatcatactctctcactacactcactgatcaagaagagagaaaagatactaagtggagaggaaaggagacacaatactaggaaacaaacaaaaagacaaagaggagagaaatagatatggaccaccatggaaccggggaaagaaagagaaagagctacgagaaggcgagagcgcggcacgcacgccccgacagcaaaacacaaaggatgtgtaataatatacagaacgacaacccacgggaaatacagaccagagtcgctagacataaatagagcaacacatacgtcagaccgatgacaatatattagcacaaacatagcaaaacgaaacaagaccaggcaacaccaag

SEQ ID NO: 415094 - DNA, 610 bp, Homo Sapiens
  misc_feature (89)..(138): n is a, c, g, or t
  misc_feature (141)..(158): n is a, c, g, or t
  misc_feature (206)..(216): n is a, c, g, or t
  misc_feature (288)..(435): n is a, c, g, or t
  misc_feature (469)..(526): n is a, c, g, or t
gaaccagcccccccctgacggttgcgtttgatactatagtacacggtctcctcccgcgccggaggaaaaaaacaggagggcagaaatannnnnnnnnnnnnnnnnnnnnnnnnnnnnnnnnnnnnnnnnnnnnnnnnncgnnnnnnnnnnnnnnnnnnggatgggggagaaggagaggggaggccacccaccgcctctctgcagtnnnnnnnnnnntacaaaagaaaacaacaagcgcgaggggagggagaacaccacacaccacaacactaatagaaaaaacaaatnnnnnnnnnnnnnnnnnnnnnnnnnnnnnnnnnnnnnnnnnnnnnnnnnnnnnnnnnnnnnnnnnnnnnnnnnnnnnnnnnnnnnnnnnnnnnnnnnnnnnnnnnnnnnnnnnnnnnnnnnnnnnnnnnnnnnnnnnnnnnnnnnnnntagtaaatcacgaagaaagggaaagaacaacaannnnnnnnnnnnnnnnnnnnnnnnnnnnnnnnnnnnnnnnnnnnnnnnnnnnnnnnnnaaagtgggcggcccggcgaagccgagcacgccaagcgcgaagaggaaaaaagagaggggggagggggagaggacaacaaccgga

SEQ ID NO: 415095 - DNA, 153 bp, Homo Sapiens
  misc_feature (57)..(73): n is a, c, g, or t
caaccaaaccacctgctacttcattgtaaagaaaccacaagcgagaagaggaaggcnnnnnnnnnnnnnnnnnccgacgacagagaaacacacaacgaggggagggggagagaaataaatatatatcatcaatccagcacacgagcaagagag

SEQ ID NO: 415096 - DNA, 435 bp, Homo Sapiens
tcccccagtgtggggaccaatgaaaaagtggtcaaacgccgtgcccactaaggtgggggcgggaaaaaaagaatccgcccacgtgattacgcacggagggaaacaaacacacgtggagagcacactcggagggacggggccccgcacccaacagaaagccgtgcagagaaacacgtctggaccataacacacgaggccctcgtgcgcacgcaccatttagaagccgtgtcgcgagtggctcctccggggattatacccatgtctttggggccggccatattagaccaggaaaattcgctcccacaacataaccaagaaagaagtagtgggcaaaaacatttgttacataagagcccattctctctgccccactctgcttcagaaaacccttctccctccttcaggtggacattggggcattaaaagcgcacacaa

SEQ ID NO: 415097 - DNA, 626 bp, Homo Sapiens
  misc_feature (42)..(50): n is a, c, g, or t
  misc_feature (80)..(113): n is a, c, g, or t
atataattttttgttctctccccccaaatttttttgtgtttnnnnnnnnnttttctcaaccccaaaattttggacccgcnnnnnnnnnnnnnnnnnnnnnnnnnnnnnnnnnntgtttcttctccccgggggaagcattcatcatcatcatagaggacagcggtggaaaaagatggttgttttgagaaagatagaggggagaaaatgatttctccccgagggaattctcggggtcctctgtcgccccgaggtagtgtgagggtttaaaaaacacccctctggagaattatccaagcggtcttattttagtagtcccagggtagactccgccagaaagaaccccccgcggggaaagaaggaggttctcggggggggacagtggcggaagagagggggtgttctttcttataaaaagaatatctggacaagagcgtgttatgagaggagcccattttgtgttgttggagcacctcgccaaaagagatgttgcttctattcccacccctctttcttcaggggtggtagaagtagatcctcctccaggggcgtctagtggcgctcccacctcgcgccctcccaataggagggggcccctaaaaaaagtgtctttgaggggtgtgtcaaac

SEQ ID NO: 415098 - DNA, 1482 bp, Homo Sapiens
  misc_feature (496)..(504): n is a, c, g, or t
  misc_feature (924)..(932): n is a, c, g, or t
  misc_feature (1214)..(1214): n is a, c, g, or t
  misc_feature (1216)..(1225): n is a, c, g, or t
ggtggccccctttgagaaattagattttagagaacaggtccactactcctaaaaaaaaccccacgctgatgttattcctgggggggtcgtgggagaggtgttgtcgagggaaccatttggggggcttgaggaagaagcgcgttcacgtgcttatgtgaaatagctctcctttttacaccacccaagccatgtctctccgcgttctctaagcgccacttcgtgttaaaagtgttcctcgaaacaccctgtgtgtggatacacgtgcggcccaccaccgcgcgaaggccgtgctaaacacaacaccgcccgcccatgtgtggacaaggcgcccagagacacacccctgtgggtgtggtgcgccatatctctgttcacagaagggagctattgtgctccatatttcaccatatgttgtgctacaattttcctcataagagaagaccacttcttgctttgtgtgaaaaaacacacaaccagggggtgagacaatcacggnnnnnnnnnacacccacacacagaggttattacaaatagtcggggcgctcccataaagggtctttatccattccactctctactatgtgcacacacaccccgtgaaaagtgcctctgcaagagagaggcctcttaaatagcgcgccaagagagagggctctctgtgagcgaaaaacaactgtgtggaaccccttaggaagaccgtcggggccagtgttctgtgggggcgaaaaaaaccgcgcacagacggcaccccctcgagggggaaaacaaacactacgaagaggaacacaagaaaagttggccgcagcacacacggcgggggagcaaccccaacgaagcctcgtgtggggccccaccacaagagagggtgcgcacatatttgtgcggggcggacaaaaacaggggggaaacccccttccgacgagnnnnnnnnncaaagcacccgcctcttacgcgtggaagtacactctatctagtacacgagacagaagcgagcgtcgcattcaaccccatatgtcgtggaacaaacgcaccagctgggtgaggagcgacaaaccccgcctcccgaggggggtacaaacacaaaaagagggacccctagtaagggttaccacaacagagaaaagttccagtgtatctctccccccaaagagagagggggtattagggcaccacgcatattaccgcacccagagacacacccgttgggtgtgtanannnnnnnnnnacagatgagggtgtccccgggagggaacaaacagcggtccccgggagatcccccccggaagagagggggacagactattatgttacacatacccacgcgcccgtggtggacaacactagcctgggagggaacaacacagcaccgtagggatcaattgtaacggcgggcacaccaaacatagtggggtgacaccaaaacaacagcgcgtggcctggagaaaaaaagacacgacgcaacattttggcggaacaaacacg

SEQ ID NO: 415099 - DNA, 509 bp, Homo Sapiens
ggcaaaaagaaattctcccttttttgtgaaatttcctttaataaaaaatttgtaaaagagaaggttcccccctcccctgtaaaaatttgccatgattctttatgcccccggggtctccacacggggaataaaacacacccagtatctggaagttcccccaaggggcccacctactctccattgttgggttggggggaagggtgagtagggtcttgcaacaacagcatacgtgaagcgagtcataataattggaaaaacattgagcactagaatgatactttggtgtgatgacttttattacgcaggagacatggggttaccagcacacacctccacgtgaggtatggatattacgtaaaaaaacgtggatctctatgaacaacaagataattaaaacacaagaatggttgccatgtacaaatcattcgaccattgactcacccctttgtcgggcgtgattatagacaatcaaagagggtccacataatatgaacaaccacgctggtccc

SEQ ID NO: 415100 - DNA, 1428 bp, Homo Sapiens
  misc_feature (901)..(909): n is a, c, g, or t
  misc_feature (1265)..(1273): n is a, c, g, or t
gaaaaggggctcttttttaaaaaaaagtcctctgtgggagtgtgcctaatggttaaaattaaggctgtgcctttaaactataccctcgtggggtttgaacaccatcacctctccgtctaaaataccagggtgtggtacttcctccaaggcagaagtctctacagcggcaatttcagagcagcacatctcgaaagaccccagagagggacgccgcgtgtggagaacacagaggcgccctcttcactctcgcctctctgtcccacagtgtgtgcgcaacaaccccacatcttttgtgtgtgtacacacacccctcgtgtgtacagaagtgcgctaaagacacagtgagcggcgctcttatcacactcgtctaccgccgctgcaccacacagagtgttatatcatatacgcagcaatatagaaaactcaccagagagagaagcacgcgagaagacacagcagccgctgtgctgcgcagtcaccaccccctcctctcacaacagcagcgtccgccgcgggggcgcagagagaggccgccctgcagagaagtggtgacagctattacgcgccagcggtggaagaggtggtcccccactcttctgcttgacccgcgcggtattactccgcgaggcgcgcccacaaaccgcgcgggggggagctctctgtctgtgtgagcgccctgcagagtaaggcgcccgcagtgtgggagacacaacccaacgctccggccaccctctacaactgctgtgccgccagaatataacagcgtgtgtcttctgcgagcacacagaatctctcctaacagcagagtatcttcttgcccgacgcaactagttgtgaacaacagcagcgacccccccctgttaatatgatctggagggagttatactattcatcaccactnnnnnnnnngtgagtggtgtgcgccatgtgtccacaccaagtgggggttgttctctctccaccaccacgaccatgatgcggtgtgtcctacacacaacgctgccgtcattacacagcaccacgtggtgtagttatccccgccggactgtcgagatggatgcaaaaccgcgcgccccccaacagttgtggcgtgcacccacccccggggtggtataaactccccccagagagtttgcgccctctcaaaccaaacgacacatggtagccttctgctacggggcggtttccaacagttgaccccctctggtggtccccaacggctctctcactctccggaaaaaaggggggccctctcgctgagtagnnnnnnnnngaagtacaagcgcccccactctgtcccaccccgcgcggaccaaatactatggcaaggatggattcgatgttagtcatcccacactctttaaacggggggcgacttcatctatcacccccatcgtttgttcctcgcgattagaaaacccccccata

SEQ ID NO: 415101 - DNA, 1079 bp, Homo Sapiens
  misc_feature (319)..(328): n is a, c, g, or t
ctccccaggttcccagttttttcccctagtgggggtattgggaaagggccttgtctcctcggggggggtcccggtgatctcctttgaatatgtggaaccgccttctcgtggggccccgcggccgagggcaggccgtggggctgtagggacgctttggctccacctaaacctagtggggggtccccatgttgtagacgccttctttaacaatctccttcgtggctctcaggagaaccgtggtctcttgaaagaagtggtgcaccaaaaactgctcccgtcaagaggaagttaagtttttagaaacaccgggaagaaattnnnnnnnnnncccgccggccccctataaagaagaggggggtccccccacactataaaaacttttcgctgggaggaggtatgtgtcaagcgccacccccccatatatcttaaacatacctttgtggggccaatattattcgcggtattcgtcgcggtgtggctatataagcagagaggccctctcggaaataataccctgctcagaaaaactccaaattcttgtgcagaaggatcaccctcccggagtgaaagaggcccccagtgcggtgtgaattgtctccccaggggttgggaaggtctggtgacgtctgttaggagggggtatgtatcttgtggcttgggaaaacccactacagggggccgcctcttgtagccgggcatctgggtgtccgcgttgtgtgtcctagatgtgctgggagcccttttagcggacacactgaggagcaggtgaggcctaacgcgtttctccccaaagccccgggtataatgccgctatataacacctctgcatgtgggtgttctcccaatcctgcctttttctaacacctaatgtggggcacaactgtggcgaaaagaatatatagtgtcgcacaccaaacactcgcgtgtgagtccaagaaggcctctacattccccatccgcgggatacatccccagaaaatttgtccacccgcgggttctgcgtcgacaaaacctattgtgtggccaagctcacaacgagtaatgataaagttgcaccccactgtatagtggtagtgtgt

SEQ ID NO: 415102 - DNA, 945 bp, Homo Sapiens
cgggcgggactggcgcgggcggcgctgggctgggcccgggaggctggcatccctgggtgctccggtgcggtactagggggcgacggctgagccgtgggtggagccgctgggtcagtctcggatagaaataaactgggaaactgctgtggtctctgttgcttgcgtgctcggttttcgtgcttatcacgctgatgatgaggaaggtggttttggttacggagtgagcaggtgaacgcctccccgtggaccccaccggactgggtggggaactcacagctctgacgccccgtgactgcatcccctagctgggcagagacgcatttggctcgccaccagccacctcccaacagcgcccagctcggggagctcagggaatttgcagttgaatcaggcgtggctccagggacctgagctctgccttcagatggatcctagtaatcctccaggtgcggcgggagagagcagccgaccatccccaactcggctcagagcctggggtcctaactcacgtggtcatgtatcggtttccagttgtttcatgatgtagagcttctctcaattaggtttaattaacaagtagaacaaggactggcagagcttcattggatgttgcaccccttacagcttccctccaatgactaagcattggagggaagaatcatttacctgatgccatccagataatgcacattctgtgtctgaactggcctccggtggcattgacctatacttctgcagcagctgctggtggaagatgatgagcttcacctgtgttttgcccttgccaggaacatgagcaatacagaagctgtcatgcaattctgctggcctctcacatacggtcaaggtcaacacgatgcaggtggattggacctgcagtcagagctccaggcctctaaggaatccagcaaagtttgcctggaaacccctctgaacaggactccc

SEQ ID NO: 415103 - DNA, 1416 bp, Homo Sapiens
  misc_feature (518)..(575): n is a, c, g, or t
  misc_feature (977)..(1018): n is a, c, g, or t
aaaaatttgagcccttttttcccccataattcaacccaatttcaaattccctgaactggaaatgggtcttagaaaaatagataccaacctccttggggtggcttataaagggactgtgtaagaataaccactgttgttttaaaacgcctatttaaacacccactggattcggcactttcttattatcactctttattatctcaaacactacaatctcatgggacgctctatctcctatctcctcattataaagatagagtaagatgctcccctccactatatattctggtgaggtgtcacatttacacaggtgtggtatctataacacaccaagggagtcgtcctctggtataaaatacattctataagagacacatctcctatatacagacacccgagaaacataggggctgtggtacgacagggctgttccttcttatatcatatatcttgcggcgaggtgtgtctcaaacgagtggtacaatttttgtccaagcacacactctctacaacatgtnnnnnnnnnnnnnnnnnnnnnnnnnnnnnnnnnnnnnnnnnnnnnnnnnnnnnnnnnnccaaaagaatacacctgcttctgtgacaccgcagatagagactacacagtgtcgtctccctctatgagcgcccactgtgtgtgagagagcgtgtcttactccaacgcgcatgtgcaccaacccccaatgacacactcccgagcgccgctgccacaaagagctgtgtgtccccccagtcgccgggcaaactctccaacacaccctcctaaccgccgccacccaccaacacacaacgacgcgcctataccaccacacagcgccgccccggctgcctcgatcaaacacccacgcgacgcgcgcaccacacgcgcggggcgcacacaacgcgctgcttcgactacccccgcccgacatataagcccccctgaggagaccatacccccatcaagaacgaggcgcggnnnnnnnnnnnnnnnnnnnnnnnnnnnnnnnnnnnnnnnnnntctttctatcgcacaaaaatagcatcacccagctccggaacagacacctcctcgtccacgccacgcccgcaccccgccacactaacatcccgccgggcccaccacacatccagcaaacaaaccaacacgcgtctgctccgaccaccatactgtcggcgtaacaagcgccaccattgacaggaccacattcaacagagatttaatattgacacacatcggccgtatactttttgcacatcacagcaacaacacaacgtgatgctcacaccacacaagactactccctacaacacaaccccatatattattaccctcttcctgacgtcaccacacctctcactcacacctcctccccgactcaatgcattctcgcgcccccaccgcgttacacaccatcc

SEQ ID NO: 415104 - DNA, 1485 bp, Homo Sapiens
  misc_feature (72)..(80): n is a, c, g, or t
  misc_feature (271)..(279): n is a, c, g, or t
  misc_feature (717)..(725): n is a, c, g, or t
  misc_feature (787)..(787): n is a, c, g, or t
  misc_feature (990)..(998): n is a, c, g, or t
  misc_feature (1208)..(1216): n is a, c, g, or t
aacaaaaattaaacccaacaatttttttaacacaacacaaaagaatccacaacactgtttttttccccaccnnnnnnnnntgggttttcccggggagacccccggggaataccagggggggtgcccaccacgtggggagaggcacgtacagcgtccttggttaaaaaaggatacatttagtaatctcgtctagaaaaacttcctcttctgctctaggatgttattctctccgccccgccccgtataacaacaacgaattcttgcctgtgtnnnnnnnnncgcccatagtgtgatcctcccccgggtggtgtgagtacgacttcctataggaaagtcatgcgcccggatcaagatactgtgtcggtcctccccacgacagacagcctgtcgtgcgcggtgatgaaggagagtggtccgctggataaagaacccgcccccgcgagtgtgataaaacacatcgctccaccatccaccagacagcgcggggggggagaaagcagtgtgtccaccaaaacataaatcaaacgcgcgcccgtggtcgcactaacacagagaagaagataaatccagcacccgacagctgcagttgttgtgtgcgccggcccactacacaacacgaaaatgagacgagggacgaagagtctcccatcacctgcggtgtggacgaccgaaacagacagagcgatgtgatacacaccacccgcgtggggaagcagnnnnnnnnngccgccacagcgagagataactctcccgagtgagcgacgtgccctctctcgcgcgagagganagacaaaacaaaccgcacgactacctaatacgcgcgcgccgggtgtgtgttcccaacaaaaacgaaaaagacgcctattcactacctgcgaggagaaggggtgcccatctcgcgacaaaaagagcgactaattatcggtaagccgcccccgtatgaagagtcgcgccacacacagagtaaacaatatcttatgtgagaggggnnnnnnnnngtggttggcaccacgcaaacaaaccaaccaactttcgcgcacgcctcacctcccacgcaagagccaacgaaaaaaaagtgccgcggggaggacaaaacgttgttaaacccccgcgtctttaattgaaacaacaacacagcgcatgatagcaacgggtcgtggtggggggggaagagacgcacccccacacttctgttgtgagggttcctnnnnnnnnnaaagggtgcacgggctccaaagctgctgttactataaacaatgagactacgccgcggatggtatcaaccgcgggttgttccacacaagagtgctattcccaaccggcgcgcatcactactgggaccccgcgctgcgccccccctcgtcgtggggaactccccgcgaagaataacttccgggacgacgagcaaccccacccgtgttgttagtggatacaacccacccttctcttctatagtgcggctcccaaaacaaagtcgcgcgcagt

SEQ ID NO: 415105 - DNA, 1050 bp, Homo Sapiens
  misc_feature (216)..(216): n is a, c, g, or t
  misc_feature (300)..(300): n is a, c, g, or t
  misc_feature (702)..(713): n is a, c, g, or t
  misc_feature (736)..(745): n is a, c, g, or t
ggggaaaacaatgacaaggggcggccgccatttattggccaatcacaatgaaccccgctttccatacccaaggattttctcccccaacaatcgattaacacaaccttaataccatagaattccccaatttcctcaccagctggctagtgtggctccaacgggagaagatgtccccctccacagggtgtgctggtgctcaatgtggacaaagaagcncacattattttctgtatctgggcctgggccacgaagtcatctgttcgcctacaactgagaaagcagcgcatctggtgtgagcangttctcgggtggtggggcacacagtgaaccttctatggagaaaactcctttagagtggagatttgtataccaggagacaccgagatctggggagactatgtagagggggcgtctcggagacaattggggggccctcaaaaaaactccttacatacaatgagaggagcgtgtttctcgttcgcgccccatacttgggacccctagaaaattaacaagacagaagagaaatgtctccagtggggaacaccacaaacaaacaccaagttccccaagggagggcgcaccctatattaaaatctcttttgccccatggtatgtgtgggcgattgtgtgttgtggggagaaacatcataagggcgtctttttaaaaattcccaccagcgctcaatgggaaatatcccnnnnnnnnnnnntcctgggacccacatcgctcttnnnnnnnnnnctattaacaaacacgcccactcctatgtgtgtgttccctcacaaaacgggttccacatagtgcgaacctcaacaaaccccgggttggatctcgggctcttcagtgggggcaaccccctgaaaggccccgctgccggtggacaaaagaaaggggacgcggaactgcggggactcccaccgacccaaaaaataggaaggggtcctgggaacaaatccgtcctcgggcatagtggggacacctcacgaggaaaccggcccgggacccagggaaacacaacaagtgggtcctctggaaaaagtggctcg

SEQ ID NO: 415106 - DNA, 1553 bp, Homo Sapiens
  misc_feature (50)..(61): n is a, c, g, or t
  misc_feature (1197)..(1197): n is a, c, g, or t
attagttgaatgataacatcacacgtccacatccagtaggaggggctgtnnnnnnnnnnnntacggtgtggtaaacacgcgacgcgggcagagcctggggctcacgaaaagttgaaaaaacggaggcggcctcccccacccgagcggtgcgagctagaccagcagggggtacccaggtaagaagacgcgaggccgcgcgtcgaagtacgccctgttgggacaacaagggagggcgcacagagcgtatcacagaacggggagagacaccacggaggtcacaccaagtagacagacgcgagcaacaatggagacccgcactgcacaaagcgcaacacacaagcattcgagacacgcgcggaacacacacagtcggcacacgagaacataggcgacatgcatgataatactcagcatgcatcgaccataatatagagaagcaccgagcgcagacaagacgggccgcaagaaaacaaaccgagaggggaaacccacgagtgaagagacacctacagcattgtgtcacgggagcgaaatgacgacagggtctcggcggggccaccacaaacacccacgccgccccagaagaagacaactcctcacgcaggcaggatgctagcaacagcacgccgcacacaacatgtggtagtctactaacaggcccacgcccagaaatgaatgtatgaccaaacggaaagagcgagacgaagccactagctagtggcgcaacacacaccaaatctgcaacgtgaaacggacagacaaccaactgtgcagcgcgtcgccgagcagcagaacgaacattactggcgtggccacaagacaagcaaagagaacacagcgcaacgcacagggggtggatgactttgcagctacgaaacaacggagcaaacgacatagcgctacgacaggacactcactaatccacacagcgcggactgcaacacgcgacacacacaccgagcggtagaaacgccgcaggagaaggaaacatatctcgagagcagcggcgcagcagccacccaactcacaaaacgcagtggtgtgggtcccaccaaaacacagtagggcggcgcacgcgcgcacccaccagccagcccacagggacgacgaacaccaacgagacacaggggagaaggagaaccagcacacaaagaaagtaccaccaaagaaggcaccagaccacaacgaccgagaagnacgggccgacacaacgacgaagaaccttgaccatgtgcagacaactgccctacgagcggagtccaacacacaagacgcaacgacagcaacgaggactgaacggcgccggcccacaccaacagcgcgtacacacgaccgcgagcgacagcgagatccaaacgcaagagcgaaccaagctagacgccgccgccacacgaccataccaactaaggaacaaacaaccgacactacgatggtgggcggcgggagcacagactgagaccaccccaccacgaggaacgcacggcgcgcgcacccacgacagggaggcagccagccattcgaaaccacggcgactagtccaaaacccacccaca

SEQ ID NO: 415107 - DNA, 924 bp, Homo Sapiens
  misc_feature (437)..(437): n is a, c, g, or t
  misc_feature (558)..(607): n is a, c, g, or t
  misc_feature (893)..(893): n is a, c, g, or t
aaacttaaccccaagagtattttcttttttgacacaaaatctatggagggggtcccaggtatgttcttttcaccaagaaccaaaaattaatccacggggagatagccggccattggggaattcggatggcgcgcaaatttgaagaagagtgcagggtttgctctaggccagtgagtagaacgtaaccctgtggggacgcataaagggcgacaatcccggctcaagaaaagagggccgcctctgaaacccgcatgagtgggtaatccgcacgtctcactgtttatgcactatccttgggaaaccttgcaaaagccattgttagccatggtgccaagtgggacacgcggattgtccagggcgtgtggacggccaagagagaggagtgccaagcgcggtaaagcgtgcgcgtgaagagtccaaacgcgcgacaaaaattnaactcgccgcggggaaaagaaccccatcgcggcaattacagcggcggttaatgcgcggggagtcaaacgggtaagcattgtcagcgtacacattgtggctcacacagaccccattaaaatnnnnnnnnnnnnnnnnnnnnnnnnnnnnnnnnnnnnnnnnnnnnnnnnnntgccaccacctatagggcgccctgttggaaagtgggaaaaaaggcggcagcgattactcacgcctgtgggttgtcgaccacgcacttcgtgctgaacgagacactgtgtgcgccaaacacttcatattaaaaacacacgtcaccgtggcacggggaggaagaaactggggtgcgtgcccgcaaatgaaattgcgcgccgaaaacccatggggcggcaactctgtgtcgatgatatctgaggtcgcagagaacacacgcttccctgcgggaaactctcccgtgcaangcgctggctttggttaaacacacacatttaa

SEQ ID NO: 415108 - DNA, 1107 bp, Homo Sapiens
  misc_feature (446)..(519): n is a, c, g, or t
  misc_feature (748)..(748): n is a, c, g, or t
gaaaagagagggcgcgcacgacacccgacccagcccgcgacgccgacgagagaggagggcggaagaaaaacaaaatgttcgaggagtgggctgccgcgagcaaaagaacaaagagtggctgggtaatacgtcgaacaacaagaacgaagagcgaggcgtggaccggacgccagcctccccagcgacccctctctgtcacgagcccgcgcgcggcacaggacaagccagcagccggcagacacagcacaagcacacagtcacgaacgcccagcgcgcacacgcacagagcgcgcaactacgaaaagcacggaggacccacataccacgagagtcaccccagacgaagagcgaggcgtcgggagaggaagctcgaagtgcgcaggagcgaccaggcgccgcaaggcagcgggcgagcgagcagcgacaagacaacagaaacggacacnnnnnnnnnnnnnnnnnnnnnnnnnnnnnnnnnnnnnnnnnnnnnnnnnnnnnnnnnnnnnnnnnnnnnnnnnncaagcaagaaccgacaaagttctggcagagacgtcgcaaagagaccccacacctaccgcacacgaccgaccgcgagcacacgaccacagacaccagatcgcggagtggacggagagtgacgcctccagctgaacgtacagaaagaaagaggcaagggagacacaacagagcgtccagcgatcacgcaacaccacagatctacatcggacgcatgcgcagagacgaggcngagaagacggcacaacacggcgcaccaaaactgacacatgtgcatccactgctctaagcacagactcaacactaccaacataccatccagaccaactactatagctagataaatcgctacagcacaactgcaacgcacacaggaaccaacgccaggacagcgtgagcaccgacctcagcaacgccgcacacacatcgagcatagtagcggtcgatcgaggacgagggtagcagaagccgcacaacgacaacgcacagctccacgtatcgaggagagagtcgccagcggaccgcacgatagacgacacgcacacacgcaaccgcgacccgccccacccgacgcggccgagcagccacaag

SEQ ID NO: 415109 - DNA, 301 bp, Homo Sapiens
ttttggtttcaaaaagaggggggaagtctgttctcttaatgtagtaacaaagaagagagaagaaataaggagagcgccggagagacctctttttaatggggtgtcggagaaacaacggtgagaaagaacacgttgttgttgtgccaccactaactagctactctccgagtgagtgtttcttggcgagggggtactcacaccggtgtggtattgggacaagcaacctgttcaattgagaggggcccacaaaagaagagcggcaccagtggggtgataaaaagaggtgctcgctcggtggggg

SEQ ID NO: 415110 - DNA, 1006 bp, Homo Sapiens
  misc_feature (180)..(193): n is a, c, g, or t
caccgcctaataatttttgagacacaaaaaattttttttggggggtctaatgttgttttttggccccccccaccaaggggggcctctataaaaaaggtctaatcatatgtgttaaagaggggggaagaacaaaaaaatcctctctattgtattaaacagcaggggggtgttatacaacannnnnnnnnnnnnngggtgtgtacaaaaaggcacaccacagtaacaacaacacatttttttgtttggtaaagccgatcgtgtatgttcaccacacagcaaaagaggagcgaaattattctaacggaggggcgccctcctccatataggagaggctccacctagcgcgcaacaccacagagagtggtgtgtgatcgaccacccgcgcgcgagagactatgtgcaggcagcccagacaatacaaagcgagcgcgggggcaagaaaacacggcctgaacagaaagaaaagagtcgagcacaaagaaagtcagtaggaacgcaaaaatagacaagagtggcggggggcgcccccacaaacaaaagaaaaattctttattacacgaagagacaattgtttgtgtcccccccagctcacgcggagaaattaattcacagtacgggaggcgaatcaaacccacgaccgtgtgtctaatgtagtgcgacgacaaacccaaatgcgggtgtcacaacatagagagtgacggccaacacaaaaagagacggggacgccaatgagatgagcaacacaaagaaggtcagctcccgcgcgcggagtgaagaagaacaagagatgtattgaatcccccccctcgccgcgcggcgcgcgcacaaatgaagagaacaaaaacctgcacggaggaaaggatgttagtgaatccaccaccgcgcggagggagtcatctataataatctgagggaggggggggcacaaaaaaagaagcgaggtggaggagagataggtaggagccacaccagaaggaggagtaaaagcaaggcaggcggagagcac

SEQ ID NO: 415111 - DNA, 676 bp, Homo Sapiens
ccccacagaagaaaaacagacagcccgcgcgggagcagggcggagtgagagatacacgagacttgattagtcactggcaggccgagggggaaaaaagaaaacaagaacaacagcaggtagggggaggacggatgctcctcataaaaaaaacaaagcacatacacgggacaagtcttgcactcattgataaagaaagaaagaacgtgagcgacatgcgagcgcgcgcctcaccacacaaagacgaagcggggagggaggaaacgatcacaagttgcgggaggcggggacagaaaaaaacacagacgagcaagagataaaaaaactggggtggtcagaggggcgagactcatcaccagaagagggacggccgtggctgttggcgtgtgaggggggagaaaagtacaaaaaagagcataccgcacggacggggggcgcagtagtgtggtaggatcggagacagtgacaggagaacaacaagcaagaaggcatgccgtgacgccgccggggcccgctcacactctcaccgccaagcaaccatgaaagaaacaggacaacaggctgtctacgggtcggccgaacgcgcggaggagggaggaacctaggaaaggagatccgcgcgacccccccgccctgggtggcgagcaacgcacggtctggggaagaaagacaatgaaga

SEQ ID NO: 415112 - DNA, 1154 bp, Homo Sapiens
aaacaccaggggggtttcccggaccttatttaatttgcaaagggggcctctttttttcccttttaaagaaattcccctcaaccccttttggaattttataaattttggtggataattattcaaagggcaaaaaaatgtcaggggaacccaatatgatgtcgcctctttacccattctcacagcacctggtctctgtggcggggatatcgggtgcgacatcttattccaaataaaccaattgtgaaaaacgcgacaggtatttcgccatgctatttggctatctggctaaatgttctggggttctcatctagaaagggcggccatattttttgttttaaaaaggcgtgagaccatatattgttgcgagggtgggaaaaccccttccccctatatccaaatatttatccttatacagctggcaacactctctttaaaacgcattaagggcaactttttccacaaatttgttcctcctctcttctcacaccgtgggagaacaacaaatatgcgaatgtttggcgcccgggtgagacaccattatttatttaatccccctgtgtgacatctgtgcgctatcaccccctctaaaagaatctttattttcccccctggggcgcatatatttgcggcgctctgctggatcttcttaataacactgagatatttcaccactctcgcacatattttatacactcttaacattttgtgggcggaaacaccacatctacttttttgccggcgaagtgggggcgcgcccacatatttctggggggtgtcccccctcgaaaattttggcgggggcgccatcttccaccacatctcttctgtgaaaggcgaccttgttcaacaaaatctcacccaccatattccgcgctctctaaagaccacactttggcacggggggtagatatctgccccagtcttcgtggggaaaaacaacaccggggacacgcctgtattaaggggggcacactacaccattgggtggttttttggcgccccagggggggccccacacaaaacagggcaaatggtctgcgccctaataaacacactttgttgttcaaggggggtgtgcacaaggcacccccttgcaagggggggacgagccccccccacatccaaggggaccaccacattgataaaaaccgctg

SEQ ID NO: 415113 - DNA, 1016 bp, Homo Sapiens
  misc_feature (494)..(494): n is a, c, g, or t
  misc_feature (605)..(605): n is a, c, g, or t
  misc_feature (990)..(990): n is a, c, g, or t
ttttaaatccctgtgttctctcttctgagtggctgaccaaaactgcggggcttccaagggaaaccggcccccaaaaatctccctttggagaaccttgatctttcgcaaaatatgcaaagaccccggatattatacaatctcggcaatttaatttatttttcctaaacagaagtgccaccttgttggttgtcttccccagtgttatcaggggttggctactaattctcccttctggttctccgggtaccatggggcaggaaacagaatgtacctcccttgaatgtcgtgggcagctccgctgaaaaaacatgtgggcgactctcgactcaatgtgcccaagtgcccccagaccaagtgtgtgtgggggggcacgcccattatttccaggggcagtctacaaaagttttcccactcttatgtaaaacctgtggccctcatatcattcaacctgtgcacgccttttggccttgggccgtgtgccttctccacaaaancgcctcccgcggtatggccagcatgtgggggactcacttctcagcgctctccgatatatacgcgctgttgcgattatctcctctctctcctctcatgttgaccaaacccangcggtccaaaaggcgcgctctcaaggttagagacccctctttttaagacgcgggggcgccacttttttaccgccaaaaagggggggctcaataaacttcctggggggggtacaatccccccggagtttaatttctccggaactttgattgccaaagttccacttcccagagaaacctccccccaaaaaaagctcttggtccaaagggaaagccccttgggtctttttggctccccagagaggtgggagggggtcatctccaacacagctctttggggcccacgacaagtatctttcctccacagaaaattttcgggcggagcttctctcacaggtttccaacagaaagggtctcgtctctgggacgagtttcctccccccagggntgttcccaaaggcctcttctaaccct

SEQ ID NO: 415114 - DNA, 1199 bp, Homo Sapiens
aattcacccacaaaaacttggtttattattgggtgtttgtctcccacctttatcaacatttaagggggccctaaacccccacgttgaggaaaaaacccgaaattgcgccagagggtacaacccccccaatttggtggatactcttcgtgtgtgttgcacccggggtcctcttattaaaatcccctggtgggagattccttggggaaaccagcctgtagtcaccaaacgccaaaggctttaggcccctgatatacacaggggttctattgtgtcccctgtgtggtcgatatcaccaaatttagcccccctagaggtggttggcaggatagcccacaattgagaatacgccgcgtgtgtaaaaaatctggtctcttcagccatttgtatgacaaaaagagcaaacaagcctgtatacgccgagacaagtataaccactcacgatctcaacaggggatcccctggttgtgtggttgtaccaatatgtatctcttacaaggggggatttttctctcccgaatgtttacaacccacgccagtggatctctccgaaaactgcggggaggagagtgttcgtgcgaatatacaccccgcggggatgagacactaatcatctcttttaaagaccctcttatttacaaaaacacctctgtggttgctctaaaaacaacaccgtgtgctatatccacagtgctagatatgaacagcgaccagacactgtgtgtttgtcccacggggggtttagatagaagccccctcaaaaaataattcatttggccccccagtgggtgtgcggtggcgagacacactgtcagattctcagatatgtttttgtggtggtccctcacaaaaagtctaatacacgcctgagagggagagtgtcacacaaaagggctctggctttaccacagctcactctctactcttagatatgtggagtgtttctctggtgcgccccaccaatccctagggcgcaagcgttctgtccaccctcggaacaacgttgttgtgcaggtgtgtgatggtgccaccccacttgcgtgcaccaccacacagggagaactcttctgcacagtgcgaggcactggggacacaacaaaaagcagaaaggccgccccctcccacatacaatggtgggggtgggggaccaaccaacaatactcttggggcggaaacagcccccctgatatttggccctgacc

SEQ ID NO: 415115 - DNA, 895 bp, Homo Sapiens
  misc_feature (413)..(421): n is a, c, g, or t
attgtcctgagtggagagagaaaacatcgggaggaaaaaagaagtggtgggaggagaggggagcgacacaaaaacacaaaaaaacattctccctccctcttctgtgttgtttgtgggaccgtttgctgctccagaaagtaagggtagatacaagtgctgccacagagaggaagaagatgatgtgtgccccctccacacaagctgaggaagtccatgatgccccccatcaactgctgtgcagcaaaaaaaacaatagcacgtatgttgcgatgacacagaagcgcgcgctgtcccagaaaaaaaaggaggtggagcacctcttctagtggcgtcaccaccgccgcttgagtagagccacaaacgcaagagagtgtgtctcgagcaagcaaactggccactctcgtcgtgaaacnnnnnnnnncgagtggtgtgtttgaccaagcaaacatagacaacagaagggaaaacacacacccgcgcacctcgcccgccattatgcctgcgcgtgtgctgagacacacaatccgcattcgacgtcgtggccacacaccctctcacgtaattaacctccatctccatccggctgggaaattagcatgcgcgtcaacatctatctcacccaacacgaggtgtgggcggatccacaaccaacgactctaacatctctccatctgtccaccaagttcagtcgccacggccctcgcacgcaagagagcaaacacatacgacgcgagtttgggatctaacaccaaccgctaccgaacgcagccaactccatccactcatggctgtcaggcgacgctcgatcgatcaccttaccctaccgacacagacatgcatgtaccacgcagcgccacgttccctctctctatgaagaggaaaagatgtcaacgct

SEQ ID NO: 415116 - DNA, 1138 bp, Homo Sapiens
  misc_feature (61)..(97): n is a, c, g, or t
  misc_feature (654)..(664): n is a, c, g, or t
  misc_feature (912)..(923): n is a, c, g, or t
gaaaatgtgaggaggagggtgttttaaaaccaccacaaaaaaaaggccccccaccacaacnnnnnnnnnnnnnnnnnnnnnnnnnnnnnnnnnnnnncagaacgagcgcgcgagcaacaaaaaagaagccgaacggggccccaccagacaagatccaggtggggtgtgcggccctccagcagcagaaaagaagacaagaagaagaatcatgtgtggcgtgtgaagaatttcacacacgacgcatggatcgtcccgctaccaaacagggagaaacaaaaagaacactacatacacaccacacacaaaaaaattgatcggcggcggagagtgataatactgaatagtctttgtgtggctgacatcacagaaacaacaaaaagtattgtcagagaatgacgtgctcttgatacaccccccccttatcattcatgtggattatggaaataataatagagaagaaaataatatcatagcggagcccaaaacagaaaaacaatttaatttctcgccccaacatatatattatgtggtgaagaaggaagacgatcccaccctcgttgcacgcagcagcgtagagtggaggagcacgaggtggggaaaaacaaaaaaggacggagcacaacgatgagacgaaagcaacataatagtgaaagnnnnnnnnnnntggccacccacgcaccaccatcaatacaaaatggagagcgaggtggggcgggccaccaatacaacattgtagagcgaaagaagatgtggggtgtgttcacaaacacacaaaaaccacaagatgcgccctatactaccaaacgaacaaggaggaactaatactctaacgagaagaaaaaaggatgcacacacaagctgtgcaccaacaatatgtaaaaaagagggggagagcataaattgccccgccgnnnnnnnnnnnntctcctactactacccaacagggaatatgccgacagaaacaaaatgctgcccgacagacaagaagaacctacacacaaccacgggaacaaagaggaggtgatgtgagtgggacaacaagaacaaccatcccccacggaagaattgtaactcaaaacaagacgaggaggagcaggaggaaacacacatacccacccgcaacaaccaaatacaaaaa

SEQ ID NO: 415117 - DNA, 867 bp, Homo Sapiens
attagtttttgggggaatcactggaaaaaaatcatctatgggggaaaaggagacgaacgctccccgtttccccaatggtgggcccccgaattggtggtgcagggggcacaacgggccagagaacaacggcccaggtggcaattggccccagcgctctcccccctaaaatgacaacaccttcaaaaacctgctcggcgaaatgggagagcatccactgacctcccaaaaggcaaacccgggtgaacccgccaacaaacggtacactaacacatcaaaaacaggggtccccaatagttgccatacaacagcctcctaaaagaggcacccccccggctgggggtcctctggggacattctccaaacacacgaggggggagacgcccctgaagagacccatcaccctgtaggaacaccccacgaggtataggacaggggtaaaacacccacaagggattaccccagaggagatcatacgcctgtagaaccattacaaccgagggagccccccaagcgaggagcactgaggtgtcatccacccacaattatctgacgtggagccagacatcgtggccaaacaaaacccatgtcggcgcgcgagaaggaaaaaagaggggagcaacacaggcacaacgaggaggccccaaggaggtgtcacttcacgcggggcccccagagagatgtaaaaacgccgggttaaaaaaggggccctcccatcaccactcagggaaatgaggggacaaccaccagaagcagacaaaaaacagttggcacccattgaaagtttgtttcccaaacactccccgcgcggacaacacgcatcatcaaagtacaccccccatttagaacaggtgtcaagaatggccccga

SEQ ID NO: 415118 - DNA, 683 bp, Homo Sapiens
  misc_feature (424)..(475): n is a, c, g, or t
caacaccccgtgtatgaaaacccccaccccctttttgagaaaaaaaatttttacaagaagacgcacgcacggcgcgcggggaataatctcgtgaggagtgttttttcgcggcgggagggcacctgccgaggaggggcggtgtgggaacacatgggcgaatagtaatgtagtctgtcgtggcgccccgcgcagtggtgcacccacgggttttgaaacagtacgttgttggacccccggggtagtggtggacatcgaggtgggccccccacaaagaggccgagcagacgaggaggacggacagaaggggggcccaacaccgggaaacgcgacaaaacaaaagagttccggcgcggaaaaacacattcgggtggggtcccccgcctggaagatggcagaaagagggggggagacgctgtgaaaccannnnnnnnnnnnnnnnnnnnnnnnnnnnnnnnnnnnnnnnnnnnnnnnnnnnaaaaatacatgatatccccccccgccgcggggacgacctttgcggaggggacaaacggaggggagcgtcccataaaaatccggcggggaaaggaggtgaacctggtgaaagacacaagaggggccccgaaaacagacccggagaagggaggggcgcgtggatgatacccaagaaaacacaaccgccgggggggagtaacaacacgggg

SEQ ID NO: 415119 - DNA, 977 bp, Homo Sapiens
  misc_feature (90)..(113): n is a, c, g, or t
ataagggcccagtcctttttgggaaattttgcccccttgtgggaaaaaaatttccacgttgcccggaatctcctgagcacacccccagtnnnnnnnnnnnnnnnnnnnnnnnntttgcggaaagtggccggcatcagggttgttcggaaaggggacttgaaaggggacctttggtaagctttgcatttgtggttgtggggaatacccgttagaaggggtgctgtgatccccaggacttcagggcctcttacctccgtggggggcacagagagcccttatcccattccatcctcggggaaacagccccgggaagtggggccttctccctgtgtagtgtgccctcttaagtgctcctgtgctcacatccaaggccttagtgtttccccaaagagggtgggtcttaccttgtgagggggggttcacacacgaatattttaagccccagaggggctcttctgtggggcgtctccacgtgtttggggcgacacattgttgctttcaagcctattcgtcacagcgcaactgttctctcgctgagggcccggtgttttctatctccccagtgtgtgcgcaccctgtgggggacccccctataaacccccctttcacaagggggggcgacctccctctgtgatcgcccgacgggcgctccttgtggcgcccagggggaccgctgtggtctttatgtagaccacgcgcgcgttgttttgtactcgcgggcggacagcaggggtctacaacagttggcgcgcgtgtcgccatggagggtatgtccaacagaggggcggctcgtggtgggttgtgagcccccatagagatgcgctcacctatcaaattcgcttgtgggggcgcctccctttgtttgtggacagagaaattgcgcgcggggttaaaaaccccaccccggttctattctttgaaacaattgtgcgcctctttcctcatcaattaaaagtgggtggtgtgtccactccacc

SEQ ID NO: 415120 - DNA, 546 bp, Homo Sapiens
ggggttttaaccaactccttccactcccaccgggtgtggggaaggcgccccacacacacgttggggagaagagggaaataaaagaggaaatcacactcttttcaccgggtgggttggcaccgagggttaaaaagaagaatcttttgtgtcagagaaaaacacttcgttttttacaaaaactacatagattacttcttagtacaacagcccctgctacattagtacaagaacaacaccagttgtgggaaaacacacccgactctctccattaaattgagatattttccccgagagcgaggtatactcacccaccaaaagaagcgtatcggagaagtttgtcgtgcagcactttcaaccggcatgtaagagaaaaatttttggcatgttgctgttgggcacaccaagaacgtgcacaagacatgctatttcctggcaccagcagaggggtgttgtcaccccccctgttatttttagtaacatgacacgacaagtggtggccaagtgagcaattaactcgcaagtgggagaaatctatttctccccgaa

SEQ ID NO: 415121 - DNA, 759 bp, Homo Sapiens
gacaactgctagcacccacgcccgacggtgggaggaggagcaggacaggacgacatcaaaaaactacacagagccgcgacgaccagagaaagataatgtgcaccgccaccgcaagcagtgcgaatacagccagcccccaacaaagaagaggagcaagaacaacaacaaacaagaggctggtacaagcacgtgacgcgaggcctataaaccaaaaaagagagagcgagcgcgagcccgttccagcgagtatatcgtagacaccccccaccgccgcccgcacaaccgacacagacagagcatggtgagagatcacaatgacacaccgcaccgccacgcgcgtcgaacaacacaaaaacagaccagtgtgcggctcaaacatagatcagaccaccacaaaatagaccgacagaaacacacaacacaccaccgcccacagcgctacaagagcgagcgaggagacgaacccacggccacagcacaacgataagacaaacgagtacagaagaaagacaaagcacagccgcaggagagaagaggtgaggcgaagtgacacacacaacaatgccatacaagtggaagaggaatgaaccatataacgcctactgactcccaccccacgacaccaggacggccgcgcaccacgaaagagcagaaaacaagactaggtcgagcggaggcaacaaaccccgggagcgagcagaacggcaagagctgcgcgcgggcagaaaggaacagctcctccccctccgcacacagcac

SEQ ID NO: 415122 - DNA, 421 bp, Homo Sapiens
gtaatttatatattaaatataagaaaaaatcgcgaagtcaaagaaccagcgaatgaaccaaggagaggcgagacgacagagagaccagcgaagagagcggagcgagcagaagacgcgacgcagcacgcaccaagagaagcacacacaacatgacacaggacgacgacgcacacacaaccgacaaacagagacgagactgcaagacaagagcagaaacaacaaagagcgaacacgacacaagaattcaaaacagtttgcctcaaattgacgacgcgagggaggagagaccgacgacgacaatagaaccaaccaagacacaagaacacgagaaaggaaatccatggaataataaacaacaagcggcgagaacaaacaaaccacaaagaagaaccaaaaaagaaggaccaccacagcaacctaa

SEQ ID NO: 415123 - DNA, 854 bp, Homo Sapiens
ataaacccaaaaagataaacttcttgggttaatttaattaaactctcgtaaaacaggctgggaattgggttataaaacatgtctggggagtgtatttatgttcccaggagatccatcgggtaattgaacccgcctgtaataacaagatggttgcctctttaaaaaatttgatcaaaaaaatagtcttattcttttaggtcagaacaaatatagggcccattctcaatttccagagatctgcatagtgttctcgcattaatgcatcggcggggagcattctcgcacagtcgtcggagtgattgggaaggcgcccctagtgttattgagggcagtgaaggccttgtgtgccctatttatgtgtggcaagagagcccctcgaagttttctccgtgtacacaacgcgggaggggactctctttctctttgagagagaagatcttgtggaacaggcgagcaggatgcgaatgtgtctctcccaatcccttagaactccgcgaaggagttcccaagaagtgtggcgataatttcgacaaggaggggtgataaccactgagagggcgatgtgttgtgcaaacccccggctctctaagaaacagtggggtgtttcaaacatgctctgcgctagagaggcgtgcgcgggcgtgggatgatttgaaggcgggaacacaaaaatgccagcgtggtcgaaggatacctcgcgggggccatctcgccctgggcacttccggatgattcaccaagagttctcgagggccgagatgaggtctcttgaaaaaacatgaggtgccacgagggggggttcctccgtgaacacagccggtggtgagttgacctctttatttatgcaagcccca

SEQ ID NO: 415124 - DNA, 803 bp, Homo Sapiens
  misc_feature (486)..(486): n is a, c, g, or t
cccccctacaggattttatttttaaaaaatggcccatgtctacttcggtccaaatttccacggaattttccatctcctgtgagtaattttccaaggtttgaaagtgtgtggaaatcccccaaatttcccgggaggctctcacagattctctccacatagagtctatctagataccagcgggtatcataaacaaaatttggctcgacagaaactatcacctcggggagtaattggggagaacattttgccaggttctatgagagtggaaacctcaatttctcagacacaccttcttattcttctgcgcccatgactctcaagacacgtgttattgagaatccatcttgtccctcctatgaaggtttcgacaactgtggacacatcacggtgatcttcgtttgctttcccccagatgttatttgggtggtcctctctgtctaccattattctccccgcctagtgataatgctgcgctgtggccaccanaagcgccccttaggcacacaaagtgttgcccctttttgcaacgagaaattctcacatgatggctttcaaaaaaatgagtgtactaagcgtgggcaggatgccccatattatgttagcgcaccatgtggttgtgttgccacgcacctattgccccacacagaagaaattaaacccctacgccgatcttttaacacattgtggcacccacacactcttgtatagcaccagttgtggacaacgacgacatccacgggcgcacaaaccccgggtgcttagagaccccccacgaaatatgtggccgtgtgggggaaaacacc

SEQ ID NO: 415125 - DNA, 131 bp, Homo Sapiens
  misc_feature (58)..(84): n is a, c, g, or t
attatgttggagaaaaaaggagggttgtttaatcttgatttgtttattttcttcactnnnnnnnnnnnnnnnnnnnnnnnnnnnccgaagagagaacaagacagacgcaggagacacacaacacgcgtgcg

SEQ ID NO: 415126 - DNA, 410 bp, Homo Sapiens
gtctatttctatggagaaaaacacagagaacctgactattggtaaaccaggaacagagtacacacaaccccgcaagccgaagacgggagcgccgcggccacgaacggcggtaaacagagcacaccgaagaagaacagaacgtacaacagagaaaaggcacaacaagcactgaccactgaacagaagacacagagagaacgaccacccagaacctagaccgatcatggagcagcacccagcagagggccgaatcagaccgaacaacagaaggaatcacaagacacgagcaccaagcctccgaaccgtgagcacgatacaaggagccaacagcacatagacaggagagagagaggcgcgaaaaatagagatgcatcgctgcaagacaagagacagaagcgaaacgaccacac

SEQ ID NO: 415127 - DNA, 608 bp, Homo Sapiens
  misc_feature (88)..(88): n is a, c, g, or t
ggggttgtgtccccgcgcgtggggtgggaaaaaatatttagatatcaaaagtagtatttataaggcaacagaagggggaagaatgtgngcatgtactgtggtggtgaacaccaataggaggagaaaattgggacttttgctaagagcgtatttttcgaagaagaagagctgagggcgagaaaagagtggtggggaaggagcgtatttattaaggggtaaaaagggtatatacccacaccgggtggggtcactaacaacacggcgggagagcagagaagatgacccctcgggatgaaggcagagagagaaactctgagtgggaggagggagcggaagaagggagagaaaacaagaaaaagtcggtgtcgccatgtggggaacacaagggtggagaacatgattgggcggggagcaatagagaaggcgcccacatacaaagaaagaggggagtacacaacaaacgaagcatcctcttatcaccatagaaaaaagagatcccaacacgggtgtgtgcgtaaaagagaggaaaccaacatcgcgagagggtactagggaggaaccacactatgtcggcgtggagaagcggtggggcacactgggcggaaaaa

SEQ ID NO: 415128 - DNA, 1287 bp, Homo Sapiens
  misc_feature (499)..(515): n is a, c, g, or t
aatatgaggaccggagcgctcccaacaaacaaacatgttaatagacaaaaagccatgctctcctcctcgctcctgcaacacaaaaaaaataacgaaagacatcctcctccacgtcgggtggtgagaccacatcacatgtagcggtggtggtggtgctgccagcatggcggggaacattatattttgttcttcttccctcgctcgttttgggaggagaatagacacacatcagaagcgtcccgccacacagaaacataagagagagggagggcgccgctcgccggagcgggggtggagtgttcggacaggacacccccgcgcgggaggtggacggaaaagaagcaagacaacgacacgcacgtgggcgcgcgcgcaccgcacaccgaagacgcttgcggcggggggagaggaaaggaacggagcacgacagaggagcgaggagggcagaccaaggaccaggaagaaagtgacttgcccgccggcgtgagtgagcacacannnnnnnnnnnnnnnnnggaggagagagaggacgggcacgagaacgataggtgctcgtccccgcgcgccggccagacaagaacagagggagagggagaggagcagacacgcacgagagtaggacggagaatgcgcggaggtggaggagagaacacaggcggacggagacacacccgaccgtcaccctcgcataagtcaacacaccccgcggcaggccaagaaacaaacaagcaacggcgggcagacggaggaaggggcaagcccgcatgtacacgccgctcagggaggagacgaagagagaggagcctcgtgaacggcaaaaaaaaggcagcgaggcgaaccaccagaggagtggcagtaccggcacaggaaaggaaaacaactgatgcggacggacagcaagggccagagaaaaatattgccagggagcacaaaagccgacagaagggagtgggcaaaacacaatgctatagctctagcaggggagccaaggaagcagcgcgacttgacacacatcagagccgcggggggttgcccaagagcacagcaccgcctgtacagccggccgacgtacaaacacgaagcgcgcgggacacgccaccacacgcctgctgctagcagaattggagggaggaagaaaacacgtgggaggcgcagcaagacaacgcggtgatgaacagagagggacacgaccaacacaacacccccacgtctgcggtgagaccaaacaagacggcgagggaaccaaccgagcggcggggggggcacacaaccaccagccgggggaga

SEQ ID NO: 415129 - DNA, 429 bp, Homo Sapiens
gaacaagcgcgctccccggcgccgactcacaaacgcgcggcagccagacacaccacacgacccacaaagtcgaggggggggagagagactccggcggggcagaaaaacagcgggagtgcgagagaaaaacaccaaagccaagcgcagggtaggagggcgtgggcgagagggaagcaaaaacacgacacgacgacagcggaagagagagacaaatgcaagagcgagagagcgcccgccacgacacgagagcgagagaagcggagcagcgaggactgcgagggaacggaacagacaaaccacccccctacaaccgagcaaaggaaaggagagggggaggagagaaggacgtcgccccgccaaagatgaacaacaaaaaccagctggaaaaaaaccaagagaagggacaaccaacaagagcagtgaggacac

SEQ ID NO: 415130 - DNA, 1180 bp, Homo Sapiens
  misc_feature (43)..(61): n is a, c, g, or t
  misc_feature (1123)..(1131): n is a, c, g, or t
gggggggaaccccccgttggggtgaaaatttttttaacacaannnnnnnnnnnnnnnnnnntctctctgtcccccaaaggggagtcgggggacccgggtggtgggaggggttcggagggttggtggcttcgcgggcctcttctgtgacggtggctactggtggcgtcctacaaaactcttgtgggccactcctctagggccctgtggggagcctcctctttttcttaccaccggttcttgttaaaagtcttgtgctcctcgtgcgcggtggcacctcctttgaaacagggcagttgcgcaccccggtggaggcctcctcttacgaagggtggcgaacaatgaggttttctggggtctttgtgcgtccacccttcggggggggtctgtgtcccaagagtgtgtgtcttggcacacacggcactaatttacttgttttgtcacccacgggtgtgtctctgtggggtgtatgccccccaattgatctctgtctgtgtgtaataagacggcgccctctggttgataagaggagcgcccctatagaaggggggcctcactccacagcagggctctctctggtggcggccagattgtgtgttgtagcaagacgccccccttgtctgtaccctcatgttagaaggacgaccagaccgcgcgtggtcttgtgtggctgcacagccccattctgtttttccgacgccaatctcttctgtggggaacaacatgtttctggtcggcggcgcccatctctgatgcgagaaggactttctctcatcaacccaacgccccgtggtgtgggtcccgggtgggtttgtatccccccacatcggctgctgtgttgcgccacacctgttcggaccagaacacagggggtgtggcacctaatcactgcttcgcgcccaagagagtctccctgtgcacgatttactctctctgtagcacgacgctccatctcgcagaggggcgaaagatcgtccccagaggtggggcgctcacaaccatctgctacttcgcagggaaacctcttgcgaccgtgttgcgtacatgtgtgtggtgtctgacccctcacacagggtgtggtgcccccgcccccctgttggtgtgttacccgcacccagacgcacannnnnnnnnatcaactacccggggatttttgtctggcgtggtggacaacacatcagct

SEQ ID NO: 415131 - DNA, 637 bp, Homo Sapiens
  misc_feature (110)..(140): n is a, c, g, or t
ggtggggagagaaaaaagattgtctctataaaaaaaatatcttctctttgctcccaccacacaaaaaaagtttatccttctcttctcttcctctactaccaccaacaacnnnnnnnnnnnnnnnnnnnnnnnnnnnnnnntgctggccatcacaaaaaataaaaacaataagtatattcttttcttctatttcatcagaaaaaatacaagaggggtgcaaacaaaaaaacatcaagataatcttactctctgtccagacggagcaggagcaagaacacaagagagagagagcactgattgagagagaagcacaacatatgctaggaggaagcccaaccatcaaaacaaaagcaggggcggcaaaatcagcaacgatccatagcaacaggccgagcgagcaaacaccataaagagtagaagtaagctccccaccacaggagcgagaagaggaggtgtggcgaggaaaaagagaaacgcgccctcacctatctctcatgtaaggagtgagaggaagtgctttctcgctcgccgcaggcatggtacgacaatatcttcatcgaagaagagggtgccgtcccacgagaacgacagggctatcttattataacagaggaaacaacacaccaactaggggagg

SEQ ID NO: 415132 - DNA, 1284 bp, Homo Sapiens
  misc_feature (74)..(92): n is a, c, g, or t
  misc_feature (980)..(988): n is a, c, g, or t
cttggacggaggagtttatttataaaccagctactttttgccgggtccacagtgggtctatactcgtggggatnnnnnnnnnnnnnnnnnnngtgggggcctctcagggagttgacctcctcaggggggggtacaaaatatgtatccaaaaattataacatcctgatggtgaacacccgccacggcgacatcaacacaatgtggggcgggggtgcgacccccactatggacctaatgggtgtggcgcagagaggcgcctcctctggaaaggggcccactggcggggtcaacaggggaacaaaccccgagcgcaggacaaagagcggggagagaaagagctaccccaaacgggagtgtctctcgccgctaagagtgctccctctaaaaaccacgagggcccggaggcgcaaaaattatcccggaagggaacacccgagtgtgcacaatagatgtggaatgccccgcacagagacccaaggggataagggcagagagacacagagagagccccggtgtgagaaccgcggaaacacgcgccggggagagatggggggtatattataccccccaccgggggggctattggggtggccccacaaagaggctagagccccctgggagcatggggaggcgcagagagtcgtgctctgagacatcccccgcgtgcgtctgttcacgaggaaaatccctggggggggccgcccttcaaagaaagcgccaccctttcccctcgtcacgattctcgaccgagagtgtgttacacctctgaaagagactattacttcgagaggaacccccccgcagagggggcagtgtagcaacaccatagggggcaaacggtgggtgtggcagcgcaacacatagctgcggcgcccggggtgataaccactgcgggggagaacccccaccgaagagaggggaagaaccaccccgcgcgcagcctggtgcagaatagagcagacgggaggagtggcgccctnnnnnnnnngggggagaggaaaaataccctccaccccgcatgagaaaatatatgagagggcgcccccgagggaggtccaccctacacagtgagagaatccccccactaggaagacaccggcgtcggcacatcggtctcaaccacaaacacagaaagcagggggctttgaggcccccccgcagcaatacccccagcgagcgtggtgtgcagacaaaagaaccccacctctttgtgagatggaacaacggggcgctccaacacactgggggcggacccctccgcataaaccaagggaggggagtgat

SEQ ID NO: 415133 - DNA, 693 bp, Homo Sapiens
gggcaaaaatgtgtggtaacacaaagttggtggttgggggtgaaaatacaaaaacccacctttcggggaaacccgggacaaaacatcgcgaacagggggcacccctgaccacatgggcccacaagtgggggacagcccaatcgcaggtaagcatctacgaccccggagagaacacatcgcgaacgggcgaaagagccggggggtttcagcccccaaatgaggtgcctgtaacccgcggggagagtgagtccacctctacacacggtgatgtcccccagaggtctctcgcgcaaggaaggggagctccaggcacacaaaaaacccatacatataatcacccccttgctggtacacacacagaaagaaaaaacgagggtcgtggggagggctcacaccacgcgtacagagagaaaaaggctcacgagagagggtatacactgtgcgcagaggagtgtggtggcaccacaggagggaacccccactatagtggtgcacagacacacaagagagagggtggtgcatccagaggggacaacaaaaacggtgcacaaaaaaagctcccacaaacatatgcacacacaagaacacaaagagggggaatgacgacgccccacactaaagtgtctccaacaaagaggcgagtgggaccacacaggggggaccacggcgggcatccaaacagggggacgagag

SEQ ID NO: 415134 - DNA, 558 bp, Homo Sapiens
gggtaagggtgtaataagatataatggctactgtggtgatataaatatcactctcatatatatattgtaataattctgagaatgttagaagacatcttgtgtggagagatgtaacacgagacctcaacatggtttattaacagaactatatacataatcttggctctatggaaggtgtagaactattctgtgttataaaattctgtattagaagcgggtgtctctcatatatataagcgctccccacagaagaaatataacaacacataatgtatatctagaaaaatatcgggcgggcaacatatttatattatacacatctcatctccaattatatatacagccccacaactcgacgagaactatatttataagtctttataaagctctacattctacaaattctaactatagcaaaagaggaaacatcccttataagcagagagccgcgtgaatatctttaccaaagattattctacccacatataagaagacacctatctcgtgtgtcccccctcgaggagagtgtgtgatatccaccacatcaaaactatcttc

SEQ ID NO: 415135 - DNA, 812 bp, Homo Sapiens
  misc_feature (196)..(220): n is a, c, g, or t
  misc_feature (311)..(391): n is a, c, g, or t
  misc_feature (469)..(484): n is a, c, g, or t
agagacacacaacacacacatagttaacaaggggggaaaaggacccccccctttttgtggagtaatatttcgttgttgtagataacaaacagtcgcgggggaaaacacacaaacaaaataatagaaatattttataaaaaagtagttatgcagagttgtacacacaaaattaacaaaacaattgatgatcataatnnnnnnnnnnnnnnnnnnnnnnnnngacatcttgtatttataaaaagagaggcggagccgcccaccttctgttgtggagagtggaggcgcaccacacgaagaaggatatcttgttnnnnnnnnnnnnnnnnnnnnnnnnnnnnnnnnnnnnnnnnnnnnnnnnnnnnnnnnnnnnnnnnnnnnnnnnnnnnnnnnnttatcatatctccatctcctctttaacagccaccccgaccgataaacaaccacacctatatatagagaaaggtggtannnnnnnnnnnnnnnnacgagacagagagaagcagggaatagacaacaagagagaggaggataataacagaccccaccacgacgagagagagtgaatatacacacacaagagagagagaggggtgatgaacaagaggaggcgagaccaacaaatcacgagggagccacaacgaggagtgcacacgccaccagagaaaggtaaccttgaccaacaaaggaaagagccaacagacggagagagcacaacgacccgacacgaaagaaagggagagcacccacactccacaaccttctcaacgaaacaaaaacgcaagccagaacaatccaacccactccacacaaag

SEQ ID NO: 415136 - DNA, 1274 bp, Homo Sapiens
  misc_feature (55)..(71): n is a, c, g, or t
  misc_feature (492)..(492): n is a, c, g, or t
  misc_feature (514)..(514): n is a, c, g, or t
gtgggaccaccaaaaaatttttttggaaggaagaaaaacgaggggaaaggatccnnnnnnnnnnnnnnnnnaatggaagagagttggccctctttttttacagaaactatagaagccggtgtgtggggcgcgctttctcggaagaatcccccccagggtggttctcaaatcgtggcccagaagtctttctataggaaagagggagcacacaaaggcaaataggcgagggagccagtggacacagggtcaggcttgagcccctcgcgtctacagcaacaagtggtgtatattctctcacacgcgagagagagccctcttaaaaaaacccctatcacgagatggggctctctcaacgagtgtgctatacataaggctcactctgtcttatcatcaccgcgctatcaaacgagggggggtgctggagatgctgagataatcatgcggggtgataaattctcgctccatctctctcgcgcgaaaaaaatgtgcgtngcaactctctctctgtgagacnctcgagagaggggatatttcatttacaagggggggtgtctctcacaacccctaatacctcctctcgtgtgtagaaccctcttcgtggagtagtggcgcgcgagattgtgagagatcctcacctccatctctcgtgggtggctccttttataagggcggcgctctgggtggtgtagactagcaccgaacaaatatatcacctctataagcgtagggagagatcatatccccgtatcacgcgcgggagaatattgagggtgctcatctatctatacgcgaggcgactgtgtataaacccgcctgtgacgacaaagaaaacaacgcggggttgtactggggagcgaccacaaatatagtgcgcgctcgccgacaaaacacccccactgtgttgctagtgtgtatttccgcctgcatacacaaagcgcgaccgagtatatatggacctcgtgtatagcagcgaaagcgggggatacacttttgtcgtgggggtgaaccacaacaccctacttttatgtgaacgagcagggcccgcgagggtcttccaaatgcggcggaaaacagtgtgttgttatataccacgcggagcgttatctcttttgctagcagaccccccatgaagtagaaaaacagttgcgggtccccgctgcgtaaatctcagaggaggagggagggtatacgtgggcctaccccataataaaccgcggtgtgaggtaattagcaacgagtgtcggtagcaggaggggggaaacactatactaaga

SEQ ID NO: 415137 - DNA, 844 bp, Homo Sapiens
  misc_feature (431)..(439): n is a, c, g, or t
  misc_feature (646)..(654): n is a, c, g, or t
ccaattttttccgtagaaaaatggtggggaaccacacgtatgtggagggtgttgtggagaaagggggtgtttaaagagcgcaaaaaatcttttgtgggtgtatgtgagaggaggaggagtgttatacaataaagatttttcaagactgggtatccaaaccgtgaggtgggggcgacaaagccgccaagggtgccaaaaaagccggagaagaaacaactccacaatacgggggcgcaaaaaggaaagcggcgcacgggactatcacccaggggagagagggggcagcgctctctttgaggaaagggagaaacaaatccttggggccaagggggcccccacatttgttcttaaagggtgagacacacaatgttatcaccaggtttgtggtggtcaaaccccacagaggtgacctaagtgcaccacccaatcannnnnnnnnccaccaaaaacccctctaaagacctgaggtctatttgtcttagccccccacactcgcgggaaaaatcccgcggacggtacacaacacggcctgggttatttagcggaacccaaacggcgtcccaacaaggggtggccccacacaaaaagggcgccaacggggagcaacaaaagacgtctcaccgtgatggtaaaaagatcggcaatnnnnnnnnngcggcggcaacaaagagacaaaaaaccccccggaagagtaggagaaaaaccacccccgcgggaagtctaaaatcacaggggggcggcaaacaaccaagcaggggtcgagtggggaccccacaacacgagggaaaacaagaagcgggcgccacacaaacaaacgaacgctcgcgttatataaaaaaccccg

SEQ ID NO: 415138 - DNA, 1023 bp, Homo Sapiens
  misc_feature (276)..(360): n is a, c, g, or t
  misc_feature (371)..(420): n is a, c, g, or t
  misc_feature (508)..(521): n is a, c, g, or t
  misc_feature (791)..(830): n is a, c, g, or t
gttcttccacgaggagtaccagaacacacaaaaccaaagaaagaaaattaggtgcatctttgtttgctcctactctcctctctcataaaaccaaccacctcacttgcttatcgtcgttctgcatccaagacaacgagacatgacaataaaaagaagaaaagacacaccccacacaagaaaagaaagagcacaccacgccgccccattatccaccacaacaaggaggcatatcgcccaagaccagcaacagagaaccataaatacgcggcacgcgcnnnnnnnnnnnnnnnnnnnnnnnnnnnnnnnnnnnnnnnnnnnnnnnnnnnnnnnnnnnnnnnnnnnnnnnnnnnnnnnnnnnnntcccacaggcnnnnnnnnnnnnnnnnnnnnnnnnnnnnnnnnnnnnnnnnnnnnnnnnnnggaccagcgacagcgacaagcgagagcgaggcgcgcgcatatacaaccaagcgaccccgagaggcgagcgacgagccagccactacannnnnnnnnnnnnnggggacacccatacaaacacagacaagaaagccgagagcagagaaaacacagaacacctgcacagacacacacaagacagagaggcggtggcgagcgctgcgcgcacacgcacacgacaacccagcacaacccccactccccaaccagcacgcgcgcggagaaaaagagaaaaaggacaccacacattacacacccactccaaaagccccacccacccgacacgcgcagccgacgcagcgccagtcgccgcccggcagtcaccgcgcagnnnnnnnnnnnnnnnnnnnnnnnnnnnnnnnnnnnnnnnnccaggacccgcccctaggaacacccaaacaaagccaccgtggcagccggcccccccaccccactcactcccaccaccacaaccgcaggcaagtaacgtagcaacaacacaacccacaaacaccgaacgaaaccacccgcaaccacagcgcccacaaacacagacaccccatctgtcactcacaccagaacaaa

SEQ ID NO: 415139 - DNA, 695 bp, Homo Sapiens
  misc_feature (97)..(160): n is a, c, g, or t
  misc_feature (374)..(415): n is a, c, g, or t
  misc_feature (481)..(618): n is a, c, g, or t
gtttgtgtttgataattaataatgaacacctcgcctgggtacacgataaacgcgataaagcggagcagcaagagacgcaaaagaagagcagaggacnnnnnnnnnnnnnnnnnnnnnnnnnnnnnnnnnnnnnnnnnnnnnnnnnnnnnnnnnnnnnnnnaaaacaacgagaaggaaaaggcacagagcgacacaacaagcaggagaagtaggacaggaacactaaggactacgaagtacaaacaacagccgcaagcacaggacgggaggaacgcgagacagaacagctaaaaagagaaaaagagacgcaaacacagagagcttcgccaaaacgagaacgaaggaagaaagggcccagaaaaaagtgaggaacnnnnnnnnnnnnnnnnnnnnnnnnnnnnnnnnnnnnnnnnnncgggcgacacacaagcggaataacaacaaaaagggcgagaaagagaaaagagcaacggcgagcggnnnnnnnnnnnnnnnnnnnnnnnnnnnnnnnnnnnnnnnnnnnnnnnnnnnnnnnnnnnnnnnnnnnnnnnnnnnnnnnnnnnnnnnnnnnnnnnnnnnnnnnnnnnnnnnnnnnnnnnnnnnnnnnnnnnnnnnnnnccaacaaacaaaagacagcaaacggaggaacaaacgtagggggaccggaaggtaacaagaatcgagaggaagcaagg

SEQ ID NO: 415140 - DNA, 1208 bp, Homo Sapiens
  misc_feature (582)..(635): n is a, c, g, or t
aaagaatggggaaaaccatttaattttcccgtcccctttttttgtccaaaaatgggtgtcctggtgttcccgggggtggtggaaagtatcatacccatcggggtagtccatcttccgcttgtgtgtgtgttgagaaaccccggggtgagaagaacccggggttatctcctcccccaacccgtctctcaacaaggtggtgggcccgggagatcaagatgtgtgtaaaccccctctctcttgaaggacagaacccccaaaaactgctgagaagatttatccaccccgcgagtgccatggggcccgcggtcgctctatattgtgggagcggtcaccgcctcaactgtccaccaaaaagaagccaaatagagagcgagagagacctgctggtcaaacagaaagcgagtggtctccgagagaggagtgagaaaagaaagagggcactgagagaggagccgccaccccacggggggtgtgggaggggtgtgccgtgtgcgccagagttgtaacacaaagccctcctctatctcgctctgcgcttgcgacgagacaataaaaacctctatgagcccacagagagggggnnnnnnnnnnnnnnnnnnnnnnnnnnnnnnnnnnnnnnnnnnnnnnnnnnnnnnatatgctgtgtgtgttcttataaggagagaagagcagaaaagagtgcgcccatcctactctactgcgagcggggcgcgaggtcctataacggggggcgcacacgcgttggagaggagagggacagcgccgaggcacgccaccacttgtggggagacgacacacccccgccgcgctgagacaaagagggtagtgatgcccctctgttgagaaagaaaaatatcctctcgccacaggataagagcgccctttgtgaagtgttgacgtgcgcgctatcatatggggtgtatcaccccaccgaggaggggtgttgtataccaaaaaaatcttccgcgaaaagaagatgggagctcccccctttattgtcgccaagaaaactacaatcttctctcgcccaacaaaagactctacgctgggcggtcctcccacgagaggtgtcttctccaacggcggacattctacctgttggagaggcaagcacttgatgcgaacaacaacgaaccccacccatacctacattacgcaggggggcgagagcaacaacaggacccatgagaagaatggatctacccgac

SEQ ID NO: 415141 - DNA, 860 bp, Homo Sapiens
  misc_feature (481)..(481): n is a, c, g, or t
ggggcccaaccaagatgggtccccgccccttttggttggatttcgggaaacccaaagaggcgcctgcaaatctcggggggggtctcgccgtgcccatggtgtggacacgcccaaaatctccgggggagggggatgtgccaatacgtggctacaacaattaagggagaaaaagagccccaagacgggaaaacttgtgatttggggtgttaacactcaaggggcatctcttcagtgcctttcagtctaccgccgtctcctttcgggccaaaaagcccgtggcctctcggcgcgccggtgtctctcaacacttaactcttagcgcccctggtctgagcgtgtgccgtctggagagtgtatggtcttgttttcttctccgtggggtggtgtcctctcgggcgcagagggagggggcttccttcacagagcgccttcgtgagaaggtattgtcttggagacgctctcccgggtgtgtggcaccccngcgctagacgtgcggagacaaacacccaccgtgggagatctctgtggggcccaaggggttgtgggggttggggctctcctctctgtgagagagcggcccctgtgggagatctccccatctattataaagagccatatttgtggtgtcccgccctagtgggcttctgatataggaacacccacccccgggccgcagtagttgctctcacatatgtgtgttcgcaaacataacacaggggggggcgcgcctcttctccctactcccagaactatcatccatgtgtgataagtgtttagcacaacacctttgcgtattatgtattggtgtctccccccgaggagcacaaaatatctctctcgaaaataatatccctcccgag

SEQ ID NO: 415142 - DNA, 1075 bp, Homo Sapiens
  misc_feature (606)..(614): n is a, c, g, or t
  misc_feature (724)..(732): n is a, c, g, or t
  misc_feature (1006)..(1014): n is a, c, g, or t
cacaaaaagggggttgtatataaaaatgtggtacaagagggggctggggggaaaaagagggggccgtgggcgcgcagagtgagccccccacgcccgaccagcgggggaaggagccccgtctcttggagggggcgccgccgcggaagaagacgcacgccgcgccaatgtcgccagagacaagaagagggcttcagcgggtaaactgatgagaaaaaatctcgtcggaggggggggagataaaaacaagcttcgggaccacgcgggactcgcccaggggggccccctccccgccgtgagagactctcccacagagtagaggggtctgacagagtcagtgccgagaaagaccccgtgaggagagggagaggtggagacggcggatgtagtggacagccacgcgcaccgagtgggaggggggcggcacaagagagagagagtactctgcgcgaggaggcaagcccaccggtgatctgtactaaccacacacacaaaggacacggcagcgagagggagagagtatgggcgcgcgcccacactgtcacagtgcggcgaggacgagcgacccaaccaggagtctatactaaaaaacgcgcggggtgggggacnnnnnnnnncaatgggtcgcgccccaacacctatcgtgtaatgagagaaaaacaaacaacacaacccccgcgataataatgaaaagggtagggcaagagccagcggtgggagatgggannnnnnnnncgcccatcacctacaggcaggagaagctagagcggagtacgagtcgtatacgagagcggtcggctatgtgtggagcacaccccccacagggcgggtggggcacactacactcctgtgagggagcgagcgagatagagggggccgtccaagacggagacgcacgcccccccactgtggcatgggagggaagcgcaacgtgaatacagcaggcgcaacgcagtgcgcgggaaggaaccaaccataaaggagggaggtgcccccacaaagagaagannnnnnnnnacagaacacaattggctcggacgcccgcgcgacccgccgaatctcgtgtggagcgacaaca

SEQ ID NO: 415143 - DNA, 534 bp, Homo Sapiens
  misc_feature (90)..(98): n is a, c, g, or t
atagctcagatgtagacaccaaacacgaccagaagaaaaggaagaaaaaaccgagctcccaaaaaaaagcaggcaacagacccacgaacnnnnnnnnngaggatgagaagaagatcacccggcaggcaggtaccgcgcgtacgaagaagcagggcgggggaccagaaatcaccggcgcgcggcggatagaaagcacacgcgacaaacaagtcaatccaccgcccacggcactgcaagacacgtaagacaacagacgcctcagcagaaatagaatcgagggtgagggcagtacaaaaagagagaggggaggggggctgcaccagggagaggcgggggagccggtcacccagccagaacaaggtggcgtgcgaccaccaccgcacccatcaagcgtgggggctcagaagagcacgcgaggcgggacgagcaccaagaccaccgacagtctttggcggaaccaacaaagaaaaagaagtgggagcggcacagaataagaggggcgtaaaaacagaagcgcgaacaccgcacggaagc

SEQ ID NO: 415144 - DNA, 781 bp, Homo Sapiens
  misc_feature (68)..(128): n is a, c, g, or t
gtgtaaaaggattgcgaattgtgagtgtattgtaataatctgagggaagctattataagcacacaccnnnnnnnnnnnnnnnnnnnnnnnnnnnnnnnnnnnnnnnnnnnnnnnnnnnnnnnnnnnnncgatgagcgtgaagagagaacaggaagagacaggacaggtgagaacgaaaaccaacgacacacctagacgacaaatcgcgaagaggtcacaaagagagaaagatcaagaagatgacacgtcggcaatagggagaacacgccatgaggaggaagtcggagacggcaggacagagagtgggctacaacgaggagactcgtgagcgcgagggcacaggtgcccaagcagaagaagagagagacgtcagcggagggaaggaggactggcgcagacagcaccgaaacccagacaacagagcaagcgcgggagaacgaaacgcaacaagaagcggcaaccaacgcgggcgcgccaagaggaagcgctaaacaacagaagggaaacaacgaaacactggagccaaccacccagcactcagactcagcaaaacatggaacaacacactgaaaggcgaggatcgcgaatgcaccaggatgcgagacacccagaatgaaacggacaaagaaacaacagaggacgaacgccggagcaccagccagaacgaaaccaaccggaccccctagacaccaacagccaggcgacaccacaggagaacgaaccacagaaaaacaagaacagaacacaaaaaagagctccacaaataagcaacaaccaccac

SEQ ID NO: 415145 - DNA, 814 bp, Homo Sapiens
  misc_feature (123)..(161): n is a, c, g, or t
aaataattcaacaccaagcgtatggccatcagaactttggcaggttacgtaacatttgtcaaacactgtggacttctagccatttcatacatttttaagatctggtcgtatacattgggggtnnnnnnnnnnnnnnnnnnnnnnnnnnnnnnnnnnnnnnntttgtcagcaattacacatatatgctatctagagcccatttactctatgtcagtcttatggcttcttggtgcatcatactgtggcaaacgctaaagttagatcatcactttatcatatccgagtcttaattctggcttagcaaagttaacacacaagaaagaaccaagtgtttaaaaaaaatcttcggtggcatgttacagggagtcacccttcagcatgaggtgagaaacacacattacaaatgtctctaaattacaaggtcttaatacaaagacttcaagacccattaacatatcttagtttctgtaataaagaagtcacccaaatttcaacgtctagaggtttagaaagctatgatctataaactatagcaggctcctctgctatacataattttacatcgctaattttgtaaacatatttaccaactaaatcaacagtggcttttagaacattctagaaaacaccaaattcaagaaattacacaaaatcttatagccaaaacgtcaagaaaactaattactaaacacacaattaaggagaatgtaaggacttttaaaagatatgtagagtaaactcaaactatcttccaagttccaatcacccatcatctgtccccacgaatctacatcacatccttaattcctgcaag

SEQ ID NO: 415146 - DNA, 925 bp, Homo Sapiens
tatgggctagacatcgaggcatttataaccgggcagattcagtccctgaccgcaaggcacttacagtctagttaggggaagggacgacacaaatgtacaagaaagtattgtgcgaaacagtcaaacactccatgcagatgttatagttgtgctacgggagcccagtggagaaggcggacgtgatcaattttgggtgaagacaagaatgtggcagaagcgcttcacaaaagataatggtgtctgagcagggccttctaactgggagtgccataagagttctctgtgcagatggattgagggaaactttcaggctgagcgaaatatctcaagcagaacatgtagcaggtctgaaagacacagaggcaggaggtgccgggggccatcggacatcatgctgaagaggcacagggatacttgagagctagaggcagcccttgggatctgcaccatatacattaccacgaggttctgctcctagactcctagacccatcgcgatagtcagggaaaggggaattgccgtaaagtaacagaagggaaggacttataagggtaggggcgatattacgcaaaagcaagaatatttccaacgacgagacgagaagacaagaacaatcatagtgccttcaacttggcaggaatgccagggtgtagggcacaagagcacaagatccgagaagagcctgggactgtaaaagacacgaatccgcattaggaagcccaggcgaagaaaggcacgtagacaactagcgcgtgacggatgtttaccgcgtagagaaaagtgtttattaggtaacaagaggaggaaactccaagagagggcgtacactcgtaagggacaagttaccacttggttcaaataggaatcaccgagaaatatacgacagttgggatgagacttcacaaaggggaaaagcaaagaagaa

SEQ ID NO: 415147 - DNA, 1248 bp, Homo Sapiens
aaatcacggcagaaaggcgaaggggaagcaaggcacgtttctggccttggatggagccaggagatgacagagcagaagtgaagcaggaggtgctgacatgctatctaaacgaccagatcccatgagcactcactcactatcacgagaccagcctgcccatgggccctcccctaaacgctcctgagtgcaacttatcagatgcttgcagagggcagagaaaccagaaacgcagaggagaggcctggtgggactggtgctgggattccaagcagggtacggcggtgatgctaggtggtgggggaaagtgcaaggtagccctgaaaggggcctgctgggctgcaggagactgggacaaagcaccatgcactcactcccggtcgccccattctcccccagcacccatgcaagagaggccaagctagagggctgagagctggcggagggggtccatgccaggactgcaatgccaccggcagtgtaggacggactcgctgggtggtgatgtggtagggtcatgtaacagcttgctccatgaaaggacgccagaatccgagagcttgctactgaggggccctccctcccggtgacccatgcacagagcctggaggacaggcgccatggatagatggctagccgaggacgggacacacagagttacgactggcggcaacgacaatagagaaggatggaggaaaatgaccgaattatgctggcgttgtacgcagggcacctgagagcaagggagtcgagtgaggatcccgagggggtatatccggttagagatggagaaatgaatggaggccctgacagttaagattctcaagccagagtggagacccacggtgtgatcccatcgggcaaggaaacttagatggaaaaagggctccaggaccctcggaacggggcggcaataaccacaggaggatagcggaatgcaggccgagagaccaggggacgagcgcagagaaaagggcgagccacacagacgcgccagggaggtcgcggaagggaaagggacacgaaaaagggcaaacaacaggagtaaacaagaaaaagaagggagagagagagcgaagacagacaagggacagggaacaagagagcccggaagagataacaaaggcacaacaagcaaggggaacacaggagcgtggagcaacagagagagccgacaacgaaggaacaagagaaacaatacataagacgacagaagagacgggaatgagcacatggtaaggagagcaaaag

SEQ ID NO: 415148 - DNA, 760 bp, Homo Sapiens
  misc_feature (323)..(348): n is a, c, g, or t
tatctacaatattttcacgttcatgcatcacattcgttataccgtacattgactatatacacattacagaatacactaagcgaacttggttgctcactatcacaatccagacgggcattgtgcctagggctacgttgtatcatgtccgaaacactccagagtaaacttcgagcttgctctttgatcggctcggcgtatccttgatgtatccacatttgaccagtgacagcactgacacagaaaactagcgagggcccctatctaatttaccggattgttacgaacatcacgtttgagattcttagggaaagtgtctgttgtgnnnnnnnnnnnnnnnnnnnnnnnnnnaaacctgctgcaaaataaactgaatggaaaggggcttgagactagtaagggtaggagtctgtcgggcgtcagtacctagacttgaggttgcagctagaccgctaaccaggcctcgttcaagtaaactagtagataagtagttgataatgagaagaaggaagtaacagcacgtacgtagacgaaatgcaggaatgatgcagaaactagcgttaaggaacagaagatgcgagaagtgtagggacgagggtaaacgaggggacacacgacagaaaagaagcaatgagtggaagagacggatagaggaaggggatccaaaaggccggacagaagcgacgttgggaggacatgccgaaggaaaaaaatggaagaaagatgaaagaaagaggaccgagagaacaacagagaagggtgg

SEQ ID NO: 415149 - DNA, 1330 bp, Homo Sapiens
ctctgaatcctggcagtatgtatgctagacataagtgatatttatacaaatactgttgcgcatacgaggtataatgacttatatttagccacagggatagtatagtgacaaagaatgagagttagttatatgtataatccatttcgttcacgtactaatctagagaaaacagtccttaatggataagtgattactctaaaacatgacagcccttaacactcatggacagaagtcactatgagaagaaagtccatccctcagatgcgtcgtcatcttctgattataacacgctgtgctgtagcccgtgtacatgggcttgtcctgatacttccagctataacagctttaaaatcagccagcatttcgcgttcctgaagaagaagatgaaccggagtatactatcaaacatattgcactcgtattatatctggcttgacaaactgtacatctgtgacttttatcatcgtgaaggaacaggccagagggttaactcctatgggccagggcacaggttctataaggagaatgacatgtgtcagacttgtgtttccagactacactgtagctagtacaagtggggatcacaactggagcaagagagagacaagagacccagaaacatgtaacagagataaagctccattacactgacatgattgattccagagtcactatggagaagttttccagtgaacagcaatgggagaaaggggaaactcattactaatctaacgatagtacgactaggtcttggagggataacaaccgtgaactagagaccccttggaactaaaagaggcaatgtggggaaatagagcgaggtacacaaaagaatatgttaatgtgaagtgagaccaatatacgattgcaaagaccagagagaaatgatagcttaggattaattgccccatatttagaacagcaagatatgtgaggaaagaaggagatagtgaaagaaaggtcgcccagatatatagaaagaataagagaactaaagaaggaaaggaagatacatatgaccaaagcaccgccggaggcaacatcaatgggtagcaaacccaccgcgggaagcatgagccaaatgtaacaggaagaggacaagtcatacaggacaagccagagatcggcgaacataaagaccagccgcataaaatatcagtgaaaaaaaccacaattcccggtggtacgtaaatagggcaacggtaaagcgtaacacaacaagagcacgcaggaagggcatagctacacgagggaaacactggacgaccacacacgggagtacagagaagaagacaaagaaggcgagcagacaaccgctgaagccagagga

SEQ ID NO: 415150 - DNA, 1161 bp, Homo Sapiens
ccccaatattgaggctctctccctatctactgcctattcagcattctttatctaaccctccttcctccttctacttcctattactatcctacccctggaccagcagtaccccaatggtccacgccctcagatgttggaggcgtgtgctgagcacccaagcatagtggaactgagcccctctccagcccttctccagtccctgagcaggacacagggtacttcagggtgacactcacgagagcttctgcagttgcctccgtagcgctgttgaggcaagatccccacctccaacggtgcaggaggaaagaggggcacactcaggcataccctaggacgaagaacagagacagtcaggcagtctggcgctcattctgggcagggctccagtggtaggcggtaatggtgctgatcgtggtcagtgcacgtgtccagttgcccggtacagccgtatatgtgggcagcgtcgcctgctgccttgccacaacagatgcgagggatcccccgcgattgcctgcagcagatccgcgtcaggttggcgaggggagccgcggcatgcactggtcgacaggagggatgaccgggcgaaggtcacgcgcgtaacggtgtcccggacgcaccgaattgtctatgcgtccatcgggtgcacctgtggatccccaagtatggggggacgcacgggccttcacggaaatataaagctcgcccggccatggtatgaaccgaagacaccagtacaggtcgaccgagtcgctagacggttcgagcggtttggtcagtgcgtcccgtagtttatccaagcatgagtgtcggcacgccccaccagggttacatatggccaaggagggacgatctgtagcgagaaagcgtcgcaaagtcggtagaccttcgtgagcccttgtaacggaaggactgggggaggcatccccaagagggccccggcagtttgaacttgttggtgtggcgagtctgttttccccctgtttgggagtcccactgcgtcccggggggtcggagccggtggccgaggcgtggtgcgccgtgcggggacgatagtcagcggtgccctcaatggggtgggccagtggcttccttggccgcgccatgttagacccggcgtacgctcgggggcgccgtgtgagtgcgaagccttggcgccgggcc

SEQ ID NO: 415151 - DNA, 1080 bp, Homo Sapiens
tattagaccatcgatgatataactataagcactttaaatacttatattccctcaaaacgacatcattttagtacactacatatgattaagtacacatgaaaatggtactcaaaagaatttatatcgcacagctgcttcttgctcagacctatacattatataaccaatgaataatccagtttgcaccacaacatatataatgaacgctcggaccgtagacacaacatgatggaaatggtggtagttctcgggcactttcggcttttcatttgatgcgcatactttcgctgcactaagttatctatgtccctctttactatgttgcaggtgctctttgatgtcaatgaagtgctgtgtttgtctcatagacgcctccagcagagccagggtgctgcattccactgaccagtctgacggtttcactcactggaatcagtatcctttcacttatacttgtctcagtaatctacatgctgagttgtcacaacagtatccagttcttgtctgagcttatctgcccagtgcatagcccaggcagttccttgctcctctttgagagatttcctctgtttaacgaagtagacatatcttctctgttcatcaagaatcatatctagactgcccggttcatgctgcttgatcttcatagatgagatacggatgtctgtcctatcaaagactttgctcttagactctcgatgctcctacacatctcatacatatttcctctcgcaggctgcccttggtaggtcggggctggcccttctggtaattacctacttgggctaagattccacatgtctgtaagaaaggtgcatcggaattcctccgtgatacctctctttctttcccttttccagagaatttcctatatactggagtgggactgactcctattaccaaaggttcagatccgacttgggagacggtaatgacaaaggaacgggacaactattggttctccttgttaggaccaccaggtttgacgcctgataatacgaaatttcgcttgatgacagggagtaacaccatatttgtccacgctgaagaccccaaaatttcaaatacatatgaacacgg

SEQ ID NO: 415152 - DNA, 893 bp, Homo Sapiens
gatggagtctaaggagagaaaaacttagcagggcagagtaaaggggggacaaatttagggaaaatccacgtggcccaaaatcccagttatccctaccgacagtccagcccttgtgcagcaggagctgaataattagatcacgttatgtacaaggagtttttgaaaaataacatcaaatcacaatcacagctgactttgcgttactctttgacgcctccgtgagatctaccgtaaatgtctgtcacttcgttgaccagtcacgtgcactcttcacaaatcactgactatcagagctctccttatggcttcacgcactgtgtcaccagtctaggaggtttccaatggagatgtgaacacggaaggattaaaggacgatgagagcttgcattcaaggaggccacaatatggactccaatagttgttccaagtccaagagacatccgagacgtagagatagtgtcagtaagcatccctatgaggacaacgacgaagagaggttggggacagggggcaggaagaacatggccgcatagcgctaagatgcgcgttccagggacgtagtaatgggaaaccacgtagagacaaattttcaaagcgaaacaggtgccaaagatctacgaacaacaagcgaagccccatctagtcacaaccatctcacaactttttgaacacaaccagaataaaaaaccccaccccagaaataaaatacccaaaccatatacgcatgaaagagcggcagtacaagtcaagacaccttgcttcgactacctagctaacacacacaccaaatgagatacagtgatatgaaaacaagatttaactaaaagaactaacacgtacaaacacaagaacaaacacctaacaccacaaattcacaaagcgaagagtaaaaa

SEQ ID NO: 415153 - DNA, 1164 bp, Homo Sapiens
aatacgtacaggacgtatcattcatttactgtttttccttttaccctatatattagttatttatagcttgtgtaacaaataacccgcaaagcttagtggcttacacgcaagtacttgtcatcttacactagtttctgagtcaggatatccaggagtggctaagctcaggtaggtcctacctactgggtctactcatgactgttgtagtcagccaaaggcttgaccgaggttgaaggatctacttccacacgtgactcactccgtggcatgccggtcaggaggctacacaacagttcctggacacactggatctctccataggctgcttgagtgtcctgaaaacacggaagcaggcgttccccaggctccaagccccgaaaatgaatgaaaaagagacccggcaaaggaagatgcagtgacctattcatgacctagcctctgaagtcaatactgtcactgtctgtctctgatactatcgaagcagtcactaagcctagtactacactacacaggggaggcggaatctagagtccacgctcttccagggaggacatatcattgaatctgtgaacatactcttcgcaacttaccatacctagtttccagctacttctacaacattcgacgcattattgcgttacgtaccccatctcgttacgcgcccgacctagcaatcataacatacacatacaatgtcaactccgctgacaccctgctgcacgagttagggaagcaatgcgcgagctatacccctatccacatcgaagtcacacacatctctcagcgcgaccacaggcatcacaacagacgccactagcgcccaccgggagaaataaggccccgcagtcctaacatgcaagaccccagtacggcggaccaccggtagaacacatcaccaaccaaaccacctacgcggcataaaatcgccccatgcaactgaacacacatgttgcccgcatgcacagaaccgccctagcagacccgcacagacatgcccacggtgcacacaaacgtcacacagggggcccaccacgccgcggtcgacacatccggacagcgacagcaaggtaccatatacacaacgccagggccactcaccaggaaaggccccgagggccccccgcccgcgacaagcgacgcgcagaagacagcacgccatcccca

SEQ ID NO: 415154 - DNA, 1087 bp, Homo Sapiens
  misc_feature (116)..(130): n is a, c, g, or t
  misc_feature (239)..(539): n is a, c, g, or t
tttgtttagaaagcttaaacaaacatttgaatgcttccattatacttagacacattttctcagtttccctttattttatgtgaaaaatattcccattttagatggaattttgtatnnnnnnnnnnnnnnngactctcattgctaatgtttcaaagtaatccatattacacttaattatctactgcatgattgtcttttgtgattgaaatgctgaatactaaaagcaatcaatattaagnnnnnnnnnnnnnnnnnnnnnnnnnnnnnnnnnnnnnnnnnnnnnnnnnnnnnnnnnnnnnnnnnnnnnnnnnnnnnnnnnnnnnnnnnnnnnnnnnnnnnnnnnnnnnnnnnnnnnnnnnnnnnnnnnnnnnnnnnnnnnnnnnnnnnnnnnnnnnnnnnnnnnnnnnnnnnnnnnnnnnnnnnnnnnnnnnnnnnnnnnnnnnnnnnnnnnnnnnnnnnnnnnnnnnnnnnnnnnnnnnnnnnnnnnnnnnnnnnnnnnnnnnnnnnnnnnnnnnnnnnnnnnnnnnnnnnnnnnnnnnttaagcaaagcaaattagactaaatgcattctggaactcagacatggctacgtgaaacatatcatacacttgttccaaatgatagtatgttaagtacatatctagcagttacttatttttaaatgcactctttagagcctgggtatggtggatcacagactatgaatcccagatactgaggggaggccgaggataggaggaacaccttgaggcgcgagaagtaggagaaccagacgcaggagacacacgatgggcgaggaccgcggcgtgaaggcagaacacatcgccaaaaaaggcgccgggacatgggagggggcaacgtgctgaagaatagccagggcatcacgtccagggcagaggctgaaagtcgggaacgcaagggccgagcggttggaaagggggcgaagaggaggccagagaactgggggcgaacggagacccgcgaaggggggcatcggcgaaatgggcagcgcgcagcacaaagagacagaggcagaacttagaaggtgcaccgcgagggagcgagccatgcggaacccgaaagacgc

SEQ ID NO: 415155 - DNA, 809 bp, Homo Sapiens
taaagacatacaacaacagtggaacccttcatcattctagtgtacaacacggatagaatgtccgttggttccatcttcggttaagtccacggttctcataataatgtccattatattcactgagtggcaatgctacagtacagagctggcgaaatgccatgcttatacacactagggggtacggggtggaggacaggagtggcacgaaagggatggggtaggggtgccatatggactactatacagagtaatctgaaagatccttaataaagtagtaccgattaccgacagacagctgctgtcactagtgcgcattatcacaagtggcaatcgctgaagattatcagagcaaggaggagattcgagaatacttcacacagggccaagtgttacaagagacgaaatagtgcaaagcaggtacaactgatgcagatcctagcaaacgcctgggcctccaaccggacccaagaacgcagggcagagcgggaggctaacgcggcaccgcgcttcccaccagtcaaccccagcatcccgtggcttgctctttccccaagatagtgggcaaaccgcaaggcggacgcagcccacttgcgatattggcgccgcaagaactcgagcgaccccttcgtaccgtccaccggagacaggaaaacagaaaagacagaaaaacactcaggggaaaaaggcaccaaccggctgaaaatggccagggcagtccagaaccgaaggacacaagagccacaacacaagcataagaaaaggccagagccccccttcccctaggacgggaacctctggggggcactgca

SEQ ID NO: 415156 - DNA, 622 bp, Homo Sapiens
aagtaccagcatttccccttgctcttatatagagatcaggacgattgaacacgagataagctgactatatacagacacagtatgtggtctagctattattttaaaaacacttttgtctttttttactattaaactatcccctttcttaaaacacaacctacatatactggaaaaacaaaaaattactaataaaataataaaccatgaactaacgttgagctacccgtagatctatacttttggagaagtgggaggtgggacatcctgaggatcgaccacacgcacttgacctctgacgtccgtcctcagccttcagagtaatcggactcgttccctacgtgcccccccattgaagatgcggcgactgggaaagagaccaggtgggctatgaagggtcgtctgtgaaactagccacgaagggcttgcggagaatagtggggccgcccgggttgggacagatgaggaaagcgatacgatgagtgaaacctcggtggaccaggtggcgaagaatcacgaagcgtatgcctcaagcgaaacagggaaaaagggggaccaaccgaagacgctacgacaggatgacagatagcagaagaacccgggcaagaaagaggggacagatggg

SEQ ID NO: 415157 - DNA, 565 bp, Homo Sapiens
acgcgcggatcaactggcccgcggggccttgcgcgcgcactccggcggcttggggtgcagccctagtcgggcgtcggacgtccctctcgccgcccactgctatctgcaccgcatgccgcggtgaacgctcacagcgctccgcttggcacggtgggcccgtttcccctccgtccgcctcgggcgtgcccatcccccggggctcaccacgtccgtgcggtcccaaccgttcgcgttactcccgcgggggacactgccgcggggagccggggttacgccaggacccgccccactaccaccggtcaccaaagcggtcaacgtagcagtagataccctcgcccccacccctaaaagtgaggggccccataaagctgaggacgagcaaagcgtggaccaacccacgcggccggacagagtccgcgccgacccagagacacggcaggagccgatagcagcctcaggagctcccgcggaaggcctagggaatccgagagaccccgaggcgatccatctacacagaaggtctcaaaaaccagcccctgcaaaagggccgctcaacacaggccga

SEQ ID NO: 415158 - DNA, 931 bp, Homo Sapiens
gctggaccttcccggggtggactgggtgggcggcggctcttcccaggtggaccaggtggtgcggctggctccgtgggagcggtcgcctggaccttcccggggtggaccgggtgggtggccggctcttcccccggtggacagggtgggcgccggctccgcgggacggtcacctgaagccaggcccggactgcacacctgcttcttcgcatcaaagccacgaagaggcgtccaagaaaaggcgttgcagcccagaggcaagaacagtcagagtcgccaagagcaggaacgaggacggggcggagcagcgcctatgccaggaagggggtcatggggatcagcgaaggccaagagaggaagagagaacatctggggaaaagaagagctggggtgggcctgactggtgctgactcacacccctgagccctgcttagaagtcaggggcatctgcctgctttgactttggaggctcctcccacacccaaactgccggcacatgacgtgcagctgggtggactgggcatggatgtctcacacctgagctgcacagaccagaggaagccacggctcaagggcccaaggtcatttctgcgcagcccgcacggccgggggcttttcctctggggatcagttggcccaaggtctcttctggagcatgctcagggacttgctgtgcctggaaggccagggcagctgatttctcctggtgccatggcacttttctttgcttccagaggcattcactgggacccctgtaatttctctgggaccctttttgaatctgagggtcttcttcttggattgcggaggttgatggaggcagcgctgtgggccttagggaccttctgtgttccagggactggatccttccaggatggtggcgttctcctgttcaggggcttcagggctcctccatttcagaaggggcatatcc

SEQ ID NO: 415159 - DNA, 821 bp, Homo Sapiens
cagccaggaggaatgggcatgcttgtgcagagcctcagtgtagagtatcccggggaggctggggctgtagtggtgccagcagtctgggccagagtccagctcagcaactccgggttacatgtgcagcccagtgtgggcctagccacctggcagctgcactcagagtgccacatgtgtcctggctgagctcatctgcctgcctgctgggtggagaaagctggaaggaggagaggcagatctggtggagtggcatgcgatgtgtcccgtggcacccccctggccagcagtgcacccttccgttgtcctgagctgggttgccacctgctccttttcctggtgattccctggacaccctccaagggaaccaaggggaacatgctctgggtccagctgccccagtgaatggactgtgcgccccttccccacatggggtcaagtatcccttccaggcaacagccgtttccttgggcaccagcctgcatgcccagtgctgatgcagggatgtggccatgaattgactctgggaaagagtcattcttagcaatggacttttgtcagggtccaaggaaaggagttggccagccagacccgacccgccttgcaggagggcacgttcgtcatcccgggaactgtgccccatcagtgagccggagggctgtcaggcatctttgtgaaccgggtgctggggtttggccggaggcaacaattgcggggactacggctggtacccatgggctcgcccaagtggactggcttgctgaagcaaatggggaaggccgtcattgaaaaattcacgcttaaggggcagttcaaatagaaca

SEQ ID NO: 415160 - DNA, 1335 bp, Homo Sapiens
cagaaaaaggagtgatgggaattctgaggctctccccggccttgtgaaaaccctggaagcggctgcacctccctcctgcctgcacggatttgagcgcggccccgacgtcctggcgtcctgatctggcctgcggagtcccccgctgggctgctgcacttccagcctgctgacccctgcccctgcaagcccctgtggtcatgatcctgcctgagtattgaatgctgctctgtggcttttcctttctgtcgtgatgtgatgcaccgcatctgacgcgccctggaccattggggctgccatgtgtgtggcagcgaatggtggcggaaaacgtgggtcaggtcgagcgtacccaggtccctgacgtaagcgcccctgtcacccgccgagaccctgacacagggctgccctgacggggaaggcccctggggacagggacgaacgggcctggggaaaacaggcgcgtggggccaataggacgaagcggggggccccgtttcccgcctttatttaaagcgcctcccaaagaggaagacccaccaaagtggcccgtgagacacgctggcgcagaacacaggcggtattccaagtcggccgatacccggggattcccatgagcccatgatcgctgcaggattaggtttaggtagcgcatttaccaccccccctgtgggatatcccacctgtaggtcatgcgggcggcgaaaacccatgtttccagccgccccatgagagaatgagagcccagtttcacaaaactgtttattaaacccgcctgcgtgacgagcgtttcggcggggcggccccccgtgagagtttggcattttagggcgatttaaactgagccgaccccgaagaagaaccggcggatttttttctcccgagaaaagacgatgggcgccccatatttacccgagtttacccggccatgccgcaggttttacccaacccatgtggggagctgctgctgcgacaaaacaaaacgggttttttggcgggccagccgcatattttttgggtcggccgactgcctcgtggggaccacttggggatggttcataccccactgcgtatgctggtgaaccaccaccggtgcaggcgctccacaaacaagcagcagctctttaaaaacacccggtgcgaggtgggtagcacgcgattttgattcccctgattatgatgatcccgacagaggtgaccgtgggcgaacaacgcccgcaagaaggtttttgtcttgccccaaagatgtgcgagccccctagtagactagagcaagaggcggtgcccccacgacggtgacggatccgtggcggctggccacagcacaagctgcgtgggtca

SEQ ID NO: 415161 - DNA, 1044 bp, Homo Sapiens
agccagaggaagtgatgtgaaaacaatagcaaaaaccaggacccttcggacttgccgctgaatggggattctctgtcgcgatgttgagtttacctggaatgccccggtgtattttgggaaggcagacatcccacggaaacaatgaagtggaaaagaaaacagctaaagcaaaatctagagcccagtttttgccaaaccatgccccactgtgggctggtgcaggctctggaagcccaatgtcaggcctgatgaagagcggctgaggccgtggggatctggtttaccaggatgggcacatggatggatgcaagaaaaggaagagcctgtattcaatgtccccacttcatgtgatgatggcagaaatgaccctgcgcctgaccacgtgggaacatgcctgcaagtgagcggttgactgccgccatggccttgacgctacagtgctgggactccaccaatatcagtttggggcccttgaaggtgaaccattaagaattgaagaacgagcaactgagaccatagatgtataacaccttcggacacacaatacccaaaggaagaggccactcaaaccactggggaacagggcaacagagtacacgttatggggacaaaaaggggcaaagcgggcaccaccagaggggggtgacacgagacaaagagagcaggcagaaaaggggagagaagcgaccgattatggatggcacgcgagggttcggccaagttgtcgcctttggagcaacatggtccaatgaaatcagacgttatagggatagagatatcaatatagccaagggaatcgcgccaagaagtcgccccggaaagaaagggtgaccgcagccacccgcccaggagtggtggaggcaccagatacgcaggagttagagaaaaagagcacgacaacagcagggtatccgaaaagaccatatgggcgagcatgggagggagtagagcaggaacaccaaacaagagggaacagacaaacgcccaaaacaaaattaaggagggagcaccacaagggcgccgcagagaatacgagtgggacac

SEQ ID NO: 415162 - DNA, 593 bp, Homo Sapiens
ccacgatcccgggtgttcagaagaggtgtgtgtttcttccttcctccctctcgtcacagttgctgtcccccaaggaagaggaaatgacttgcttgtggaatccgtttgcaagcaaatcacttatttggaaccaaagaatgggggagaaggaagtaggagccatagactcagggcttgatcaggattccgcaagccttagagttttccactccccacaacatacctctcacctgggccatttagaggcatctcctgcctcccactctgtctctgcctgaggtctacactccgcgcccccgaaggaacgcagcacagccccgagcccgcagcttcaacaaggatgcaactcgcaaggtcatgacatggtgaccagcagggtgatgagagctgggagggcgaggatggatagggaacgtgaactatgcaggatccacaaatacatgagcatcgagcgaagcatgccgacagacgtcgaaaggactgaaccagacaagacataatacacgaggcgcggcaacaacccagacatgaaacgaggatcaggagcatagagagatgaagaagacgatccactacaccgacaaagaggagag

SEQ ID NO: 415163 - DNA, 833 bp, Homo Sapiens
ctcgtccgccggcagcactcggcgccgcgtgtccatggaccggaacctcgtggccgacggtgctgaacccgggccgcgatctgacgtctccccgcctcaggctcctcctcctcgctctccgacgactccgtcggactcccgcaggccctgcacctgccggcggcaggctagcggagcttgccccgtgaatgctgggtgacgggttcgcggctgctgccgtactgcgtgtcgtactcctgccgcctctcagtgctattgtccctggtgcctggccttgatgcggtgtccactggcggaatgccgtgtgcgccgtgctccgccgtcaagatgccgtgaccaagtcccctagcagcaagatgcgtgtacagacagttgcgtgagctatcgtctcgcatacctgagtgaagcattgatagacacaggctgaaatgggctgagaaccatgccaggtgcagaggactctaccaaaatggggtacagccaggcctgtcttacaactgctgggtggatgagaaaggccaaagaggaaacaggtacagcccagcagtgagcatgttcctcacgtgcaactgcgtagaataccgtaataagtatatccaaacattgggcgtccagatgagctaacgtcgttggatcttgccagatagactgatctcacaaagcctgtccaatcgctgcagcgaggcattaattggtcgggtctaatctataggacagcttgtgactaattgcaccagtgacagtgatgccaggatgtagggtcatacatgacaggtctggatgtgatggacgaagcagtgatcctttaaatccctatcaattgggacgttcca

SEQ ID NO: 415164 - DNA, 517 bp, Homo Sapiens
gagggtggaggcccctgcgtccgagggccctggcgatctctgcctgctagtggtcttgctgtgctcggcgggctacctctggctctgagcctccccgtctctgggtcctacggtctctgccgtttcctctcaggcgcgccctgagtgggggacccgcagggctggaaggaacgcggggctgggtgccgtgccccccagcgctaagtggaaacagactgcggaaaccgacgcccggggcgctgatccctgggctgcccgcttccctgccccgcgccccgcgcgcccctgagggggagggagcgaacgttgggaaggtcaccgccttgtccccgccgagaaggggctgtcgcaggcttcaagccctttacaaccgtcagaggcccgggggttgaaaggcaggcagccagggcccaaggccctgcttgaccttaagccgggacccttgaccttcggcctcgcctcttagcccgaccagcttcaggagcaaggattcgcggccggacccggaaagttgccc

SEQ ID NO: 415165 - DNA, 1545 bp, Homo Sapiens
  misc_feature (1020)..(1028): n is a, c, g, or t
cagcgctgccggcttgcatgagggctgtgagaaggggcctggtgccggtttgtcctaggaaacgggctgcgcagtttctcttttgcatcgtcttttccatatccagggaaggactatgtaaggactcactgaaacgctgttgtgcatacgtcgatcggggatacagtacatacaccgtcatacacaggtaatgccgcttgaagggttaacgtgtgagctacgattcttgttatgtgcctgatttttgttacttgtaccagctttaggcatgcttggagaagagacgtcttgatggctgtggcgcatcggccttttagtagtaatgttcgaaggacgccatatagtgctcagttccaaggaagcaacttggacttctttgagaagagtttacaactcactgatgggtggggcaccaagcctagagagacgacttgagtatgcgtctattgggcttgtgccgccaaaataaagttggctgatttgactagaatgatttggacctttgtcagaagtcatttacagttaccatttgggaccaataggtagtgacaccgaagcaagagtcatttcggggaaaatttgaatgggtggcctaaccaaaatgtgggcccatcgaatgtgtgaccttcctacaaggtggtaaggataaacctccaaagaggagtggcggaaaactccctttgcatgggaggtggtgccatcagttgaaccatgtcaaggagaattttctaccccgtctaaccgggggggccctttctccacacagggaattcgagactcccccaaggcaacaaagacaagggccagagtttctcatgccgatggtgggacgcgcgagtgtgttgacatcgaagggtgaccgcatataaaaccgggtggtgaaacacatgatgacaggggtttttcctaacaaatcgagtctccgggcaatttatttcaagagcccccctatttttgggacacctacagcagtgttgcacaaatgtggaacgaaatgtggccacggacaagcgaagaatnnnnnnnnnggtggataatagccggcagaacctcatcgagatgaatccccgccatattatggactgcgccgaccgtacatgggtgtgagaacacaccacaacataaatgaagatgcgtagtgacacacgggacgaagtagcacatcgcgtttgattgaagaacacaatcaccaattataccagacagaagtaccattttatgggtacgccattggtagagcgaaagatgcccccgatctaagcgcacagatttggtggcagcaagaaaaacaacgagcgtcgtggcatattgactgaagagcagggagatccagctacgcacggggccagctcttacggctcacgacagctggatagttgggacaccccagtagttggtgaggaagctcgtcagaagcgcaagtaaaccgggggctccctctacgaagagatactcactgtgatgtcatccgtaagatagggtggaccacacgaataaaggtgtagagacacactaactgcgaaagatcgcccacactgttgagga

SEQ ID NO: 415166 - DNA, 906 bp, Homo Sapiens
gggggctcgagtccagccatgggggtcctggacgccgcttggcgtccccgcgtctgccttgggggcccgagtcccgccctgggggtcctggacgccgcctcggcatccccgcgtctgccttgggggctcgagtcccgccctgggggtccccgatgccgcccgggggtcctcacgtctaccttggagactggagttcccccgtgggagtctcggacgccaccccggagtcaccgtgtctagccttgggggcttgagtccagccctgggggtcccggacgtcgccgaggagcccccacgtctgcctttggggcttgagacctgctctgggggtcccggtcgccgcccaggtgggtccccacgtctagccttgggggcttgagtccagccctggggggcccggatgccgcccgggggttctcctcgtctgccttgggggtagggtccagccccaggcgtcctgaccaccgcccaggggcccccacgtctgcctgggggcctcaaattcagtcctgggggtcccggacgcctcccaggggtcttcatgtctgccgtgggcctcgagtccagcccgtgaggcgtccccgacatgctgccttgcgagcggtggagtccagcctctgagggtcctgaagtcagcttcagggggttcgaacccatccatcccaggggtcctgagtctacattcacggcgctggagtcccgccttgacggtctccactgctgccttgccggcctgcatgggatccagcggggtctgagtccagccctccgggagcacctgcgggggcgctctgactggggcacggcgcctgggagatgcccggagcgctgcgagcggcgcccccgtggtcccggggaccctcacaggcaccgcgttcagagacttcccaaatgtccccgtggcgg

SEQ ID NO: 415167 - DNA, 1272 bp, Homo Sapiens
  misc_feature (517)..(517): n is a, c, g, or t
ctccgagtgatgggcatctctcgtggacaactggcacaagcgtccgcatagaagcggggtgcaagagaaatgccctaaccacaatgaatgcgtaagtatgagttggggcgctcagtctgctcaacagcaagattggccccctgccgctatccacacagatcccgtggtgctgacgtgaggtaacaatgaaatatccagtgcccgtgatcggtctgcgacgtggggaatttctccttgtgggctcagaggttgtctgtacttcggtaataacaagggagtcgatctggatgttgtcttacaactgcaagtacgtaagtaagcgatgcttgtgttccgtaccaaggatcccatggtgagagaattgctagtacgtgctcactcgatgagtcgacacccgtgactcagactaggctggtagctgacgtctcgcgagcatagtgctcgctgcacctcgtgagggggctctgacagaggatacgggcgcacgtcccacaaggtgctggaccttcccttggangcgcatacggtaacgcaggaatattttaagagagccatataccaagaagcggaggttctagtacacatataacacctctgcaaggaaaccgcaaaagttaagttgacttgaatacgcgcggaaagcaccaaatcgaaaattttcggcgcaacaatatccattccactagccacataattctctcttcggttcgcgaatgttcggattggccaacggtgtgttcgcctatagcaccactggggggccacatatggtccttatccgttcatgggccggggtacttcggcctaatggttccagcaccagtttgttccgaataaagagaggacctcccagagaagggggaagcccagagcggtttgcgattggagggccccctgggaaatgtgcctagagcacgccaatttaggggtccgccttaatgcttggagtatggcgcccctgtttaacgcacaaagggagggttggcgtcctaaaagagcaacaccgtagaaacagggtatatgtgagggcgagaacaacgccccattattccccaattttaaacctctccccagcttttatttaccgagcactgacgacagaatgcagccatttcagactcttgaccgaacagacacgtgcgggtgtgtaagcgccgcgcacgggtcgaccacgacgtcaagtgcaagcgaggtggggatcgctgacgaaagacagagggttttaaacgcacaccatatagtttgccgccgcctctcatatttgttggtgtc

SEQ ID NO: 415168 - DNA, 744 bp, Homo Sapiens
gcgccgcccggccccgctcgactccggaggctccgcagccccggcgtcgccccgctggccctcctccgggggccagtggagggtgcccctgggtctagcggcctcaggttgggtgcatctcctccagcaggctgcctcgcgccgactaccatctccgttccggatgcccaacgttttctgcgccccaagagcaggaataccagcaggacttgttatgcgtggctgtgacggttctatgagcgggccctgggcttgggcctgagccttcattggtcatcctgctgtctacctcatccgctatctgggtggctgacggacccccgaagctccgcaccaggggtaccaagatccccatgcggcccgcggaggacggcgtagcagtacaatcgtgcgaagctgccatgagtcagcccgtatacttatgcacgggcatgcacctggcgatcggcagtgcgggatgctatgggaagcgagatgagaccagttgactcggagcgtggtccgcacagctcgagcgctcctggcgcttgctggccctagcccaagcgcgacaacactgccagccaccacatgtgaacgcacaccgtgggatgttggcgcagacccgggtggatgacggcgcctggcgcaaaagggccggcggaacgctggacaagactctagagacaacgccctgggacggaagaggtgttccaaggccagccgcatgcgggcagcatgggtgagcgtgcccggcccgcaggg

SEQ ID NO: 415169 - DNA, 879 bp, Homo Sapiens
  misc_feature (116)..(224): n is a, c, g, or t
  misc_feature (413)..(413): n is a, c, g, or t
cgcgtgccctactggcggtggagaggctgggcgggccccataggatgcccgcttgggagccacaggacctcaaaatacgctccttacaacgtgttttatagagcgaagtctcgctnnnnnnnnnnnnnnnnnnnnnnnnnnnnnnnnnnnnnnnnnnnnnnnnnnnnnnnnnnnnnnnnnnnnnnnnnnnnnnnnnnnnnnnnnnnnnnnnnnnnnnnnnnnnngtgcgcgccaccaagccgggctctaacagtttttaaccagacctgttgatggtttctggggcgagcactagctggggatttttatatcagctggattagttttttccccctaaacgagtctacaaaatcccggacatttccagggtcctgagacggttccctaccttccttctgcgcagagattgcctngtggggatgaatcgcttagcgagacccagccatagctggctacgctgagttccggcccgggaccgcgcggagaggcaagatctattcccgaccctctcatctggcagacagaacccaggcttcaggaagagaagcggctttcgcagtttcacgctaggacgggctgagctgggaatcgatcccaaattccacagtcccagtcctctcctgggtcctgctctcctgactgcagtctcaggcccagaggtgatggggcacttagggttagggaatggcagacctggagaaaaggggttccgctactagcctcggcttgtgcaaacttaacattttgaacattccattccacaaatgtggtactgcgtctctgggaacaagaccagcgtaatgagcatcgtgagaaaatctaagaacgaatccctaaaccggccgctgtcctttaaggagattacaaccatgctataac

SEQ ID NO: 415170 - DNA, 864 bp, Homo Sapiens
  misc_feature (175)..(183): n is a, c, g, or t
  misc_feature (241)..(320): n is a, c, g, or t
tcttagaaaatgtggaggaaattgcatggatcatttgggagctcagaactgtagggggtgcccaaggtatctggatgcaccaaatcacagtcccatccatgctgccaactagctgtcaggaagacatggatagttcctgcccttggtagtgatggaagtataggcgattacagannnnnnnnnccatctcctatgggatccacagatctccggctttaaaatccatacacttgagccctgnnnnnnnnnnnnnnnnnnnnnnnnnnnnnnnnnnnnnnnnnnnnnnnnnnnnnnnnnnnnnnnnnnnnnnnnnnnnnnnncacaaaagccggaaggggggatcctgagaacggcggaactcgactacagtaaccccccaccggtcaacacgcacacagtgctcacatcacagggctctcggcgctcacctgttggaaatcgccttgctacattcttccccccggtctcacccacctctcctctcaacggcatcggtcggaaaccactcccccacctggcccctctccacctccctttctacacactccccggagcagcactcactctactcgaaactcggtcagagcgccctacaacggtgtgacgacaccctgtccagcgccgctgccctcctagcaaacccctcgatcctgccaccttggaccctctgctcctacgacctcgccagcactacccctcgcaacaccccccaccccaactcccctaccacgaccctcagcaccgccatacctacactactactgacacgactccaccacaacccgcctcctcgcacccgaaagcgagccctcccaacacccaacaccgctggcgtgacacgacccgacccccaactcgccaacc

SEQ ID NO: 415171 - DNA, 1053 bp, Homo Sapiens
ggcagagctggaaggtctgtgcaagctggtctcctgctggggaatcaataaagtgaggcagagcaacgcttattatttattattgcgccgttggccatggccagggtttctgccagtggctctatcgccaagtggagcgcaggggtccaccgtggggcctaggacgccgtgccgagatagcccctctcttagccccaagggccgacgggctctcagggctcccggggctccgcgtcgctctgcagggctctctcccggataccggcgaggccgcgtgcggagagctgctatcgctcttaaccttgcaggtgctgtgtgccgcggggcgcccggggcaggcaggacgcagaggaggaggcgcccgcacaatgcccggggcctgcggggctcccacgcacatcgggattacccgtcccggccgcaccccgaggaacggcctgactgcaggccccttgtgacaagagcgaagagaggcgagcgcgacgagaagagcaggaggcgagacgaaggagagcgcccgccccgccatggggcgaagagctcccgagaaccacgggggaggcactcggagcatgagacccctattgcgacggggaatatccctcagaccaccagagaagagggaaccccattgacgagaaaaagggcggggaccacacacaggagcagaccccgtagggggacccacctcgggagccccacattcagggcgagagccgggcagcggggtgcacatacagcacgacaaacaggggggaacccgcaaaggtcccacgaagagaagagcccagaagaagtagtggtacgccttagagaggccctttggggcgccgagggaaccccacaagaagaaaccccacgggaccttccggaaatgcgggagcggaggacagcggcggaccacaaaggacctgtatggaaggggggccgcgaccacggagtgtgaggaccgaccacagggggcgtggttcaccaaatgcagaaagcgcagccccaaatgtgtagttgcaaaagcgccaaccaggcatggaaccccagcagagcagggagcag

SEQ ID NO: 415172 - DNA, 1041 bp, Homo Sapiens
  misc_feature (266)..(337): n is a, c, g, or t
  misc_feature (855)..(855): n is a, c, g, or t
gtaactcttcttgggcccaggtgcacaggtaaattcggatctttcccaaggtaagtgccatgtttaccttcgtgtttatgcatttcctatgcatttaacgtgtgtaaaatggtgctatcattttattcagcttctgtctttgttttcaatgttactggtaatattttgagtgttgtgctcctaaccccattcttgccacaggccctgcatgctaccgtgatttttaggaaccctatgtcacctcacagatctgagcatatatgagnnnnnnnnnnnnnnnnnnnnnnnnnnnnnnnnnnnnnnnnnnnnnnnnnnnnnnnnnnnnnnnnnnnnnnnncatctcacagaggatagtaaaaagagccctggccttggagtctgggggctgggccacaggtcaggcttcaagaccccctgggccacgttggggacttgggttcctgagatccaatctctgagcatcagcttcactgtctgtcgcagaagcaccatttccccaccttgtccacctcacagaacagccaggtggcttagaggtgagctctcaaatgtcaacaggctttgcaaactccagtggtcagcattatgtgagtagttcagtctttccacagggatctctggggcctcgggtcacagcagaccagaacttgacctggaggctggtgtcccccaaactgctgtatggaccctgcaacagctggggagtcctcgtctcaacagccctgctgtctcccactgaggtcatctgctggcctcctggtggccctgtgaggaagccaggagtcactgatgctgtctatcgacgggacagatggatccacagtgatagtgacttgccagagttttgcagcttgngacttcacagaggaagaagctgggaatcagcgtggggaagcacccagatcctctgttctccctaagccaagctctgcagggagtcctggttccctccgggagtcctctttcacagctgacttgacactcctttgattgtcaggcatgttcaaggctaacagtattttaccaacgtgttttagtccc

SEQ ID NO: 415173 - DNA, 584 bp, Homo Sapiens
  misc_feature (274)..(283): n is a, c, g, or t
  misc_feature (290)..(527): n is a, c, g, or t
ctggtagcgtcagcctcctggcttttccttttcctggacgcttcatgggctccgcggctgcgctagactggagggtccgcgtcactctcgccctcctgctttccgcgctctcacccgctcccgcctcctgagggcacgacttgtggaggagcgcgggcggcggggcgtgagcgagctgcctctgccgccatcttagagaaggcgagcgtggggtgtgctgtgggcgcgagtcggcctcccgcggtgccgccgcagcgtggcgcggagagctttnnnnnnnnnngtctggnnnnnnnnnnnnnnnnnnnnnnnnnnnnnnnnnnnnnnnnnnnnnnnnnnnnnnnnnnnnnnnnnnnnnnnnnnnnnnnnnnnnnnnnnnnnnnnnnnnnnnnnnnnnnnnnnnnnnnnnnnnnnnnnnnnnnnnnnnnnnnnnnnnnnnnnnnnnnnnnnnnnnnnnnnnnnnnnnnnnnnnnnnnnnnnnnnnnnnnnnnnnnnnnnnnnnnnnnnnnnnnnnnnnnnnnnnnnnnatctgcaccaattgcaactccacccttggggcaacaagacgctaaaactcgggtctc

SEQ ID NO: 415174 - DNA, 1309 bp, Homo Sapiens
aaagaggaactgcacttccggtcacgccatcgttgcatgccttcttcgctcaaggcccccaggctccgctcttgccagcagggacagtcgagccatggctcataaatatgagactgtgagtgcgggtccatcctcggcttccagggtgacgcctaccgtcagaagacagcgcacttgcttatcgcagaccttgcatggaggcctcatcctagatctccacgaggcttcctaggctacataacctacgacacccgcacgctgctttgtccccgagagcttcacgagtccccaagttgtcaatgagatcggttgacgattcaggtttcaccagtctgccgataagccgtagagtcgagtccctttaaagtccaggaagtgccactccacggaacaggcctcaacactgggtgtcttagtgacttctcctgctaaggtcgtcgataatgccaaggaactgtgcaccataatgacgccagcctcaaggagcagtgccttttaagctgcccataacactgtcatacaccctagaagggttcgcaagaatggctggtcctatgaatttcttatccccaaggacaggcaaactcagcttggatgtacgcttagccctgactacatcacacggtactgagcattgtgcctttcaacggctccccacgtaactgcccacgtactaaaagctgtggtcccacatattgccagcactacgaaatttcatctcaagtactctcagatgccacattgacctgggcgcaacagatacggccataaagaactccccttttcaaagggcttgcgacatgattaccagcataatgtgtccccagatagggctgattaacccaggatccaggaatgtactactcaggcgctgttaaattgtgccacttttccccaggggttcgaccactaggaagaaccggacccaagggctatctcttgaacccttgatccgtgtgcatacttgcagcgtgaccatccaagccaggactggtctcccaaggacttcagcaattcttggaagtcccggggacaaataaggttctgctgggccaaggaagcggaaccccgcgcacagaaattaactaaaccttggaaattggttggacggccaagaagctagcacgtggaagtgtatcaacgatggtgtgtcacccccacctgtgagctggccaagggaaccatgacacaggctctcatgcgcagccacacttaaccacggtgattcacactccgcaaacgctcggtgtgtgtcaccccctcatcactgatgctctacgtcccaacacgccccatcggccatacgaca

SEQ ID NO: 415175 - DNA, 977 bp, Homo Sapiens
  misc_feature (607)..(656): n is a, c, g, or t
ctgaaactaggtttggagcccttgtttgacaatggggaaaagtgcagctcagtgtatcgggtttgggcgatactgcggggaacagatagtaactgtatggcgttcatagtgctgatttgcctctgggaaacaggaatcttttccaggaaaaacagacctgacctagagcttttccagcttgagattttgggaaacaggagaatcacatgaggaccatatccaaaaactgctggtattgaagccatttctgattgctttaccagggaagattaggattaaggtaaaacggcaaaatcctccataattatcaaagaggtggtgagtggtagatttctttttttgtcgttttgtttccaagcctcacagaaggatatggattacagaaagataaggttaccagggaagaagaaatcaatcttcaaagggcaaaaaagcgaaaaacagacatctcagaatccttgaaaagagcatcgaaaaggaacatctctgttgcttcaggctggggtattagtggaatgtgtggaatctatacagtcacccccaacatcaggtcgtccagaccattggtcgttagactctgctgtatgtgccagagtggtctctgaannnnnnnnnnnnnnnnnnnnnnnnnnnnnnnnnnnnnnnnnnnnnnnnnngggcggtacggcctcgttccgtgtggcccagtctaggggtgtcagtgccacaggccatggcttcactgcagccttcgaccctcctaggctcaaggcgatcctgcgcgccttcaactttccccgagtgtcgggaccccggcgattggcccaccatagttccctgtggctcaatggatctcttcccaggctagtttcctgagataggttgggacccctggctttgtccacaagcgttggttagttggacaatatttgtcgtcgagaccggtactccctgtgtggccatgtcggcctcccattgcggtggcagcgatcattgcg

SEQ ID NO: 415176 - DNA, 928 bp, Homo Sapiens
  misc_feature (128)..(505): n is a, c, g, or t
  misc_feature (510)..(575): n is a, c, g, or t
ctggtctgagtcagggtcctgcagtctagtactgaccctgaccatcagccagcccggaaacctgcagcacatcactttcccccttgggtcaccatggagatggtgaaaaacctctggtcccacatagnnnnnnnnnnnnnnnnnnnnnnnnnnnnnnnnnnnnnnnnnnnnnnnnnnnnnnnnnnnnnnnnnnnnnnnnnnnnnnnnnnnnnnnnnnnnnnnnnnnnnnnnnnnnnnnnnnnnnnnnnnnnnnnnnnnnnnnnnnnnnnnnnnnnnnnnnnnnnnnnnnnnnnnnnnnnnnnnnnnnnnnnnnnnnnnnnnnnnnnnnnnnnnnnnnnnnnnnnnnnnnnnnnnnnnnnnnnnnnnnnnnnnnnnnnnnnnnnnnnnnnnnnnnnnnnnnnnnnnnnnnnnnnnnnnnnnnnnnnnnnnnnnnnnnnnnnnnnnnnnnnnnnnnnnnnnnnnnnnnnnnnnnnnnnnnnnnnnnnnnnnnnnnnnnnnnnnnnnnttatnnnnnnnnnnnnnnnnnnnnnnnnnnnnnnnnnnnnnnnnnnnnnnnnnnnnnnnnnnnnnnnnnnaccaacacctaaccccctaccatccacgacataacaagcaacgcgcacttcacctctacaacccactcaccacccaccctcccccataactactccatacatacactccgacacaacataatccacccactctggcgcgacggaacagcacagtgaaagagtaaacgacagtgtcaagaagcaacagtgagtggctaggcgtcactgttgatatgtctcaaggcaacaaaaagcagagaggtaggagagcacaagcaaacacgacgcctgtagacactgcgcggtggactaaatatcatcacatgaacatgggcagtgggctagaaaggagaaggaaatccatctcactaagg

SEQ ID NO: 415177 - DNA, 654 bp, Homo Sapiens
  misc_feature (389)..(419): n is a, c, g, or t
aaatatactttatggagtctggcaaatagaaagtagtaggagctgaaaatattactataattatttaaggcaaaagaatataagtgaagaattttaagcaggagattaatatagatttaaaagttagaaaaactcctaggtagttgtgtagaggatacactggggaggagtgagagaggaagtgatggagaatgctaaaaagctagtcacagactgcaaaacaacattttggtcaacaatggaccacatagaagatgttggtcccatgagatcatagtggagcataaatagaaacctaataatatggtgcttgatgtgggcattgcagatcaagtatgggaaatgattgatatttaatgctgcttctgggatattggttttccatgtgnnnnnnnnnnnnnnnnnnnnnnnnnnnnnnncatctaggtttgtgaaagtatagtctgtgatgttgcacaagcacaaaattgcttaagtgcgtttctcaaaatgtattcctgtccttgtgactcattactgtatgtgattaaactaggtgagatttgacggtcttctaaaccaaggacatgggagtaggttagagaaacaggtgaactttccagatagtaggacgagagaatctgaagtgaaagacgttgtgactcacaggaggtg

SEQ ID NO: 415178 - DNA, 293 bp, Homo Sapiens
gcggcgcggaccggctgcgcgcggaccgttagctactgcggcgggacgcggcccgcccaggcgagcggcgggtggctcttaccagcgggaacgccatggggccggtgtggccctgcggggctgacgggctgaccggccagccggcgggcgagagacgcgcacgcacgtgggcactatttttgcagcgggccgcgcgcagccccgcaccccggcagcttatgaagctcctacgagccgtcctcggagccgccccccggccggatgcggaactgtgtcggcgcggctgtcggacc

SEQ ID NO: 415179 - DNA, 712 bp, Homo Sapiens
cgacaggggacggggtgaggctcccaacgctgagcgattccttctcgttcccgctggcgtggaagacgaggcttgtcttgacttcgaatcgtattaatatttcagacacttaacaggcaacctctcgtaggcattgacgtgcgtcccaggggctgtacctgtccgagctgattaagcgtgcgcggtcacccaggggtgaggaaacagggacggcgagctcgagtcactcggcagccggcagatccaggattcgaacctgtccaacaggccggacgcctacccccagctcacttaagtgcaagctcgcctgccgccgctggcgcacagacctcgtttgctttggcccaggtccttgctcggcacacggggcctccctgatacgcaggacccctgcctgtatttccaactgtatttcctactaaacttggcacaacctcactctgcaacagcttaacttacttactgtttccggtcctcagcctcccccagcctcaccgtacacctccgcattcaatctggactcctccacttcaacttcaccaccactcagatccaaacccgcactttattcctgggtacctgaaaaataactactagctggtcatcggtctccctccgctccactcgctcccatccacggggcaccgtgcatgatctagaaatgcacatcaaattatgctcacctccaccttgctcccgaaggcgcctatgg

SEQ ID NO: 415180 - DNA, 842 bp, Homo Sapiens
  misc_feature (459)..(490): n is a, c, g, or t
ggagtgtactggtccatacacgtgcgctcggaggtgatgggaacaggaagcatgttctggtcttccatgtgcacacgcatttggacacataaacgtgcatgcacaggtgtccaggccaggcgtgtaagcccccaggagtgcatgcgtgtgtttgcgtgcagtctacaaacatgttttcacaaagctcaaggagaagcaatcagtcatctccaaggaatcttagcaacagccatccccagaaaaggctcctgccagctggggcagcgatgagtcagcagaggcgtcgtgggggaggcgggaggcgaggcagcctcagccctggagcctgagccggcctctcccttctcctgggaaggcctccagacccggcctggccgccacgcctgggtcactgctttggcactgatgtccgagaacacattcctggaactggccagcacaggcggctggagggttttnnnnnnnnnnnnnnnnnnnnnnnnnnnnnnnngtccgggccccacacccgcccttttatttttccttcttgctgcaaaaccaaaacaccgtgttcacgagttcaggcgctgtagccaagtggcaggagctggcagagcaattgggaaacaggagctgcctggcccaagcaggccaggggatgaggacacctctggccagccacagagagggccctgctagggcttgctgagccctggttaagtactgcagggcaaaaattgtcatcgcctggggcccagggaaccggagttcaaggtggcagctcccagagaaattcgctgtgtctctctgccccagtagcagagcccgaggtcactagcagaggatggcggtggaaggtgaca

SEQ ID NO: 415181 - DNA, 464 bp, Homo Sapiens
cattaagtgtagtcttacagggctgtgcttgctgggcatgcttttacgtctgtgagataatttcggttcagtaaattggccaatctttttatttttctaagacacagaaatgtatttaataaaaacctcgagagagtgatgggtggaaccccttctccttgaaagtgtgtacagatattccatttggtttggatatagtttataggaaagtgtgtggatgtattatggcggaaggtttctttatgttattttgttaatttattgggactctgtgtaaggccaggctttagtggtcattagacaccacatgtgttatgagccccttacccatagggttgggggtgggaagagaagcatatttttttgccattccggaagcaatccatttttattcacttgtgtgtcatgtaatggtcttaggcaggagagagcactgagtcattgctggagttcagttcaacaga

SEQ ID NO: 415182 - DNA, 871 bp, Homo Sapiens
atagctgagcgagtataatctataaaagaagggaaagtatcgtctatagatattaagaaaaaaacaagatgcatgagtgtcatattgatcaataggaaaatagagtgatgagagattcatcacgccggagatccccacctgccactaccggtcccactatgagctccgtacacgaatgtagtgatatcatgctaaagttggtttcgagatatcctcagatcaactagccatcgttcatagatggcctaacataatagcaggctatagagaatccaccaagattttcaacaagttgcataggcacttgttcccatgacttggcagtcccctattatttggcggatggggtactcagagagcaacagggccatctggttaatcatagaatgtatcgctcttcgctaggacgtattgcctccgccattaattcgatcatccatcaaattggcactggtcaagaagaacgcagtctgtcagcaaatctgatcttggacctttagatcctctcgttacaatgcgccattaacagacgtaactcgaagccatatggccccacgtcatgttgggcggcaactactatttagccttggggtgacccgtggtgaggcccgtctcctccgatttaccccacgctacttaaggcctcgcgtcacttgcatgttgggagagacagcgccaaacgagaaggatacccccacgtagtatagcctttcgtccatgcgtggcgccataaaacgttctccgcgactcctattgcggcctgttgcattcccaccttactctaaaccagcgtcacacacggatggcgttccgtgggggaaaaccctcgcgtattctggccgtccgtcaagatccggggggaactcacacc

SEQ ID NO: 415183 - DNA, 104 bp, Homo Sapiens
tgacggcagccgttgtcgtgaggccgacgggccgaatgtaggtgggttgagcgcgcgggtgaagcgggcaaccgcagggctacggcggccggcagggggcagtg

SEQ ID NO: 415184 - DNA, 410 bp, Homo Sapiens
cagaagcccagccggcttcacctctcactggcgctcttcgcgggattttgcggcacttaccccgggtgctccagtagcccagaaggagcttgtcccagacaaccaagaggaaaagaggggaagcgagaaagagagggagacccgccattctggccaacgaccctgcgaagagggaatggcggtgcacgcacgggacccagcctctgatcaagcccagcaggcgccggccagctgcgctgagtgctgggcccgtggagcccgcgcccacccggaacctgcgccggcccgcgagcggtgagcgccgggcgcagccccgggttccgcccgcgcctctccctccacacttctccgggagcagagggagccggctccggcctcggccagccccagagagggacccccacagcgca

SEQ ID NO: 415185 - DNA, 729 bp, Homo Sapiens
aaaacttcttgttggtagtttgactcgtattgtagagctaggtactggttatgatggtgcttcatcctatcccagatttcccagtacattcctttagaagacatgtccatctccaactgctgggggctggcctgtttctgtaggccaagggtgctgccccattagccccacctggttgtcatcactcacccatgtgttgtgtccatctctgacccatttcccctgccaccttgcctaaagcttctcctgtcagcctccccaccaccatgaagtgctaagagtactatgtcctgaggtaagggcacctgcaacggagatcgtgaagagaagactgtgggtattctgtggttacaagcacaactctgggtcataaacccattccaagtcctcagaggggcaagtcccttccattcagtattaatatagctcatcagtgcctctgatgaaattgcccaggatgctggcagtgtggcctgggaggcttccagctcttggggtctggttacacatttattcacactgcggccatgtgttgaggacctactatgtgctgtcgtctgagccacacgtcctgtagaatgccgttggttctgagtatgcctggctggaatggaaacccaggaaatgctagagtaacaggctctagtcctttccagccaaaacaagacctcatgggaatgtctgagggaccagttaatgttgagacagagaagagtatggtctagaatg

SEQ ID NO: 415186 - DNA, 711 bp, Homo Sapiens
cttgaaggcacaggcatccatcatccaggtgacttccagtctcctggttggggagggctgcacagaactttggaggagggcaggtcaggctccgctcatgaggtggccgaggagcaggacatggcacactcattcgcctgtccttccacacggccaacttctgctggccttcccagagccctcaaagcctgcacattcacaatcctcatggacagaagtggatacaggctcagaggccagaggtactaaccgagaccacacgattcagctggtcaccgtgtcttcccggaacctgcacgattcagaccaaagctgtctctggggttggcgtgtgttccccaaagaggaaacgtctccatgaatttggtactctaggcacttcgctggactcatcttaactccggccctgtaaaggaaagaagtgaaagtcaccccttttcacagcctgttcacccacacccacctaggtcttctaggcgatcagacatgggtcctgctctccaggagctgccaatccgatggaggaggctgacccttaaacaaaatcacgaccgtcagagacaagagcaaacagtgcgggcaaaaggagagcccagatggaggggcccgtggggtaagctgggtgtgtgcccagggaggggttccaggagaagaggccccacagctgggccttggagggtgagggtgtgtatggccattggcaatgccccc

SEQ ID NO: 415187 - DNA, 840 bp, Homo Sapiens
  misc_feature (425)..(452): n is a, c, g, or t
  misc_feature (495)..(656): n is a, c, g, or t
cttatatagataatgtatgtcataggcatacatggctcagctactgaggcaatcttctctctgtaaaattaaaataaaagttttgccagcaattaatctccttagccgttagaatagattatacaccagtccttggagtgcaaggaagtgagcatgtgagagtgtttgaagacctggcactaaatgattacaatgtcaccaggagagagctcagttacaaaatagtacagttggagcagcttatttcttctcaagtacaattactttgttctcagaaccaatgtaatcattggagcacgtttatttcttctttgttctcacattgtgagtatgtgttagcatgtagcctaatgcaaatatggtaaaatatattatatttgaagctagctagcaatagtttgatatattttcagatatgaagatannnnnnnnnnnnnnnnnnnnnnnnnnnngtcattgctaactttgtaaaaacgtaatatatactcaagactnnnnnnnnnnnnnnnnnnnnnnnnnnnnnnnnnnnnnnnnnnnnnnnnnnnnnnnnnnnnnnnnnnnnnnnnnnnnnnnnnnnnnnnnnnnnnnnnnnnnnnnnnnnnnnnnnnnnnnnnnnnnnnnnnnnnnnnnnnnnnnnnnnnnnnnnnnnnnnnnnnccattattgataaatgttaataattggtgtctaatacatattgaatgtttaagtgtttgtttgcaagtattttcctgacatttttgaaatatatgtgtttatatgttccctaaactttgtatatcttcttacctcatttattagccacatttgatcatctgaattcctagctgaatactggtac

SEQ ID NO: 415188 - DNA, 1074 bp, Homo Sapiens
  misc_feature (323)..(373): n is a, c, g, or t
  misc_feature (571)..(580): n is a, c, g, or t
  misc_feature (886)..(903): n is a, c, g, or t
caatgccccagcctgttgcttcatcccaccacacatgatgtgcattgattgcacctacatgcctccgtgtgtttctaccctcctccagtgccctcaccagccatggtctaatacgcccgagggactaacgaccgcctagtggaccctacccgtggagccgtgctgaggctcacaacatgcgcgacatgctccgtgtcgtcgcctctccacgtgcatgcatgcacaacacacgcgcgtgcagcagctgccttgacctccgtcatgacgaccccttccgcagcgcgatgcctactagtagccgaccgcgtgctgtcgcccacttnnnnnnnnnnnnnnnnnnnnnnnnnnnnnnnnnnnnnnnnnnnnnnnnnnngactctcgcgcctctcaccacttcaactcctcaccactcgcttgcccgttcccctaccctccctctcccttccactccggcatccgtccactcccttcgacccctcgccttgccctctgcattccaccactgaccctcccctacccaactccacccttccacaccccctatcatgagccaaagcccgacccatatagnnnnnnnnnngacaatggcgcggaacgacccctaccgacaccacgtcccaacagcgtacccccacacccgcccacctgaccagcctcgaaaccggcagcaatcggggccgcactcacagcaagcacgccgagccgcgccacagccccagaccctcgccacccaacctcgtaccccctatacccacgcacaagtcgcatagcgcccaggttggcgacgcaacccacacccccccgcgtccccagccccaatggcgggcgacccagcgcgcgacccatccatcgacccgaccgcactccgccgcataacgaacggctnnnnnnnnnnnnnnnnnnttcagacaccgcctgcaccccgtcacacctcgcagcacccgaccttcgcaccgctcgtccctcgggcgcccacacacctccccttgctacgagggcgaatctaccgagcgctgccgccagcggcatcaccagcccgccgttcagaccacagtgtgcggctacgcaaccaca

SEQ ID NO: 415189 - DNA, 824 bp, Homo Sapiens
ctggctgcttcctcatgtactttgctcttgcctggtgaagtgccaaggtgcacttcagaacctccctgtgcctccatgtgccaggttggggctgggcacgatggccacagcatggtgctggcaggtggtgacctctgctcctcgacctgggatgctccaggttgagacgtagggtagctgcagtcccagcaatgacaagctctgggtaaccctgtgtgagtggacggccaagtgcgagcccagcctcagtcactggggggtggacgtgccaatggtggatgcccatgcctctgtgtcacttgggggggtggactggccaacggggagcccatgcctcgtgtcacgtgcgcgggtggactgtgccaattgtgtgatgcccatgcctcgtgtcacctgggtggtgtgtgagactgtgccaatggtggatgccctatgcctcgagtccacttggtgtgtggtgttgtgactgtgcccaatgtgcggatgctccaagcactacagagatcatatgccgggggctgagacagtgctcataggcggatgcgcctagcactacggtacacttgcgtggtgtggaccggcccaatggcgatgtcccatggagcgtcagctggaaggagtgagaaactgcagggacagaatcgtgcagctagtcacatatgtctgcaaggaggatgcgacatgagtccgcttgacaggagcccatgctgtaagtgttgccgtagggatgtgctgcacggtgcgagccatgcgtcagcggaggccggcaccaaggtacaccaaagagcagggtgatagcctgaagtgagtgtactagggacaag

SEQ ID NO: 415190 - DNA, 527 bp, Homo Sapiens
gcgcctgacacggtcagctcgcgggtggaggcccggagcagaacgccctcgggcgcccgctcttgcagccgcactggagaccgggaatggctccggccacgcctctgccgactgcggcaacgcgagggacagctggtctccggggttgcagcgtaacgccctccttcccggcctcagctttcctgactgcataacgggcatacagtgggttccatggcgcaagggagctgaagaagccgcccgcccccagctcgcccgggatcctcacgcccctataacgccccgaggggccacgatgctgcccacagcccagatcgcgagtgcggaccctgcgggagggtctggcctagatgcgagtttcccgccgcagaccaggcgaggccacgcgacatatcccctacccgcttactgcaggccgcagacggagacagtgcagccctgcgcactgctgaggctgcccgaggtctcagcctcggcgggtcgggaacacgcggcgcgcgcccgcgcccctaaccggaagtccgcca

SEQ ID NO: 415191 - DNA, 453 bp, Homo Sapiens
  misc_feature (197)..(197): n is a, c, g, or t
  misc_feature (199)..(199): n is a, c, g, or t
  misc_feature (211)..(211): n is a, c, g, or t
gagaattttaaaatctcccaatttataatttctcttaacctcttttaattgggattgttttttaaacacacagttattcaccttattagttattcccttattgttgtcttcattctatgtgttttgtgcgtacacagtggttacacttgcacattttagattattctagaaaggttcacttataccccctttgcctntntccttctcgccnatttttaatattctcaagtgcgcttacactttgtgccgagaaaaagagctacaaagagcgagacacacaatattcacatgagctttatatccgaggctgagtgtgtctcccactgtgcgcacacagagacacagaaagagcagcgcgagggccacaaaaaacactgtgagactcagagtcgaggaaaatcccggttatttgagacacatttttctcaccgtttttcaactttctctttaaaa

SEQ ID NO: 415192 - DNA, 1052 bp, Homo Sapiens
caacttgcgggaatttcgcaggttggtgtcactgtaggtgttgactggggatttctagttgtgggggggtttaacgcgcagagacttgtgggagtgccggatcatggtccgtccctccacccgtccacctccaggtctacgggaagctgatgacccttgggtaagagggactagtgtggtcctaggagaagaacaggggagacctgtggctagtttataaacataatcatcctctgtctatctaaggactgctttccggaccccctagcctcctcccgaaccccggctcagatcttaccagataggtttggagagataatctgtcttgctcactctcttgtctgatgggcaatacaatcgacactgcactctgcaatgcactgttggagagggggtgaactatgggcaaacaccatggggggaaacttgtccaatatccggaagtcgcctgaccggagcgcagcagctcactgtgtgtcaaggtctcctgggcagctgggatcaggcaccaggaatcgcgcgtctgacctaagccgccaaaggtaccgcatgaacagccatcccaggctaaagtgtagtcagtgtggcacgtggaaacacctagttaccaagaagacgcacagagatgtgaagcacatcgtcagtgagctaggggaaagtgtaagcagacaatgggtagggtgtccaggtgatgtgggcatacttgattcgcgttccctttgctggagggcttaccaaatcagtcaagcgaaccgcccctgcgaatacgtggagtactacatatacggaattactcaacatgggttcagcccaaactcggggtaaagcaaacagcgatggtagccaggatgcgacttggcgaggacttggtcacaacgcagttcggatttggcaatacctatgggataacaattattcgtccatacgtgataggtccatagagacatgtacattggttctgggaccctgggattgtagatggatacacccattccaggaactgtctgaaactcgtgtagagaaaaagggagaggacaccctcgataccccag

SEQ ID NO: 415193 - DNA, 1424 bp, Homo Sapiens
  misc_feature (573)..(573): n is a, c, g, or t
  misc_feature (1228)..(1236): n is a, c, g, or t
gcctacggcacattggagcggcgctgagggaccaaggctgctgcccgtgcagctgtcaggtgatgccagtgccttggcgggctgctctgcgtgtgagggctaccttctagagtgggccatcgcatgtcatgctatggaaataaggcgggctggtgactgcattcaggtgtgcactacgggcccattgactaccatacgaagcctggcagggtcgatggcgttctatgcccgttctgactccctgaggctgtcgcgctgtccatggcgttcggagtgcggtgcgtggtcccctgtgcccattgtggatgcgtggttgtccatgggtggagctcggtgcgggtacgagtggtctaacgccgctggagccattggttgggtcgcttgctacggtgctgggtcttgatatgcccaggttacgtgtgttgtgtgggctcggtcgactcatgccactggaactggcgacgcagcggtctattgggtgctcccttgcaccccccagttgcctagccacccagctttctcctttcctgccaatttgttttgttcaacaaccataggtgacttctatcgtgntctatccttgcgcaccctgtacaaacattcgaatgcccacatcgcgaaagcgtgtggcactagcgaaattgcgagcgatacgagagaactcacaagtgaatcctcttaagatctgcgcgagagtgagaggagcttggtctccatctccggattagataccaagcggtcaatggaattctgccggactagcccgaatttcctttctcgggttcccgctaaccggtcttgggtgggctccctatgtgcaaccatggctttgttcacccgcacgttcgcaattgattcccacctacgcgggattagggatcacctttcttgccactgggggacttccccggcaatcacaaagatggtggcctcgcccttggtgggcgccattgggggcaacgacgtcgagtcgagggggccttccaacccttgcggggcagcccattgctcgcttggtgtcgggccccaagtggcgaaggcgtctgggatctagcgccgcgtttttgggggttcccctttggcggttgccccgtctcgttgcacccattctccttctttccgccttctttccaacccgtttggttttggcctcttcgcatgcggtagtcctttgtctttgcttttgggggagttaacctttgggggggaggtatttgatgttcccttnnnnnnnnnacttaaaattccttttttttagcgtagttggacgccccctttaacaggaagtcacagtgcccgcgcaaccccgggtccccttgggtttaagagccataggggtatggtcccgaggcggttgtatgggatggcgtttggtggggcgcgggtgccttgaaagtttttcccttcgggtgggggcgccccag

SEQ ID NO: 415194 - DNA, 875 bp, Homo Sapiens
  misc_feature (494)..(512): n is a, c, g, or t
  misc_feature (586)..(602): n is a, c, g, or t
actggaccaatagacccccacctagtcacattttagaaagaacacatgggatgggagataccgcagccatctttcagtctatcatttggcagctgtaattcacatccctttcctgaggacctctgtttcctatgccattacaaaagctcaaagtctaggagctgatcatctaatcaggataaggtatggatgaggctccttgggtaaagcttcatgaataaaagcgtcatgaataccatttctctgtctgaaggcctgaacttaagaacttatctgctttgttcacctgttaggcataacatcactactctggagattcccattcaaaaagagaaaaggaaaggcttggcttgcaattctgaagtctagccagcctaatgtggctgttctttggggcctaggtatattccctgggggttgttctctggtgcttttgaccctgccctctgatttttccttttctattgaggcacttgtgtttgcagctgagtagnnnnnnnnnnnnnnnnnnnaaagcctactccctcacagaatttgggggtccaaaggcctatttttactactacccctgtccaagctgacatannnnnnnnnnnnnnnnncctgtgtatttctcatgtatcaatttataatccattctattacacaagagccactcataaaagtctattggaaatagtcctttttctatgttgggctccctgtgaggctgatgaacaacatacttcagattctaagccttggacagggtctaaaaggcatgctggtaagacacgtaggcaaattacattgtctgaaatgtcttaagatgcactcatcttcctgaggtcttgagcaagtatcttttgcccacttggattggtcttgagagccat

SEQ ID NO: 415195 - DNA, 627 bp, Homo Sapiens
agaccacgatctccgggcgtgtttgcaagaagtgcttcagcagtcagtgtctttcctgtgtttgccagataaagatatttgtctgcatatctgcatagcttaacagtaactcaggtgctgacgtagaagtaaagcatgtgagaatgctttggatcatacacttttcacataataacaaatttttctcgaattggtttaacagtatcgttttatgctttttaaaatgtatctttgatatgagttgttgtcatttgcacaagttaatgattttacctccccagctgcaacatatttttcaaatttaggaacccaacttaaccatctgaacatccttcttaaaaaaataaagaagaaagctcacaactatgcctgtgatctgaactagttgattttgttaacggaatgttatttatatagtgatggttagagaaggctctggtcatttctatttatattgtatgtgatgttttactagaaaaacaagttttaccttaacatgaaaaaaatacattgtagaacctaatggcaagttcacctccgaagagggctaggcggggactgtaccctgggttttatctcttcctctccctcctaggacaggttgggggttgggatgcttacttttga

SEQ ID NO: 415196 - DNA, 774 bp, Homo Sapiens
gggaagaggaatgtagagagtgggcaaaatacaacaggaaaggtcaaattcaccctctgagggcccggggcacgggggcagcctgctctcctcctggggccctgttccctgtggggactggaagagaggctttgagtctagggcctggggcagccaggactgacgggggtgcagtcctagaagggtcggcagtcacggtggcccaccatggcatctccgtatccttgctgcatgctgcacccactccagctgccagagcacggaggcagagacgtgggagccgatgaaggtcgcacgccagcctcccacctgtgagacaaagggccctgtcactggaagccacgtccagcctggccccgcaggagccaggctctgcgcctaacggaggactgatgggaaagggaaggctggcagcagtgaggttttttgaccttggcaatgttcccgtcagactgcagaagaattgactattcccgttcaggtagatgatgaccggccccataaacagccaccaagggtcaccctctccctccccagccctgaaggccaagaaatgggactgggctccttggatttatgaccttctggctcctgcagagagaggaggactggggcttgaccaggacacggggctaaggactgtccttggatctcagtaggacagctgaccttccctccacccaatgactgctccagtctgatcgtcctgggcacctgataatctctttgtgcaaaacacaggaagccctggttagaggtgtggacaccaggtga

SEQ ID NO: 415197 - DNA, 1255 bp, Homo Sapiens
ggcgcgtctcgggtgctgtcggctgcgtccggagattcaaaccgtagatccagctggaaggaaccatggacaactgtgagcgtagcttctattgcgatcaaaccagatggggtccagcgtccggtcttgtgggatgagcattatcaagcgcttattgcacgcgaagagaaggattccgccgttgtggggtctgcaacattcatgtccagcgtgtccgacagatattctccaaggagactactatcgttgagctgtaaggaccagctcctattctttgccggccgtggtgtgaagagtacatgcactctagcggtccgcgatagttggaccagtggctctgtggaggggactgaatgtgtgagatgaaagacaggagccgaaggtacataagactcgcggcgtagacgcaagacctgacagatctccaaaccgtgggaaccactcctgtggagaactgtctgactatacaaaggtaaggacaaggaaacacttataccatggggacgtgaatttctggtaggagagtgcaccatgaaatggtagatacgtgacgtctggtagtgtgtatacaacctctgtaggaagctggctagaagttaacaccgaggcctgttgtctcagggaagctggaatacttactagaattgacccggagagggcaagaccacatttgctaatcaccatcccatgttctccgtccgtgtcccattggggccaggtagagactcgatggcttgataggaaaagtctagtgtcattttaccatggaaacctgtcaatcgatcaaatttgggaacgcgagagacctcatttgtgaaggctcgttgtagagtttctcccctggtaacgaggagattaacctatcacacccgaagtcgagttctgaactttttaaaacttgggcttttccccatttccccaagtccccatttgaagtaaacaaggaaaacaacaaattaaactttcactagtatgtcccctcagttggcttacgataaggctatcataaaaacagccgcaaggcgaggcacgacggattgtacctatggtacgccaaacggacaaaaagcagccatttgtaactccaacaagacaagacgtgggggggcggccccaccaacatattggacaagatagttgtggacgttacagtcgggcgactgacaacgaaacgttaagatctcgtcagacaacatccagagagaaaccattgtcgatcgacagatagacaaagagtgcgacgagcgcaacctag

SEQ ID NO: 415198 - DNA, 979 bp, Homo Sapiens
cgggaggaagtgtctgggcggtcgcacgcactccggggcgacgccgcgagtcgccgtggttcgggccatgcgaggcggagcctgccgtgtctactcgcgcactggcggggcgctgcggggccgcagggcgacgaggacctgtgtcgtgggtcccgagacggggcccgaggccccggtggacgagtctggtgggcgtcgtacgcccaggcatagcgaaacgaggtaggtacggtaggagcgccgcgtactacgcgctcgctaatgcagtcctgtggtcggtgctcaatgatactgatgcatggattgccagcgtccgggggcgatgctcacctacggtcgtctacctggtcctccgtgcgagatgcataagtgaatcgctgcacgtacgtacgagattactaccgtgcgagagtgaagtatattggacaactgtggggtctgtcccgatcatcgacagcagacaaatgctgatggagcatcaacgtgaactcccagtcgccagcctctgctcttacgagaaccatggtgctcgatcgaggagtttggcatggcaaacgaagttggatcgcattgttccatcggcttggtgcggcatcgtacagcccgtcatttgtcctcctacacaatatactgggagctgctactacaaccgcatttggtgccctcggatgtggacctgaggcatggccatcgtggcctccattttgcggactctcgcatggcgtcaaaactacaatcacctagtgagtggcgcaggaacgtaccatgagtatctcccacgtacaaaggagccaggatgggcatggggaatagcaatcatgcacggcttcacgttgggggctccagcgcgccctatcatcctggatcgatcccaaggcctagtcgttctatcaggtttcgtttccatcgtgaggcttcggctgcgccctaggtgcccatgattaatttcctgaagcaactactgtattaacctgaactc

SEQ ID NO: 415199 - DNA, 1035 bp, Homo Sapiens
  misc_feature (161)..(161): n is a, c, g, or t
ctcgtcgagaggtcacgccggcaagtcggcatcgggcgggattggaatccgagtctgcttttgcccccaagagacccagaatcctggcagctcggtttcagaagctgttgtcccttcgccggctcccgtcggggcctccacgtgcagcgcgagcgtgcccnatagctctgtatacagtcccatggtttcccattgtcctacgcggaaccccggcatgatggccctacgcaaggcgtctggtgcccgtttgaggaccttgttgtgggcgaggcgcctggatggggaaacgggcacaaggtcgagctttcctagcatagccgggtgcaccgaaagatttagcggagagcagcaagcggtgctgtaacgcgagggccaccattggagcttcactcgtagccgtgggcccgtgcgcagagagatgccgggaggtatggggtgtcgaccgcgaggaccgttggtctcgtgtaacagagcacaggattggctctaaactatcgttgcacccaagaggtagcgtctttcgcggcgcgtctgcaagcaagtcaatcgctagcggcaagtcttcggtccatttacccgtcgggcagtcgaggaagtgttgggattaggctgtccgtggagcagatggggggaaacccgaagggtagttcgatgggccccaagaccaagggagcaccggatgttccatgcgttggagttccagaatctatctggcgacgctaaaaagcttaccccctattgcctccaatgttaggttgctgcctgggaaagctgtgtgcgttccccatccggaattccattgacacgggtgcaattgcccgtttgcgcaaggttggcgccccggggaaccatgaccctcaggggagacccttgtgagaagactgcgccagaatggtttgggcgcccttggcggggcatctattggaaggcactggaccttaattgtggccaagggttcagcgcaattctaatccaagggtttccctttttgggccaagaagaacttcacaaagggtggcaggcatgattcccccg

SEQ ID NO: 415200 - DNA, 828 bp, Homo Sapiens
gtctaggcgggattgtgcgctgtccaggtaagggtggcgggtgtgcgtgcgggcctgggtgcggagccctcctcgacgtgtctctcccgccctttccctccacatacccagccttggtcagtcgtgacctcccgactagcccaagtggctggcgtctcgccgttcggccgggcgcccccgcccggtcacccgcgggcctttcactagttcgtccggaggcgtttacttgcgaggtgtcctcagcagaaggtcgcgttctcatccgactaactcttgctcagtcgtcacgtgcagccaaggaccgactcgtactgaaccgcgcgtccagctattatatgaccacctcgtatcccaaattatcccgtttgatgaagcctaaggatttcaccgtctaacgaagaacatgcgccttcatggacgcacgttctctgtcgaagacctgtgccttcatcgtcgtggatttcctagcagccgttcgatcatttgcgcaaccgtgtaacttatttcggtaaagagtctgttacgcacggagtgacccggtagcctatttcaacgtatcgtcgagatccgcttacagtagccaggcctatgcctgtgccgaccaacgtggcattgggtcacacgaaagcgcaagaaatttcccgaacgccacctcgtcgcggtggtgattatcagcaagcccttagcatctgccgttcctgtctcgcactcgtcaggcagtttagtatgatttggactaaacctctaagatcacttaagcgctccagcgccaccgacatgtactaacgaacacaccggccagcttctaacgccgcatttggccgccgg

SEQ ID NO: 415201 - DNA, 437 bp, Homo Sapiens
  misc_feature (146)..(164): n is a, c, g, or t
cgacagacacgccagcccgccgccacagcacagggttctggaggtcgagctgttctgcgggttctgcggcggcgctgggaagagacggcgcccgggcagctcccctgtcaccggcttggaggagcggcgggctcccctagcccagnnnnnnnnnnnnnnnnnnncgggaacgccaggctcaccccagctggggaagctccgaatccctcagatcggcgacctgagtgctgtcgccccgagaaaatggaggcatcgagcaacgagctgtgctgagaccgagagacctcagttctgcgaaatgtcggtgcctggagcttgcgaatgactgcggccggcgggttgtcaaggacaacattccttatggcgcaaccaacagcgctgtcaccaagaaactggactctgagaaaaaagagggtttcggccaccgagaaactcca

SEQ ID NO: 415202 - DNA, 1193 bp, Homo Sapiens
ccctgtggaccaaatattttttttggaaaccccacttggtggcaaccacggggctaggtgcgggaaactcagcgagtggggctccagcccaagctcacgccctcgaggggatctacttctctaaaagccggttacctaagaccaaacttttgccaacaaaatttctctctcccgtgctcgggggcggggatcggaccaggggatgggaggcaggtatgtgtggctggggacaaggtgaggcacgctatggactagagtagggcctatctaccctgcagactttgtgcccctcacaggcacctgggggagagtggcaggcagggtccgctcagggtggttctacccacactgctgtttgttggtgtcacccggggccccgagaaccacgcccttccagtaggacgggatgtccttgccccccggtgctcaaatgcggagacagaagctgaaaccgcccggggccctgtagtcgtgaagaaggtgtggaaagatctccaatccagcccccgcgcgtgacaactggtcttgggggcaactggcccacctggcccgtctggttggaaacttcagccgagcgaggttctccgtggcttcgggacgattaactctaacaggggtggagcttcgtagaaagggccaacccgagggtactgtctaggggcccgtagtaacccaagtctcttccacccaatgataatgggcccgggatgaaattctgtgtgctccaaggagagtctcccctccccacaagaatgaagccctctacaagactcggcagggtacaatggacccttggttggccttggccggaccacccatcttccaaaaggggaaggaaggccgaaagaacatttccttaaggaacggctccaccactccggggggtagaaacttcccacccccaagtggttcctcccacagaggacggtttcctacacagccgcttacagagggtgtgtcaccccacgaagtggtgcccaggtgtaaaccagcaggctttccaagggtccttcttcctccccacgggtgttttaccgccagaaggggtttgtcggcgcccgaggtgttcctcaggagaggttatacactggtcggtccagggatggttggggtccacacctccagggcggcgcccctgtgggacaccagcccctctgttgtgcactgtggcgcccaggggtgggccgtccaca

SEQ ID NO: 415203 - DNA, 957 bp, Homo Sapiens
agctaggtcactgagaccaaatcatacgggacgcttaatgaaggaccgcattcaaaagggattacgccttgaagtgtcctggcgggcgacatttttacagattttaaggggcaaatttagaacagctaaaaaaaaggtttcaaagccgtgactactaaaagagcatctaggcctcccattttatcaggaggaattcaacttagaaaatgcaggtagtgtcatacaaactgaaatggagatacaatcctgatagaagattacacaagataccaggcattattgtgtcaaattagcactgatgatttacccatagcagtatgaacttcttggaggaaggaaagaaaagtacaacagcttcttcagagaaaagaacaaattggcataggaaagaagaaagacacttcgtttaaagaatgtattttgcagtaaatgcccacaaacagcccatagagagttcacttatttatgcatcaccatatgattattctgactgcctttagtctcaaacagggaaagcctccgcaaaaagcattctccaggtgttagtttaggtttgtcattatttcctatttatagactctgtctagtaaaagaagacaaattactgtaagtgggggtaaatgtgattaaacgagtcctctgaagataagaagttacatggacaagggtcattaacacaaatgacctcttttggccagaacatattttgttaatttagtggatttgaaaaaaactgcaaagcaagaataatctctactgcacatactcacagagaaaacatattcctgtttattcctaataaaataatttcatgactccttcagtattttaataacttactgataatgccagaaatatctcagaatacaccaagaacatattggaggggaccattatcttaaggggtctaatcggaaaccttaggcacatagtttaatccgccgacatttacccgga

SEQ ID NO: 415204 - DNA, 761 bp, Homo Sapiens
ctggcagcgctccggctgcacctcctgtgtgcgcgccgctgcgtgtgccacaggcccctcgaccctttgaccaccgccctcgggcctgcgcgtccggcagccgggaccggtgatggctgcttggactgactggccgtctcctcccagacccctctgtccctgcctggggctcgctggggctgcggcgcctgcccgagctgcatgtggggctggttgctgctcccgagcccagagcgagcggccctcggtgcccccgaggcggtgccccgccgcgccagaggtacggaggaggagctggcgtggccgtggccaggctccccacgcgccgcaaggcctcggaggcacgggctccccggagggggaccttggggcgtcccagcccaggacggaaggacccggaaggcagaagcggagccgggagtcgaggccgagccaggtggccccccgcttgcccccggccgggcggccgtggttggcgtggtcccctggcggggctggccatggcgccagcgggccggactccgggggccggtcgggccgtgcggaactggcggcgaacgcgagcccagaagggccaccggggcaggacagcccgggaggggcgcaggccgggggccccccgagggaaggtctcgccagcagccgcctctgggccacaggttgggcagcctgcgggggggccaacccgcgtgaaggccaccctcgggagggccacccagggggcgggaaacaagcggcgccccggggcaggccgccacagg

SEQ ID NO: 415205 - DNA, 474 bp, Homo Sapiens
tgacgaataattgaattggaaaatcatggcatccagaatggaactgcataaaaatctgctggagtgtttccgaaaaaatgaagacctctgggcccttatcccagactttctatttcagtggtccatggaagagcctgcaagcttggcttttccatctcaggacttagctgcagggtctcagggcacactgcagagactcgtcatcctgttgcctggaggtgtgcactggctatttgcagatgagccgccatcccgatgactgcccaatcctcggctgcctgtgctccgggtctccattcatttgaccagcaagacccacatccagcagcaaggactccaccgggatgggagcctggtgcttattctcgaactcagcaatccagcagtgcacctgggtctgtttccagcctggccaatgatattctaagcatgaattattacatattactaattattaaaaattaacatgctaat

SEQ ID NO: 415206 - DNA, 1091 bp, Homo Sapiens
cttcagaggggccctcagcgctctcctgaagccctcttgtgtcaagaattgtggaccatgcgagtgccgtctggtttccatcgcagcagtccaaggactgatactgatctcctctggtgacagctggtctagaggcctgatattctcctacagaggttctcgtctcgaatgccccacaagatagcgtccaggcgcccctcgagactgcaccagtcgagtggattcattgcttgttgcaagcaagagcacatcatcggagtaagattgcatgggctctgattgtatggtggtaaggttcacagatgaccgagctggttactcctcctgacagactatatcagctcatgagtactagttgaggagccgtcgccgtgacaagcatacgaatctcgcctggagactttaccagtggactagggtgagctcgatctcgcattccctagccttggttgagatccgtgtgacacgagcttcgcattcgccgcgacgatctagcgggtatcgatatcttgcatcgttccaatgaatgggagatggatcgcttcctgttttatcggctatccacactctcttttttggtcgtgttcttgaggtaatttcatataaacgaaaagctacaattgttatccaatttggttgaggagggaaagttatgtgaccaacctggttagggaaatgaggaagttcataggtacagcaaaaaacgattaagtacaactcaatgcgttggtctgttcaaatccacggcttaagcatagcaaccagggaagtgactgtgaataaccaagactcgacggaggggcttatacagacaacggccgagaattttatacccttcgtttccccttaaggccctttcaacccacattcgttggcattttgtacgccatcgttggtttaccatggctgcatctcgtctcacacggcaacagagcaacaaaacgttggcagttaaggtttgtacacgacacttgtctagccttggcagtgatgcgtaggaacactcatctggttcaggggagacccgtgtggggaacccttgttacagttgacagggaggcacgctcccgtatcattagcgtgaatgtcga

SEQ ID NO: 415207 - DNA, 771 bp, Homo Sapiens
agcacaatgcattacccacatatttgtagtgatcctggtgtaaacaaaccaactgtgctgccagtcatatcaaaggatagcacatattattatgtacagtacataatacttactaatgaatgactgttactggtttatgtattaagcttactatactctttcatcattattttggagtgtactttttctacgtattaaaaaaaattaactgcaaaacaacctcgggcaggttcttcaggagggattccaaaagacggcattgttaccataggagatgacagctccatatgttattgtccctgaaaaccattcaatgaaacaagatgtggaggtggaagacagtaatattgatgatcctgaccctgtgtaagcctaggttaacatgtgcatttgtgtcttagtttctaacaaaagcatttataaagtaaaaatgttacagtaacctaaagttaatttattattgaagaaagaaacaatattttaagataaatttagtgtagcctaagtgtagagtgtcttataaagtctacagtagtgtagagtaatgtactagacctccacgttcacctgccactcactcactgactcacccagagcaacttccagtcccacaagctccattcatgaataaacctccagtcttctgctggggtgtaggaggatcactcttctggatgcaccgagtagaagagagaatctggggatctgcctacttctgtaacagactttcaagcccgcctttcctgtttttatgcttcaaccatcaaccct

SEQ ID NO: 415208 - DNA, 850 bp, Homo Sapiens
cttagaacaggtactaagtgaactggagcgcctatgtctggcaggaacaggactacagtaagctaaatgtttcaaactacagtcaacatcaaaggtatgcctggaactgatggctgaatgcagaggacctggactggaggaagcattatcatggcaagcataattgtggcgacaccacgtgcctgtttgcatctgaaaaagatatgagtccgccaagagtgatggatctaaagatatttcgctgcagtgagccagagctgaacaatctaattgcattaggagacgaaacatgatagctttaagctctctttgatatgttagtcaatatgagttcagtcatggtgtggactggagcaaaatgtggaccctgcttcgttgtcctaagatactacattggggaaactgtctagggtgactggtcagaaggaagcttggagcacacagtggcatttaggtaacgcatacagtaacgggcaacattggtacagaacggtaacatgagtctcatacacacacacggagttaaaacgtgggatagtatctttccaagttggattgcctgagacttggtgagaggaagtatgcctggagctttgccagcaaagtcagatcgttcaagaatagatggcattggacgcgggttcggttggcgatgaaccatggcgcactagcaacggccataacaacacgaacatcgttaattccgggatgggaagttatactatgtagttacaaagtggtgggaccaaaaatgttaggcaaacggcatggaaaagggccgaaaagaagaaaccccccgaagggtgcactggtagggtttacttgatggggaaaatagggatccaaccag

SEQ ID NO: 415209 - DNA, 1372 bp, Homo Sapiens
gctggtcctgagcttcggagacttagaaatgggtatgtgcttcagcggtgctctgacttcaggaagccagtgaagccggtgtgtgacgtcacgtgcagttagtctgtgatgctctctcccagagcccagccattcatccacatcaaataaagacaagtcctaggccccagcttggggcctgtccccggggtcacctcacagacagcatcctgggatcaggaaaatccatgatgttcaacctggtctggagaaccagactggaaacctagtggactttagttcgatgggcatgtctgctcttggagcagtgtcttgctgtgtgctacgcgtgcctatcatcttgaacgtacccggttgacaagagtcttccagccctccgaggtgtcgtttcatagtgaaaaccgtgtcatttgctgagtagctaaggagaaggccaatgattataggaaaacttgaggggcattggaaaataggttatcgacaacgttatcccatcagcatggggtcaggcaaaacatgatgtgtgccccgtggaagaactaggaattcgtcattacgccattcccaaacctggaagttccagacagtcaaccctagcggaaagcgcgctctccctgggtcgaaatacaggaagaatcgtagcaaaagtacattcagtctaccaaatacgattgccagaccatagggacagtggctaggtttccccagccgaacgtgcacactcggttgaggcgccacaattattgtttgccggcatggttcgtattcctcacgggggcgatcgtggggtttcccacggcttcatagggctcctgggtcgtcgttatggtcgcacttttgcccttgtaaggggggttgtgctctcgtatgcctttagtctcttggttagaatcacctttggcttggtccaattaggagatttaaggacccaaaagcatttgttgcgatccctgggaatttggtaccccaagtacataatctcgtacgtggctttataaacagacggtcgaggtgtaccaaacattcagctttagagcataaccgtaaacttggagagatccaaacaatcatggtttgcccgtggggcgcccttctcagggggagaaaaatgctttgaaagcccttgcagtgggttccaagggaaggcccaagggtgccctgggggcgattaggaacggttccccaccgcggaatgaacgagccaactgaccttggtgggggaccatttttgccctaggtgggcatcggcgaggaagaatatcgacctccacatggcattgaacgcctccccgggaccctcttggtacacacaccagggtgaggacccctcggggcacgtttacaacagatttaggcaactcaagatcatcgc

SEQ ID NO: 415210 - DNA, 727 bp, Homo Sapiens
ggagtttgctatgggccagttggcttgtctttgaccactgggtgctggatcttactaccttacgggagagggacacgtaactctaaagaaacagctggaagagaagatttccgagggactccttcagagcaagagaggaagacggagatgaattctacatagaaagcctgagaaggcctctcagagatggcttccttgccctccccagatgttcacagggttaacttaaaaacgaagcatcatggagctggcaaatcatctctgcatcccaaagacagtgcgacatgtgataatgactgtgaagcgcagctaagcccgttagcaggaatgaccaggagtgagaggcagcgctggagtgtcaccctccaacatcgtctctttgtttgaggatcactaggaaaggagccattagaaaaacgctagcctggtaatacggagggaaatggatcttggcagggctgtgttacccattgagaaattagcaaaaaccattccaggggaagaaaagcaggggccttcggtgctatacccattgaggctcttggggaataatgacacatggttaccacctgaggaacccctgctgaggcagcttgacttgcccagtggtctactacaggctcaggtgagtaggagggtccttcccaggaggggcagtgatgctcaggcagggctgggatgctcaggctccttgcaagagctgatcctcaagtcttgaaccagtccc

SEQ ID NO: 415211 - DNA, 186 bp, Homo Sapiens
  misc_feature (26)..(26): n is a, c, g, or t
  misc_feature (29)..(29): n is a, c, g, or t
aaggctatctatgggttacaccttanttngaaacacagtggtggtttaaaaacgtgtcgccgatcggatcgtaagcatagtgagtgtctgaagcctatcggtcatcgcgctcagtgccgcgaggtcggatctgttagcgcgcgcggaccttgcgcactgcgcgcgtgcattctcatgcggtcggct

SEQ ID NO: 415212 - DNA, 304 bp, Homo Sapiens
  misc_feature (70)..(189): n is a, c, g, or t
tgggttgaagctattctccggccttagcctccggagtagcttggattataggtgcctgccaccacacctnnnnnnnnnnnnnnnnnnnnnnnnnnnnnnnnnnnnnnnnnnnnnnnnnnnnnnnnnnnnnnnnnnnnnnnnnnnnnnnnnnnnnnnnnnnnnnnnnnnnnnnnnnnnnnnnnnnnnnnntgagccaccgcacctggccctaattttgttttctacatttgccaggtatcattgaatgagggggtttaacagcttaaaggaaaacaactaagaacactacttaagaaagataaga

SEQ ID NO: 415213 - DNA, 695 bp, Homo Sapiens
ctcgttggtaagcatgttctagggagagctagtggtagacaggcccaggccacagcaggccttgtagatgggccaggctgcttacctgtgcactaggggtggtacttggccctgccctggcccctgtgtgggcttatcctctgctgagaccattgtggttctctggtgccagaggcacccagaggtctgtgatctgcctgctttgaggcgggaagggttgttccagttctgctttcccaagcggtggctgtgggcaacccttatgatccaggacgcatggtcatcttaacgagcagctggctttacacccagggcgagcagaggtcttaaattatgcccgttgtcctggagtaatttagagcagcctcttttgtattcaggcatcctggtttgcatggtaaggtatgaatatagttgcctttaaacagcacgatgaagtgggcgggttattgttctcatttcaccaaggaggataatggaccttagcgatctcgagtgactttcccggccccatcccctttgaggggcagggctcgctctgcttccctgtctgggcaccaacctcctctctgcacctcagtccacgccgggatgtcctttctgacctcactgcagtggcacttccccctcaaccgggggtgcccagaaccgaatgggtgtatacgggtgaagccaggtatgacctggtactaacc

SEQ ID NO: 415214 - DNA, 1362 bp, Homo Sapiens
  misc_feature (71)..(85): n is a, c, g, or t
atgagccagtttgcccagactatgctaaattattaatagggtgacagaagacacggttcagtgatcagccnnnnnnnnnnnnnnnggctataaaacattttgattccttattttgtattttttaacgcaggggtcctcacttctggttcacccagggatctgagaacagtatgcatcggcggtgacgagcccacgacatattgggggcctcatagacaactccttttggcccagagccctccacaatgatccgtggggaccctaccgggttgttgtgtcgccacccatgccgcgagcaataatcttctttatattatttctttgtgtggtaaacaaatatagaagtctcaccaaataattattttttccccacgaggggcggtgttatttaagagaccccctcatgagatgcgtacaaccaacaaacagacatcctaccgctatgctcaattgagagaccacacaccaagggtgtgctgagctgataactcacacagcgggttgtgagaaaaccaccaccacagcgcgtgggggcaaacataatataatagcacctgtggcgagagcgacgaacaattttcgcccccactactactgagggagggacacccgaagggtcacagaagagacagtgggtacgaactaacaagaggagcaagaggagaacatatgcagaacaaccaagagatacaacacaacctaggagaacaagctcagccccacttaaaacaaccaacacacacaaacaaacactcctgagaagacaacgggcgtcgagaagacacccccaaacaaaaaaaggcaggaggggagagaacgacaaaccaaataatgtagagcaacccccccaaccaccaacgaaaataatagtatgacgcgcaccacaccgcgagcgtacacaaacaaacaacaagaagagtcgacacgctccaagaagaaacacaaacataacacattctgatcaagcaaaggagtagaaaaagccaaccacgcaacagcacaaccgaagtaagacaagctaaaaacacgatactactcaaaaccaaagcagcggcagggcggcacaccaccagcggcgaagacacacgccaaaaacaacaacgagagcgcgcttaccgcaccacgaacaaaccaacacagccggcgcaagaccaacacacaccaccgaagagagaggccgcaccatcctactccagaggagccgtacatacaaacagcagcacacaaagataatgcgacacgtcgcgtgcccccacgacacacgagcacctacccaccaacagaacgacttcgtacgcagaccagcagccacagaacacaacagcaaactactaacaagataaatacaacccagtcgaagcc

SEQ ID NO: 415215 - DNA, 1130 bp, Homo Sapiens
  misc_feature (442)..(442): n is a, c, g, or t
cacgcgggcgcacacacacacaccatcctggacggcgttcaagtcaagcacgagaaacagccttctgcaagggagaggaaagaaagctggaaatccagacagactgaagggctgcctgcttttagacttgactttgaccgccttttcttctcgggccaagaactgtggcagtgcagaaattacaattaaaaaatacataagactactcccggattgcttttttttgggatattttattaaactaagacacaaaaaggcgaccccaaaacaaccccgtgtagaaaaactccacaaattcggggtaccgtgagaacacgttcaagtctcaggcgccccgagggtgtctcgtggttacgagaacctcaagaactcctcttttatatttaacaggtgacacaactaacagggtggcagagggagagtgaattttttcacccacatnttcatctcagaggaggcaccttcttctcacacacatgtgtgtcgcggtggcacaagtgggccatatataccgtgtgggttctccacacgctgtggacgagagggcctcgagaataagcgcccagagtgtacactttttaacaaagagcgctgtgtgagaaaaaggcgcgcacagttgttctccacacgggggggatctggttagccagaaaagagggagcgacgaagtctaccacagagagagtgggagggcgtttttctcacacagcgtgagagcacagcgcgcctgtagaagatatctccaaacagccagcagaaaatcgggtgggggggacgatcatccccaggggagccctccctttatggtccaccaaaaaatcgtgtggtcgcgccacaagaggcagtactttattttgccggcgacccacgaaagggcgggagaagatctttaaacttgccgcagacgagcaaggcggcggaaatacctcttggtatggggttggcacgcaataaccacaccgccggtgtggagatacagttggtggtggcgcacacgaggagaagaaaaagtgtcatccacccccgcccgggtgtgtgtcatccagctagaggctggtgttcaccatttataagtttcctcaccaaatagttccgccgccggatgaagcccccacgagaaagacgagcgc

SEQ ID NO: 415216 - DNA, 338 bp, Homo Sapiens
aacaagtgttcagaggtgccatgcagtaatgaaaccagcccaggagccaggctgtaaggtgctgtaattcaagtaagctttggttaatttaaagggatggtagttacaccagctcctaacccatcgccatcttctgtttcatgtttttgattactgagaagtgacactcaaatgtttattttttcttaaaactactgagtacatttgtaacagctccagtttctactgagagctcatttatgccatatttcctttgctcacataactctaagagtacttctgttttttactgaaagcttgtatttctgtctctgctaagttataaacttactgatgac

SEQ ID NO: 415217 - DNA, 178 bp, Homo Sapiens
  misc_feature (48)..(48): n is a, c, g, or t
  misc_feature (98)..(98): n is a, c, g, or t
  misc_feature (106)..(106): n is a, c, g, or t
ctcctccgtcccaccctctttgacaccaactttcgcccgtcggagagnggcggctatacccccggggcgcagtgtggcgctaagacgcccgcgggtcntccacacncacagccgagcaatactcacccgaagtgagcccccagcagtcaggacgcacataatggcgacgatagtagtg

SEQ ID NO: 415218 - DNA, 738 bp, Homo Sapiens
  misc_feature (169)..(240): n is a, c, g, or t
tacaaatctcctgctctgtgcccgcgcagtccagtggaggagatattcctaattagggggcacttccaaggggcggagtctccgcggcgagtggccgtggaggggcgcaaggcagacggtctccagccacgatacctgggccaatcccagcctgtcacgtcatgcctannnnnnnnnnnnnnnnnnnnnnnnnnnnnnnnnnnnnnnnnnnnnnnnnnnnnnnnnnnnnnnnnnnnnnnnaacaggacctttttgaggagttgccatgaggactgtcagacgccaaggcgccccgagaggcacttcgcttccatgccgaggccaagggcgcacaggtgcgtctggacacgcgtggctgcatcgcgcacaggcgcaccacgttccacgacggcatcgtgttcagccagcggacggtgcgcctgggcgagcgtgtggcgctgcgagtgctgcgggaggagagcggctggtgcggcggctccgcgtgggcttcacgcgcctggaccccgagtgcgtgtccgtgcccaagccatggacgcacatatccatgtgcacccgaccatggagcgagcagagcccagacgtggagcaggccgatgcatgactgagggactgcagacacaacacatggggagacatatgagaaccgaataacatggcgatggaacagacgacagactggccatattagaccaaagatcaaagccgagactgaacgagaatccatgaaagacatagaag

SEQ ID NO: 415219 - DNA, 1080 bp, Homo Sapiens
tggtgtcgccggggctagggagcgcgttctcccgggaatcgcggcgtgtgatccaagtggtggcggatcagttgggggctgcgtagcgggctggctcaagcaaccaggtacgtaggtcggcggccaattcgggcgcaagcgtgctgggaagccaggaagggccagacatggtcagtagcacggggctgaccacgcgggaacgacgaaccggcaagaatccaacgtatagagaaccccggtgcggatactgacgagagcgagacaggatcatgagtgtaccgcggggaccgtccatcgtgtgcatgacagactgtcgtcccttagcgaccgtcggcgctaggataccctcctgctcgagtgactcatatgtagcatgacccaggtggatctaaccgaacgtggcgcctatggtaagacacacttcagcgacgtcgaggagaaagcccatgagatgtgtgtcctgtccctgttctgaagggctgaggtaggaaggtcggagtggagcgcaatcttaggcattgaccacacaatcccacaatatttgagggtactagtacggacggctgctcactctccagatgtgacgtcactcgcaacaaattggggtacgcgccaggcgctacgggttgtggtcagtggatgccaacgctccctggagtgagggcccctgattatgacggccctgggaggcgcgcgaagcaaggcccatcggactaacaatcatatcccaggacggccggagcatgggtgcagaatccgagaggcactcggtttcaatcggagagcaggggaaccgaagccatgagcctgaggaagcggggcagcagaatcagtctggagacatagtgcattgggcaaccacccagggatggcgttggagggcgcctcagagacaggctgcggcaagggaaggaagggccccccgagagggcggaaaagccccctggggcaccacctccgcgtaacacccactggcatgccgcctcagaaaccctggagcccgcaatctgcagtgggcgaacctagaagagggcacagagacaggctccagtggagcagaccgggactcagggaagaaag

SEQ ID NO: 415220 - DNA, 258 bp, Homo Sapiens
tgcagccattacagcttttggtgatacagtgaactcagatttttcattaattcttttaactggttattactgaaacgttgacaaaaagtaatgttggtattgaaatcttgagtctggccaatgttctatcttacattcctaaagaattctaaaagaggattccaagaatgtcataaatggatggtttctccatggatgaaggaatggtttattcacttgctgataattccagcctaaaccagttgagatcatattgaa

SEQ ID NO: 415221 - DNA, 1957 bp, Homo Sapiens
  misc_feature (1250)..(1345): n is a, c, g, or t
  misc_feature (1538)..(1599): n is a, c, g, or t
gacacatcggtaatccacagaacggaccagataggcagagagcagatactacacatcacgcacaccagaagatgataacaagagaacacacgaaaaagcaaagaaaaacagaaatagtcgataaaacaagaagcaaccgaggaacatagaccaccagaacacaagaaggataagagatgaaataacttaaagacattcaataactagaaatgaaccaagctgacgaacccccgcagtcacagaaaacgcaacaagaaacagaataaaaaagcgccaccatggcaggcaaccaccacaacatcgcgaagacaccaaaacacagagaaccagccgcgacttcgcgagactgtccagactccgcaaatctaataactacacagaacaacagagaacacaagcagtagaaaggacagagaaaacaacgaaaagaacgcagcacgcacacatgagagctacggagaagcaacataggagaagaccagagcgaaaggtccagagggaaaaaccgcaccgcacgacgcagaaagaaagggagagccaagaacacgtcacaaatcaacgacaggcaggaacagatccagggaccaaccaggcgaaccagcgaaaacaaacgacaacaacacaaaagagcaaacaaacacaaagaagagaagggagacaaagaccacccaccaacggcactcgagccccggacgagccaagtaaacagacaaaaacgaacactgattcagtacggcgtcacacatacttcgagccaggacaggcccgggaagacagagaccaatatcgagctatgcagaaccacaccacgtagaggaaggtagcgaggacggatacgcccttcactgaggagcatacaaacaaccgcagacacacacacaagagtaaaagaaggaaggagcgagaaagccagctaacacgaggaccaaggagaacaaaagatgaaaaaagacacgacgatgaacgaagcacacgccggacaagaggaagaaaagaaaagaaccagcgccaaacgcacacacaggagtacagaacaaagaagaataaaggaagcgagagagaaggaaagagcgagaaaacaacgcactacacagaacctcggaagcaacaagaacccgcagaacgatggacacgcgcggacgagcaaggaagactggcagtgacgcagatggcgagggacgaacaccgcagataaagaacagaaaaatggagcgaagacgaaatgaaacaatacaggagagggcgcagannnnnnnnnnnnnnnnnnnnnnnnnnnnnnnnnnnnnnnnnnnnnnnnnnnnnnnnnnnnnnnnnnnnnnnnnnnnnnnnnnnnnnnnnnnnnnnngagaaccaacaagaacaatcaagatgagaaaacacagatcacccaacagatagaacaccacaataaacgagagcatcatagaagagggtcgaaagaacgacaaatacataaaaaaactaatcatttcataataacccacacacaacaaacacacatcaccaatgcctaaaaaaatacacaactacaataaatnnnnnnnnnnnnnnnnnnnnnnnnnnnnnnnnnnnnnnnnnnnnnnnnnnnnnnnnnnnnnngcaccacaataatctaccatattactcataccttaacccatatcacacataagtatacccaaatcaaccaacaaccaacgtggcgcccataaggaagcacagcgtcgccacaaaggaacgagtgggagccagacaaagaatcaacagagagggaagagaacaaagaggatagagaacgagagacagcgccgaaacgatcagtatcagactgagcataaaaagaaatcaggatagagccatgactgggacagcacaagatacagaaacttaagaaaagtaggaaaggggagagagaagcacagagaaacacgaaccgacgacgagacaaaccagagcagaacgaagacaagcatgcaag

SEQ ID NO: 415222 - DNA, 182 bp, Homo Sapiens
ctcggccacgagtgcagtcagatcgtaactcctaaggcagcacgcatcggctgagtcagcattcattagatcgatagtggtggcgatacatctgacagatgtctattgatcgcgccgtcgcagtacagtccctggaggttgccctgccttagtcagcgatagcgctggtccggccccagcac

SEQ ID NO: 415223 - DNA, 840 bp, Homo Sapiens
  misc_feature (487)..(487): n is a, c, g, or t
ccagagacttgtgtactcgatggaaggaccagcataacccacacagcccttcctttccttggtgtgcacgatggctctatgcagtcttatctccagctgggcctctgggttcaggtcagacgagtgaccacggaaaggaggtgcgtgacagcctactagttgtgcgtgtcaaggctgtgcgtgatgcaccagagatgatctccagcgggggatggttcccagcaggaacggagagcgagtgatcagctcagcgtcggcggtctgtaaggtcatgcaccccgaaggcatatgcgacgtaaggcggtctttcgtcatccactggtgaacgacagaaagacaaactggtggctattggccatgctatgtacgacaggacttgctctacaccaaagccaatccaactgtttcactcactgtgacaggtcgactacactacgcgacagctttggactatactttccaatagcccctgacttgatgccccgangccttcgaccacgggcgacgataaggagaagcaactcgaagcaccttactagaaggttcaacaaacgtgcatctttccatccagtccataactgcacagctgcagcttggcagatgatgacggttttttagcaacaaggcatacagacaggttcttgctaattcctctcagacagagagagcagaactacgtcggaccaatctccgtctcccatactccttgtgagcacccgggaggattatattaccctggggacagcgtccccggactcaataccccaacatgacccacttattcaacttcgatccagcgcgatggccaagggcccttaccggccagcgtgaagctttccc

SEQ ID NO: 415224 - DNA, 614 bp, Homo Sapiens
ggggggactcggctatggtaagtaagtacggtgactaaccccgctacccctacaccccataccccataccaccggcgacgccgcagagggcagtaccgctagggccgcaggaaatagcccgaaaactgaagacatacgcaggaggagagcgacgctagagccacaatcgggctactatacgataaatagcaactaggcaagggaagcacgtaaggggaccacatacaatagacagcctattacaacagtatagcagggactacacgtacccataacactaccacaggagcagaaggccatacccggtgcccaatatacctaagaacaaaaggcgcgagcagaaaataaataataccccagctaactaaatagactgcacaatggggaagacacaagctctaacaacaatccaacccaagtcgaacgcattaattataggaaccgcaacccttacgacgatggccggtacacgcacataggccaccctatactagggcatgccaatgcagaaacgttaccagttaggccactagggcaggaaactgggccgcacgggtcacctaaatgtaggcgcccaaaactagtggaggaccccaaaacttaacacccatacc

SEQ ID NO: 415225 - DNA, 690 bp, Homo Sapiens
ggggtaccgggatgtggcggctaacgcggcgctccagcttgagggggggttgacggccttctggcgggtggcggtggttgaaggcgcatgagcttgcttggcccgtgtcgcttctcgtcccaatgaaccgtgacgcgacgagtgagggcacgagggtcgctgtcgaggggctgatcgtcttccacgtagcacgtcgtcggtgacgtgacgccggcgagtgtccgggacgtcgttcccgccagacccctccggtttcccctttcctgggacgcctcgagggcggctggcggccaccgtagacagggagcgctaccgttcccggacatagcgataacctactgtcgtgactgttgtctgtctagtgccggattgggaatctcgtgaatttggcacaagactgaagcaagaagctgtatcccgcgggctgcacaccaatgccagacaagctgtccaatgttggtgttggcttccatgggacataaaacttgcattggccaagaagcttatccttgatgcagatattacaagatgccgggacgaaatagagcggcagctagagagagaaaaagacgtagaacaatgaagaaagttgcagaagactagcatggaatgaagacatgaagacaagacactgaataactaattaaggaagcattgaggaaaaaaaccaaataaaacaagaataacaca

SEQ ID NO: 415226 - DNA, 792 bp, Homo Sapiens
ccgggatcacggctggaaggacgtggtgctgcggaccatgggtggtacttctgccacatttgctgggacttgtcctaaggacattttcaatttctgaaatcagtccccattgacggccaggttctcatacctgaatttagtctttgcttctggttaccagagatccaaagctgcagtcgtttagctggtttctgtttccaggggtatttgtgaatggaaataaaccatgaaaatgaccgaagacgtcacaaggaaagcaaataggatttaaaacagcaaagcggtgcctttgccaattccagggagtgtatctgctacataaccctgtactgtgctgggcagtgccgctcccgtgcacccaggactggaaaagcatagcttaggggttcaggggagaaacagtgacctctgcatcagcacaagtcctagataagttgccaggtcaaaggcaacagcacctggaatgcagagacaagctcacggactcgtgccccaggctgcagggacacccacagacgctgacttctcctcggtcaaccagaccccagtgctcggaagcatctggcccaggcacaatgaatgctccatgctgcctactccagctgaattggcgaagtgtaggcagggcggccaatatgccccaggtgcgactgacatggcctctaggtccatatatcaggcattacaatccccaaatgtgcgcaatgtatcccccgcattctcctagagttatagtgtactcacctggtataaatttggaagctattgctacacaactgatgatttcctcaa

SEQ ID NO: 415227 - DNA, 556 bp, Homo Sapiens
  misc_feature (166)..(166): n is a, c, g, or t
  misc_feature (342)..(342): n is a, c, g, or t
  misc_feature (361)..(361): n is a, c, g, or t
  misc_feature (394)..(394): n is a, c, g, or t
tgtttttttaaaaaaatgctcttacataatattgtcagagaaatgtagcagtgaatttaaaacaaacttagaatctgtgaagactcacctttttgagaagactaccttggctgtgatcacgttctcctcataaacttcatgctaatcagacatggatgtttcctanaagatacataaccctgagtcagttatatcctatttgatgtaagtaagaattacagattaattccagaaaaaatccaagaggagtaaagttctttccatgaagctaattttgctaaaagaaattatttttatgtccctcccctcttttaaataaatatcaaactttctaacctttcntcaaataaaccttcccagnagttaaatagaaactttcttctaagttgcaggntcaggttggttttggttttcccaaatgggggtttttatttccctggacctaatgggggaaaaataaaggggttggcttttttttcccctagaaacttaacccttttcccaaggggaaacccaagtggggccccccctaatgggagggttccccatttaaaac

SEQ ID NO: 415228 - DNA, 182 bp, Homo Sapiens
  misc_feature (70)..(78): n is a, c, g, or t
  misc_feature (101)..(111): n is a, c, g, or t
  misc_feature (113)..(121): n is a, c, g, or t
cgcttcccccaaaagcccttggccgtttcccctccaaaaaggggggtaattttgccccccaaaacccaannnnnnnnnacctccaggtggcccccccacgnnnnnnnnnnngnnnnnnnnngggtggggggaccacccgggggccctcttgacccctgtggaaaaacttgaaaaaggctttc

SEQ ID NO: 415229 - DNA, 1300 bp, Homo Sapiens
  misc_feature (16)..(16): n is a, c, g, or t
  misc_feature (1005)..(1014): n is a, c, g, or t
  misc_feature (1260)..(1260): n is a, c, g, or t
cccgcgcggcactctncgtgtagccctcgttaattcgtttattatccagacggggtgcggaattcccgggatcctccccggcggaggcccctgcggactgcctagagctgggtcgcaactgaggcgttatccgcgggcctggcctggggaagtggcggggaggaagaagaggcggccgggacgcgtgacagcagcattcgggaagattcttacggtgcccttcacgcggtgcctatggacggagaaagccgccgcaaataaaaccatcccccagagtagtcgtggcggaataatctaaatatgggtgttggattgaggaaacttgaatatttttgtatcctgaagggagatatggatgaacaagaaatggatgaacaagaccgaagataatgatgaagggataatttggaataggattcacagcgcgagagacagaagggaaagactttgaagcacacagactagttaacacatgagaaaaatagagctgaggaaaacaccgccatggttttccaacgtctaatgagaacaggtctgatgccgaaaggaattggacgacaacgggaacgttggtggatgcacagcttgcgtccccacaaggggtcttgacaaccaaaagtgtccacagctggattcatccaggccttaggatagacccatggcccggagaatttcaaagaaaaatgggaaatcagattttccggaacccttttaccctctaatcccaggtaggaaacaatacgggggacggatgtgaacatagcgttttgggtttttgccagcccttgggggctctccattcgacccttgtaaacaacggggctgggagcatccacgggacaaaaatatttttgtggggcccctaggcccaaatgtcccggcatggcagcactcttccctttaccaagacacccggaaagtgtcccagtcttccagggagccggggccaagcgtggcccgcagaaagtagggcccccctcaagtttggcaaccgtacaacgaaannnnnnnnnnttatcctagcatccccccgaattaaattctacgccggaagaggcgagggctccaaacccggaattcacggtcaacaaagcctgttttgtcatattacagaaaaaacctgagctctgggggggtttttacatcaccgtcgtgccgatgacgggctcccgcgggtgtacacacccattgtgggacccccggccatcacctctatttttttctcccggggcggcttttgttgctctgagacaccccgtncgataccggaggggggaacggcgacttttttcctctacaa

SEQ ID NO: 415230 - DNA, 1049 bp, Homo Sapiens
  misc_feature (24)..(24): n is a, c, g, or t
gtataacgaaacagcctctctcgngtaccacaggagctcctggcaccccggagggttgtcccccaccctgaaacatcagcggcagcggcctgacctccccggcactctctacgtcatgtgtctcagatggggacctgtgagtcccggaacctgactcacgggtttgtgtccactcctgggccaggtggtgtgtctctcgggaccaagtggatgttgagataccagccggacagctattataccaatgcagaaagaattaatggtggcttgggtactagtgccgggggacgggggagaggacatggttgcttgggccaaaggatggtgctgaagtggggagaagggctctgattccaggtatgttttgaaggtgaagccaacaagagttgctgacagattcagcgtggggatgagaggaaaggagagtctgggctgagcccagggtctcgcctaactagctagagggatgaggccacgctgacccagtggggagtggggaagggcagtgcagggaggacaatggggagtttgttctgagcatcccctgactgagatgcctgctggactttcagctcccgaaacctcttggatatccctcttcgagctcacccggattcggtccttcgaccaggggcacccgcgaaaaccacgtcgacgatgaccgctgggagacaccagccccacactgaggcgagtcccgcgctctggttactcatggcttgcaacccacgcagcctttcgttggcgcgcacgccgcgcgcccgtagttctcgagcgggcgcccggcgccgcacattaggcccgccggctatgtgtcatacgaagaccccagcttcagcatatccgattaaaactgccctcaccaccgctccctcgggtcaatcccgtgccaggacggtgatgggagtgaacgtaccacggagatacccgcagacatgtcctgcctccccccgctccccgtggctttcgcagatggacgcgcggccagaaggtacgcacgacactagaggtactgcgagactagtaccccgtctcatcccatgcttggg

SEQ ID NO: 415231 - DNA, 1386 bp, Homo Sapiens
  misc_feature (65)..(128): n is a, c, g, or t
  misc_feature (141)..(191): n is a, c, g, or t
  misc_feature (928)..(928): n is a, c, g, or t
  misc_feature (999)..(999): n is a, c, g, or t
  misc_feature (1017)..(1017): n is a, c, g, or t
  misc_feature (1086)..(1086): n is a, c, g, or t
  misc_feature (1088)..(1088): n is a, c, g, or t
  misc_feature (1122)..(1123): n is a, c, g, or t
  misc_feature (1192)..(1192): n is a, c, g, or t
  misc_feature (1258)..(1259): n is a, c, g, or t
  misc_feature (1304)..(1304): n is a, c, g, or t
  misc_feature (1326)..(1326): n is a, c, g, or t
  misc_feature (1328)..(1328): n is a, c, g, or t
gggtccggaattcccgggatcagactcccccaaaccccgaccgccggcctggcgcgcggctgcgnnnnnnnnnnnnnnnnnnnnnnnnnnnnnnnnnnnnnnnnnnnnnnnnnnnnnnnnnnnnnnnncccaggctagtannnnnnnnnnnnnnnnnnnnnnnnnnnnnnnnnnnnnnnnnnnnnnnnnnngccccggccgggcgtggatggagggcgccgcacaacctgcccgctgctcagagtgacgcgagccccgcgccccgcgcccaccatgtactacccgcaaggctacctgtaccatgcgcccggctcgctggcgctctactcgtgaccggcctactgcgcgtcgactttggcgattccgcgcagcgaggagatggcgagctcctcgtcaagataagcgttcagcctctacacagagtcggcggccttcacagatcacgctgccaccggcttcggtagatctctgaagtattcaatcaatcatgtggacacgaaacagaatattcaccaaacaacaaggtgagtagcatatgattgaacaaaatatactgaattttaaaagaacgcatacaatatatcacattcaactaacagactcatttttatctggatactgagtccttaaaataacatcctctatttccaaaaaaaatagcttcacctctctcattatcgccatatcccaaaaattgttaaagccgctaaactacaacaccctaaagaagaccccgttatggttctaaaaaaatgaatggaagacaatttcgattcgttcttgcccttttcacacattgctatttaatcaaaccttccatttttcctactgtgaatatcctgccggtgtgcaccgtaataatctaaaacaattggaaatgcaatatggcatactcactattaaaataaacatgttaaaacacaagcgncgaacattttgtattcccatgtcataaacctccaattaaaagctttagataacgcctctttccattacccntttatcaatcccctacanccctaccattatttatcgaccacatctctttttcgactataacacactatttaatatattcaaagttcntnacaaaacaatatattaacccatccattcttcgtnnttaccccacagataatattatgataacaccttaacaccttacaatgtaaatagtccgaaaaaaacctantattgttcatactccaccataaccatcgaaataatcttcattgccacatacttcgcaactatccgnnaaagacgttttcaaccaccaccgtccaacaacgctcaaaatatcnccttctcaaacccgcagacacnantatcaaaaacacaccgaaaaatctaaacactctgaaaaaaccgcaaacaataaaaaat

SEQ ID NO: 415232 - DNA, 1143 bp, Homo Sapiens
  misc_feature (210)..(305): n is a, c, g, or t
  misc_feature (769)..(862): n is a, c, g, or t
  misc_feature (875)..(875): n is a, c, g, or t
  misc_feature (975)..(975): n is a, c, g, or t
cggctggaccggtccggattccctcgatgcatcctccttgaaatgcagtttgcatgttttttctaggatccttgcttttctgcagaacaagaggctatccatttcaaagatgaactttgaaaatgctgaattctagaatgattggcagttggctctctgacttctagacgcaacagattggggttggaacacagataaaggagatttaannnnnnnnnnnnnnnnnnnnnnnnnnnnnnnnnnnnnnnnnnnnnnnnnnnnnnnnnnnnnnnnnnnnnnnnnnnnnnnnnnnnnnnnnnnnnnnnacggaagtgcagcaggtactgttcgtgtgtgctcacatccttgtgcgtcaccagaggctttctggaaacccctgtatctctgtacctgagggctttctctagccaccagaacatgctcagccccttcccttccacagggtgaactggaagttccgggaagtcgacttccctgaaagccgctctgaactaattacaaacaggagtcggaagagcaatacccagcttcctcactgattgtgtggtacaactcaaaggtgtgttctacactgtccccagacgtgccaaggggggtggcatcccaggtgcccacagagacaatctaccattcagtgcatcctggtgttgccttccttgccttccccagctgactttcttcattccctacagtgcttcttggcattacctcccaaataaactatctgagcccataaatgtctgagtctgcttctgaaggagaccaaccnnnnnnnnnnnnnnnnnnnnnnnnnnnnnnnnnnnnnnnnnnnnnnnnnnnnnnnnnnnnnnnnnnnnnnnnnnnnnnnnnnnnnnnnnnnnnncacttaataatgntacctactatcatcattatttattggccgttgttattactaaaaccaataatttgactgggattggtttatcagatctccggcccatctggaagccctgncctggcttttcctacctatggggaaactggcccaaactgggaattggcgcttaattatttccaccactggaccaccccaggttcattaatttccactccaatttgaactcccggggtttttcaagaacttttttctaccaaactggccccgaaatttaggtaattatt

SEQ ID NO: 415233 - DNA, 1106 bp, Homo Sapiens
  misc_feature (780)..(780): n is a, c, g, or t
  misc_feature (818)..(818): n is a, c, g, or t
  misc_feature (885)..(885): n is a, c, g, or t
ggctggtaccggggtccgggaattcccgggatcccaaaccccatggccttttcatgcacggagacaggcctctggatgtgcagccttgccaccccctgccccaatcctccctgagagctcctgcctcagtgccctgggctggtgagggagaagcctgtctgcacctgcctaattccagctcctccaggaagcaagggcttgtttgtcagagctgcagggttggccactcggtggggaggagtcagccaggattagagagcctgcccctaatccggcctgctgggttttacaaggatcagagctgctgataatgaacctcattaagggggagcaggagcctcaatccgatttggttttctctttgacatcttcactctgctcagatggcctgggtgctatgtggagcaggtgggatgccaaggccactcctgctatggggcagctggggctggggagggatggcagtctccctgcatgtttccctcgacctctttagctgcagcgccttgctgggctcctgggttggactccctctctgtgcccctgctccaggcacccattggctccatcctcctggttgtgctctgcaccccctgctcccttgggctggccctggctgggggcctgagagacagacaggaacccacaatcaggaggcaaccctggcctgcaagaggaagacagaggctcccagggccggtgccctgtgtgcccactgcaccaaggccgctgaataagcctgcccttcaccccctaagggctccttgcccaatgccaagntgctggggaatttctgtcagcaagccctgtggctccangtgacggtatttctaaagccaaacttagttacctagaattagcgccatgttggaaaacatgtcgcancagccccgggctgcacagtggtgtagcccagcctccaggtcccacgggaatgggtgggggaacttcccaccttaaaggctgcctcctggcaagccaagcctctttttcgcccggcccccaaccccctctggggtgaaaaaacggggtgggggcctcccctcaacagggtggggctggccttttcaccctggaatttcccccagggggctcctcgggaaaaa

SEQ ID NO: 415234 - DNA, 1348 bp, Homo Sapiens
  misc_feature (250)..(357): n is a, c, g, or t
  misc_feature (602)..(654): n is a, c, g, or t
  misc_feature (1001)..(1001): n is a, c, g, or t
  misc_feature (1082)..(1082): n is a, c, g, or t
  misc_feature (1173)..(1173): n is a, c, g, or t
ggtccaagtgctgtgattgcaggattggtttgtttcattttctcataatcttatgacataggtattgttagccttatgttacagcagtggaaactgagacttaggttaatcaatttgcaattgatttaggtagaagtagcagagctaggatctgatccttgctctgactccagttcctgaagtgtcactcatgagaagtcctgaggcaggataggatagtgggtaagaacatgggctatagagttaagtnnnnnnnnnnnnnnnnnnnnnnnnnnnnnnnnnnnnnnnnnnnnnnnnnnnnnnnnnnnnnnnnnnnnnnnnnnnnnnnnnnnnnnnnnnnnnnnnnnnnnnnnnnnnccccccataatagtttggaggaaaaaatgcccaatgccttgtaaaatacatagcacagtgcttgggaccctggtagggtcctccattaaagggaacccaggcccaataaattaagggaacattgggccctgaaaagggatcactccactggcccaaaaaaaccaatgcctggggaaaaggtcggggccccccttgccataaaccccaaggggctaggggaggggacttccaccccctggaaaaannnnnnnnnnnnnnnnnnnnnnnnnnnnnnnnnnnnnnnnnnnnnnnnnnnnnaactaaaatttcttctctccccccccacctccgcagaatttgtgaacacaaattttggtgcgaacgaacacaaaggcgccccccgacgcgctaccccagagaatacccccccctgggagggagaaagaaaaatttatgagggggcggccccacaagaaaaagcagaatattgtgtgtggggtgtgttcccctagcggaacacacgtggggaggagaggagagataacccccacggcattgtgtctcccactcccacaaagacaggcggcgccctccgatagaaaaccccccacacccttcacactcccacttctcacacagggaaggaggcgggggctcacctcctnttcgctacctcgtctcttccacaaaaacatacctccctttgacctctgtgcgcgagcgggaggagcgtacccacacaacanacaaaaccgggcgccgagagcagttgggtttcactatccccacctacccgcgccacgcctatcccccaaaccacgaccgcagacgctccgnaccctacttcttcccctacccgcccctccgctgaccgagacgagagatgacgaaccccacaccctgcccgtgagacgcgcgtgctctccttacgcccctgtggcgactccctattctatgtttgcggcgtatcgcgcttagcgcccaccaaccgcgccgtcccaataacatacac

SEQ ID NO: 415235 - DNA, 468 bp, Homo Sapiens
cggtccggaattcccgggatggagcaggcagggagagacgggggtcttcagagacacagaggaagtcccgacagagggccaggtacagatggacagggactgtcgtcgagggtcacagacgtagggctgccatgaagaaagagggaggcccaccatggagaagagatggaaaggaggggcggggagagccggagcaggcagagactggtactagggcccgcccttaggggtggggtgcccgggagagcagcctggagcacacagccctgagccctacctttggatggaggccggaggtcccagccctgcagctttctgtcccagctgccagcgctttgccctattgcacgttctcccagagaggccctcctgggccagggtctccacacatctgtgcagccccctcctcacttctggacccagtggacttgcacacaggggccaggatgtctataagatccagcctct

SEQ ID NO: 415236 - DNA, 933 bp, Homo Sapiens
  misc_feature (276)..(311): n is a, c, g, or t
  misc_feature (422)..(516): n is a, c, g, or t
ggttattccacggctgatggacttagacggttcttcatttcttcctgtgctttcaggccgcgtgtgtatttgcagagcctgcaccagcagcctagagcgttcttaggaacttggtgatatgttgacgggtcgtgtaaagaacttggactctgtgggccatactgaccagaatgcacctgagggcgtttttagaggcagtaccctggagagaattcaggccctggagtccagcggacctagactggaatcttggctgagtcactccctggctgtccnnnnnnnnnnnnnnnnnnnnnnnnnnnnnnnnnnnntttgtcttgtatttcatggcattattggaattaaaattaacatacaattcttgacagattggaagaggatgtgaagggagatcttgacattatcaggtccgtatgatatgnnnnnnnnnnnnnnnnnnnnnnnnnnnnnnnnnnnnnnnnnnnnnnnnnnnnnnnnnnnnnnnnnnnnnnnnnnnnnnnnnnnnnnnnnnnnnnntagaacctgaacatgaaattcagagcgcccagcacataggttttctgtaactataggttcagtcgttgtccagaaacatttctagagtccgtccggagttggattgatgccagctcttaaaaaactatgaaggcaggatcagtgtgcacatttaaacggtttcctgggtgaggaaaacacactctccactccctaatgttaacacgtagcgagagccagtattgatagggaaaccattatgggtgtagcccaaagtctaaacgccaaaggggttcacgtgtcttcttgcttctcatcactggtccacagaaaaacttgtgagtcccggtaaggaaaatcctaacaagggaaacacattggacgttacgaacaacaaacctcttaaaaaatttcctaacttttaccctggacgacagg

SEQ ID NO: 415237 - DNA, 839 bp, Homo Sapiens
  misc_feature (247)..(296): n is a, c, g, or t
agtgtggtcatctgctgtagtccagggaatcccagccttgcttgcaatagatggaactacttctttgggcttgcctgctgatcgcttccaagggacttcagcagctctgtttcagctggctcaaaggagaccttgctcagggagactcaacgtctgctggtataaagaaatgaggcatgctggcacaggttcaccccacagggcttggtgactgaggaccacagaaaccattttaggggctgacatnnnnnnnnnnnnnnnnnnnnnnnnnnnnnnnnnnnnnnnnnnnnnnnnnntttctagggaatagacatggacatcttcaaaaggccactgttctgtctgccacagaggacttcaaggccagaggccattactgatacatgaaagatcacttctatcaccagcaggaacagcaagtacccagaaacagggttcagatgagagatctgcatctgcaatgtcactgatagctccaaggcaggatactttaaaacaagcatactgcaagcggggggacatatgagtccacaaaacagctaagagcagcaggaaaatcacctccaacttacttctggcttccaaattgtcgggtgaaggaagctggagctcatgaagattcctaatctgccacagaattgatgccaagagaagttggatcattgcgtggactttttcaaacgggcccccgtccggcaacactgtggtgaagacaggatggcactgttcccacaactgttagactgggattaaatccagactatgggaagggttgcatgtatggcactgaccagagaatatagccagatagattgcacaaggcgcctgagtttatatcg

SEQ ID NO: 415238 - DNA, 960 bp, Homo Sapiens
ggaagctgaagccctccatcccgcccattgcgggggagatgttaacgaccaacagcttcgcgcgaggccacaggcctggcgtcgtgtggagaggggcttcgcgcagtttggggtgggccagatgggccggaggtgtagccaggaacggacagatgtccgtctcttaagtcttaggttttaatcgtgaagctgatccctggttcattgtgatccttctcacgctgtccatttgacataagaaacccgagaaaggaatgtacttgtctgaagtcccacagtctgttagtggcacagtcaggactagagaatttagctcctgaagccgagatcaatgctctttctgccacatcagcctgagaactttgagttttgcagtgtttggggaagatgctcccgtgaaacaatgaacaggaaaaacctgaagaagcctcacattttctgctagcgagaaaagccaaaaatgtcttccacgagattatctatttgcaatgaataaacaaaggatttaattttagtgatggagattaactgcccgtgaatcaccaccttacacaaaactgaaacctttgacaatacaaagggtaacttccttagtgtatctatacctttgcttactatcaccgaggctagttggcttttcacagccatttcttcatctcttcatgatccttgcgaaccaggtagtctaacccaatggcagacacagggttactctcacaaaccagttgataacgtctagcagaacaggcttaaaacctaagcatcaaactgtgttctaagcaaaagttacaacattgttaccatgtcgtggaagtttgggaatttggccctggaatagcttgggaacgcacaactgttacaactggtgcatggctccaaggccttctgcgtaacttcggttgggccttacggcaatgcgcgcatggtcgctgtacgttcatggcatgacacagctggacc

SEQ ID NO: 415239 - DNA, 443 bp, Homo Sapiens
cagctacagccaagcctctttgcttctctgggccagcctctctggagctgaatcgtggctggctggatttgaggagcctgcatgggcgcactctctctttctgaatcccagctagggctctcctggctgtaattactaagactcagctgctgggaatttccacgcctcctacctctctacagggcagtccctccatattaggaaacccactggcacgctccgccgttatcttcgcaagacttccgttgttgcctcaagttgcagattgccttttaacaggagaagacagtgacaggaatgtgctgggcactgatgacacagtaatgaccaaaggtcttcagtgtttttggggcatctccctaccttggatcacccctgaaaggcaacaaccaacaagcagacaaagctctgcccagtaacattgagatcccagaaaccagagc

SEQ ID NO: 415240 - DNA, 415 bp, Homo Sapiens
ggaactgtttagattcttgtccatttacctgttcgatctaaaacatcaagttttagaatgaaatgcacccatatcaaaattcaagttggctgtagcttgagcaacatcttcattctggccatttgcagtgagaattgatcaaatcatgggtttctgaagcagtaagttccccaaaggtcatcgaattcagtgcccttattacaaaggaggagagtgagactgaagaagattatacagttactgacttagtcacatttatattccaacttcgggctttctggacttgtctgcttagcatgtccacaaaatagcaggctggaagataatagaacaacaaaaggcagtcctaaagatggaacgtttctcagcgggttcaggtgaacagttaaatggaggaagaaattgaaacaaactg

SEQ ID NO: 415241 - DNA, 750 bp, Homo Sapiens
ggcaaaagtgacaccacaacattcattataggaagtaagagacattcatcactggaatattttagcaaatgaatcacaacagactgatagcataactcatgttctaaggccaagaacaagaattgcatagtttattttaagacagcagaagagtaaaaaacagattgaaaaacatatgataccctctccagctcagagctctacaaacagcagtggcgtttgcaaagttctatgtatcttctcaaatgtggtttcagttttaatgtgtgttgacatctttgtgtgcagaactaactggaggaacaacagttgtgctttttttcccttcttgctacaagggtgagaacagggaaagaaccaaacggtctgtgtttactttgagcagccatacaccatgcatggacactaaggtatggttttccttcaattattccaaattagtataatgaaaacatgcttatccctcgagccattggatgcgtataatgcagaagagatgcagtaatggagttgccttatatgctcctctgaagcagaagcaagtgaaagagacaagtaagatgattagaaaaactttgactttctaaaacaaataagcagtaaatgaactgattgagtgcaaaacttcacagaaccacacaaagaactggagcttcaaactgtaactttaaaaatagtagggtgaaaaattaaggggctctaacatgaaaccaaattaggaagaagagaagcaaaggatgccaagaactt

SEQ ID NO: 415242 - DNA, 546 bp, Homo Sapiens
gttattgccgctgtggggtgtgtggttctctggtggatgctggttattgccgctgtggggcgcgtggttctctgttggatgccggttattgccgctgtggggtgtgtggttctctggtggatgctggttattgccactgtggggcgcgtggttctctggtggatgccggttattgctgctgtggggcacgtggttctctggtgggtgctgattcaattccggacccacgtggctctaggctgtctggggccacagcatacaggaaagttgataatcacaggtgtggcatgttccctctccactgcccacccaccagcgtgtgagcccaccctgaccctctggagacaccaagccagaatgcaggagtgctgctgtgaagagtagcttcaaaaaaccgttcaaaagttctatataaaagcagttattccaaaacttctgtgtgatatggaggggaaatgcactccgttttgaaaggtctgacttggtcaccgggtgggctgggacctgctatcggaatggaatgtttctttcagtccctctgatgtt

SEQ ID NO: 415243 - DNA, 1001 bp, Homo Sapiens
gattgaaaaagtgaagctttagcagcaagtagaaaaactgaagcatcagttgcagtaactcatccattgagtgaaaaggttcttcccatgtccctactctcagaaatgcattctgaaatttcgaagaaacaagacattacacaagtacatggcttcactaccaaggggaagggcaaaagaccatctttgatttaattccaggcttcagtgtctaattctgtggcaaagatagctcatgaattctttgttcctctgccaagcgcaacagggataagtagccttgctctgggaatatgagtttgatgattgggttgcatgaaccctggaagcctggaatattcatctattttcacattcttctgtccctcctgactgcagcactccccaaacctacatggaagagctaaaatcaattctggtaaatctcatcaacttctaggacactgtggtagatttccttcagtttaatctctagcattaactggaagaaacattttcttactcagtcactacatttgtcaagaacataatgctatggttgaacactgcacgaaatgatagagattaacagtagcacaatactagacatttcttttttgctattctacttaatgcctgatgtaacctcatgaggtggatgttgtactcctgactttagagataagaaaactgaattttgggaggctaaataacttacttacagttacatagctcaagaaatggagaatggcaagaattcaggcctaggttgtctgattgcaaatactacatcctttctaatgcttcacttgtttggcttttaagctgttacatggcaatgaccattaatatcccccagaaaaactctgtggacgactaaacggggtaatgcaaaggtctgcgaattaaataccgggttccatatctgacagagtgttaccacaaccattttacttgtcaatgatagtggcgtgtattaagcactttcccagaaatacacatacgtgccgaacctaataaat

SEQ ID NO: 415244 - DNA, 1046 bp, Homo Sapiens
taaccggactctcaagaagcagcatgggggtcaaagcgcttgtgtagtagctgttctacccactgggcaaggcctcgctccaccaggtaccgggtttatcaagctaccacttcatctccaaccacgactccacagactgagtcagagagaagaccagttgtactgtgacttgtcacctgagcaagacaatgtgctgtattccccgatcatctcgctcatgtgcggtgattctgctttccgcgtgaaaactggatcatcgttctgacagcgggcattcacactgttccagaaggaccttctgactcgctggaaacggcagggctgacaaagtcagacctgaatttgccggagcacgtcatacgtgttcacgccgtcgttatagtccgccgctagtatccacgttatcgaaagtcgtccaccttcggtagagatcgtcgtcgagtaggggaggcaacccatcgttggtgcgtcgaccactcatggaccgccgatccgcgacacagtggggcgggcacaagagtgaccggtctactttccgacttgggggatggagcaaaggctggaggaacttagcaagcttgagcacgctaaagctaggatgggtagccactcttgctagggtacgaagggcatgtcgtccatgccgccgtaggcaaagtgctagcgggtggatgtgttgctgggctgcaaccggacacagggtaggccacgggcgatttagaagcgcatggggcttttggaagccgcggcgacaattgggacccgcctcccccgatcggggctggtaagttgggcccaagctacaaagggggcccaggccacgttgaaaacgggcaccagagggggtaatttgttcacattccgaagggacctaccataggaacaggctggacatgattagtccccccaacgattggcaacaggggggccacaacttggaggagggtgggaaagcgcgagtaggcgacattatctgtgagctgttgaaagaggtttacagagaccttcgcgtctgttcgacgaaccttttgcctattctcacgaga

SEQ ID NO: 415245 - DNA, 1003 bp, Homo Sapiens
ttatgatgtaaatattccttgggttatacgcctagagttggggtacctggagcatttgggcattcacaccgtcagtgatcactctgagcaaactacatagcacggaagtgcctattgttcctctacacatacaactctacactgggtcccattctctcagccctgcatcataccaagtgcccaatttctttcactttagctactatccagcgagtagaaagtacgcatctcattgtcgctcttgggtctttaagacaaagttgccacttgcacatgtttatcaggcatttactgcacctgtgaaactagcccgagctacgttaagaattagatccgtcatgactgcaatgagctttatatggtcaatcagatccaagcccctacttctcgcaaagcctcgcatccagcgccacgcattccatcatacttggatcatctcaactgtttctctcctaagacctggccttgcctctggtcctgtgttgaacactcccatccacaggtagctcatcgctgcctgagatggtccgactaggtgattcccagcgtctaagtttattacatcctataagatagccagtacagtatggaagtaaccagtgctgggtccacggaacgacgggaagccctttgctgaacagtgtctccagacctcaaacagtgctgaagataacattgtatcgctatttcccttactttggttccatcatggtcgcgagatgcagagaggttacgtaacttgccaagggttcagacagctttctgtgagcaccgaatctgtccttcggataacaggtcacagctatgggctgcttctcaccggtttctgggagctgtgaggggctgcgctggggcctgggcaagcccccgccgtgttgggagacccaggggatgcttcgacccctggtcgcccgggccggccaccttgttggcgtgcgggctccctggatgtctcgctgggaccatcctgtcgggggcaagttcctcgcgttgaccggctccg

SEQ ID NO: 415246 - DNA, 674 bp, Homo Sapiens
aagttgaatgcaatatcctggggtagtatttcctttgaccttagaagagatgaagttcaaatccctgtatgactttgtacaaaggctgttggtgacttctgaggtgctcacgtggcagctgactctccatacataaggagtgtcttccctgctacagcttgagagttcccagcactgtggaaacaattgactgtcaatgtattctaactctgtctctatgtttctggtgccgaaaatcctagtcgaccagtctgtgcggcagaagacaacgcaaccgttcgtcattaggactgtagcgtgcatctcgacctccgatggagcctagcagcttggaggcataatctacacctagtcaccaatgaggatcactgaggagatttcaagcgcatgcattgagtattacatctcggaaatgggacttcttggagagctatcatccgttgtcgagacttgcgcgatctccggaggactacgtgccacggtgaggaacttccctgatcgtatcggggtgtcactcccagtcagtgtattgaggcaatagcgaatatcgacgtatgtacgagcactgaagaattggaaaactacaccttctctgttcgactggcgaatcctccgcgtggcacgtgtgagatgagtattgctagttgagtttgctacattcatccagtagcccg

SEQ ID NO: 415247 - DNA, 657 bp, Homo Sapiens
aggaagctcgcatgtctgcttggccgttgggctgtccctctgccaccccgaggtgctcgggtccaggctgtgacgagccagttgccaggccctctaggcatctggatgtggctgggcttggttgtggctgtctggtagcctttggctgggccacaccggtccttatccctcctgttccgtgtccccacgggtctcctgagcactgtggggatgggggctatctgggcacggtcggagaaggtgacacatgcgtttccactagcgttgtgttagcaagcagtccctagcatcctgtcggtgccttggggcttggtgcttgggcttgtgctagaccctacggccgctgcgggaggcggcctgctgcgtccctcggaggaactggtgccagtgcaggggctcacggagaggaatggctgtcccatgggcaggggacttcgtgggacccatctgatggaggagtccttggatactcatactttccaagtctgattctttcctccacagtctagcgctggacacgcttgacggtggcaaaatcaaagggccaggaagaaggcagggcgagaaacccaaacatgtagcccagacgtagctgttcagcggtttcctgacagtcaaggcattcaagcactaaatcccttagtctcaaagctgtaa

SEQ ID NO: 415248 - DNA, 862 bp, Homo Sapiens
ggtataatctttaagatatttggtcagactataaaaggctgtgccattaattcacatagaggagaagtcataggatttgcttcccaggttctggcccagcccagccttcttcacctcgtgtcacactatacacgctggatgctctgctagaagtaagtgttgtcacctgggacctgacatgtgcttctcgattggcatctatttaattactgtctatggttgcttctgcaacatatgggcgctagtaagtccttgtgagtaaaattcctcgatggctgacaacataagaagcagtctattttacatgagaaacattcactgaagctagtccatgtggaaggaacttcgaggaagaactagcattgtcccaaactctacagacagttcgttacaaatagggagtgtcttcaaggacatgtaggcaggcatttctccttttattcatgctggcagactgatgaggtgtttaaccgaacatagcttcaagagtcttcagtccaaattgcgttaaattcacttcaaccaagaagctcaactgtccttggggccgcaccagtttccagtggactgttccctagttcccctgaagtcttggtccattaataacgtacattggcagattaaacttcacttgtttggaaaacgccatttttttcccccatttatttcccaagttgcgggccaacgctatcgcaattcgcgttatattcatttttcaccattcttgcaggaatgaacgtaagttttgcctctcaagaaaccaataccttggtagaagggccaaaaatggccttgatagcacacggaacaagcgaggggccaccctaggtcgaggttgcacggcgattacggtcagaattga

SEQ ID NO: 415249 - DNA, 1369 bp, Homo Sapiens
ttatagacattcaaaatcagacctacataactgtggctgcttagtgattctttacaacttatgcaattgtgatatatctgtacagaggggcttctatagatgaaagcgcagttacaacttgcaccatcccctactcacctatttactgtatcaggcagaatcgaccaattctgtacctaaggtgtgtaacgtgctacccagacgaatgtgaaagattaacatcgagatagagctatgaggctccaaatcaagtaatggcttaacattccattcatctttcttctttgaaacactcttacttaccgtgtatttacctaatggctactagctcagggtatcccatcacgtggcatcaactctgtagtactcggcttaagctcttcaaggctcttttaaagggtattacgagtagttatttcgcaatagaagcctaaagcgatccctccagataaatagtaccagcaggaataatctcagataatcctcatagtttttgcctagtatcctcttagcgcgccaaggataattcttatgcgaccctggggttgctgttccagtgcgctttgtagccaaaattagccattgtaattagtccaggagcttgaggcagacttttgcccttcataggtccatggagacttccaccaaaaaacctttttagatgctccagttaatacttgcctagggaagttggtaagcacttccaggccagtagagtaccaatatccggtaaaatttatgggaaagacacaggaggcccccgaatgatgttatatccacaggtttaggcgcggatttattaaaatcctggactttattggtaaaagccacagggagaaacaaaccctggcattgaagaagcctgtaccatggtataagggcccctaaacagagttccagcgccggaattagcatggcagaggcatccccatgaagcttctaaaagatgcgatttttacaagaggggacaaagcttttaactatcatcccgcccggttagacgaaatactttgggggccatatattcccttgaatcgtaagacgtatccacacacccatggacgaagtattataaagacgcataccatgtgttttgtaggagagaaacataggggtatgcgagacattattcctaatgatccccggggaaaaatacaccgtaatttgggagcaagatgataaaaacactgctgggttcccataaaattctttgtgcgccgccaataagaaccccgtgtggtagattgaagcgtgtcgtgccactagatatctcgagagcgattaacgggcattatataaagacccgtcgttagtaaccagaagaagtatgagacagtgtccttatgacaatagtatgacgctatattac

SEQ ID NO: 415250 - DNA, 1132 bp, Homo Sapiens
gcaggctgtaccacggcgtaattcttcttcgtatttctgctacatagtatcatgggcaggtcttcttagagcttcagaaaggatacgttgactgcccacagaacccatgaataatatagcaaaagccagatcacgatgcacagcactttcacatatagtatccagcaagttcagcattcccatgcgattatttcatataaggctctactacagatccctaaataccccgcattccacgcttagtgtaattacatccttgcatcgttcaaagatgtccaaagctgctcttggccgatatctgggtgcatttcatgactttaacatctccacgggagcagttcgcatagaccacgtgacgacttatatgtatgaaagtgagctgaggatcaagaatcactacgacatggtaagcataacagataacaacactgtggctagaagtaaggatccaacatattatatgaagaatactctcgtaaattacgctagtctatcgatcagagatgaggtttacccgtactagaatacatatagggtaatgatagcatccatatgttcggtatcgttacgaccgtgtaatagatatgcaatgaacactgcgcaattatcacgcacatcatgtgccgtccattgttacggatgtctggaatccacgagatcataagctaagctcgtatctagatgaaacgcatgaagcaaaacatcgcgcagcagagcatcctaaaataggtctgtagataccaggcatccgtaaaactagagggccgcagagagtaatcccgtgtatcctgatgtcgcccagttcccttatggtaaccctcatattgtcccgaggatgcaagtccccgaaatggaccgaggcgctaaaatgaaaggttttacccacgttattacctattacgttaggtatcggaaaggaataacgtagggaaccatgttgccccgttgctcacgagatcagatttagccattgtaacgcgaaataagttcctcatgaaaaggggattccgtcggtataccttagttcgaactcctttaccgtgttgtaagccaacgggattagtatacccggatcatgtcgtggccgatttattatgccttccgggagaccgataagaaacaaggtaattca

SEQ ID NO: 415251 - DNA, 868 bp, Homo Sapiens
gggctaacacgccgtatgagcctagacgatttgggttcaaaatcttgctctgctccatgttcttggtagggtgtgagtatgtagcatctctaaatttgtttcgtctaggttttaaatgcggggagtgatatatctctcgcaagaatcaggcctggcactttaaccaccttcagctagtagacatcactttaattaaatgcacgtgttgctattatgtttgctaggaagccttgtctgccacaagctagtctgaggcaatcacgaccattgcccatgaagccaatttgcatctcttgctcattaagtagctcacagtggctggaaatttgacagccttaatgtttgaacttcttgaacagcaggtttagaactgccagtgattttccaaaagttgtgtcaaacatcaagcattactgaggtaggagttttccccagatgtctgtgatgagagggcaagtggtctcctctggaatataatgattcatgggtgcaggtgttgggctgaagtgacacatggaaggtaaaaatcagggcttctcttcgaaggaaacgttagcctcaatgtaactcctgagccagagaagccatttaattactaattaagcaggagagatttgagcctcaggctgggttacggagatcctcccttcatccttttttttaataggacccttattacagaggcagaaggcatattaacctaggaccagagccttgctaccgataaaattcccattacaaatctcgtttgacattggtttgactgcacagggatagtaaaactcagtgcccatgtttcgatcatacgggacaattactctgtgcctgttcgtaactgccgaccagaagataatgttggaatcataca

SEQ ID NO: 415252 - DNA, 793 bp, Homo Sapiens
  misc_feature (374)..(587): n is a, c, g, or t
tacccgtgagaacaaagcctttgctattatcctccctgtgctttatccagagcccagaacaggacctggcatgcagtggaggctctagatagatgacttgtgtactatggatagaaatgaaggaatcaaagaatgatgtggttcagtgttggactggacttcagcattaatttgctactccatattctgcttactctacaatgacagatgtcctttgaacacatcttgtgtattatcctacgtgtctttcacattggcgcagtgtcaggaataagacatttctgattattccataggagtttcaaaggttatgtatagagaaagccgatacgaaggattcagactgagacgaaataggaaacatgactggctannnnnnnnnnnnnnnnnnnnnnnnnnnnnnnnnnnnnnnnnnnnnnnnnnnnnnnnnnnnnnnnnnnnnnnnnnnnnnnnnnnnnnnnnnnnnnnnnnnnnnnnnnnnnnnnnnnnnnnnnnnnnnnnnnnnnnnnnnnnnnnnnnnnnnnnnnnnnnnnnnnnnnnnnnnnnnnnnnnnnnnnnnnnnnnnnnnnnnnnnnnnnnnnnnnnnnagccacggagcattaaggctgcacgtcgagccttaatcgctgcctgcttgactaccagtgcatggagtgaccagacgcaaatatcgtgttctctgataacacacaaaaatggagactcagaaagtatagtagcttttcaaaatatactcccataggcctggggagtgctgttagaaagcaaggctatgcgtgcgattcatatgtac

SEQ ID NO: 415253 - DNA, 1398 bp, Homo Sapiens
  misc_feature (585)..(585): n is a, c, g, or t
aaatgtcatggcccttaatcctaatcaaaccttcatttttatgctgacccattatgcagtacaagtgaagaactcagaagagcttatacagtccattatgcagatgttatctaatgaagaaatccataccagtttatcacttttaaaatgccgaatttgtgtgcatccatttactatgttccatcatgccatagacccatgacccagctactcctttagaaaataggagtttatgtcatggttcgaatactgcattcctgattgtgtatcagagcctgtgcatttggtcaaattagtcaatagaaagatgcacgcagtgggaagtagattcaggattgtcactgagagattgtactggagggcgaaggtaggagcattgaagaccacatgttgtctccaagaggatatattacaataagtcctcactactttagcggagggcatttgttaactagtgtttacagcagttatcagtggatgagccgggtttctaactgtgctaagctgttatctgtgaaaacggaagcattccttccctcgcacatatttaagactaactcagagagcagacgactacgaggtgangatgctcgcactattatcggtggacaaagttagatactagctggtattggacgggacaggaaggaacaataccatgtcaaagactccagcggtgagaggcaaactttaccttcaatgtccggaggattgcacatccttcccgtggagagcaatactttttaaattttccgctcctacgtctcccctttagagtactaggatattaagatatcctttgggaccaatagcaattggttggcttatattcgttcattttcctattctcttaaaaagttttggcttttccaagtagttcacgaagacccccttttaaatttttatcaccccgttaactgaattttttttcaaaagttaaccaggtttaggaaaggcccttcccaaagacttacattttatgagtgattggataacttcgattgaataggattttgaggcatgagctccaaagtctatggttccggtaattaccgacggcatatagataaaggctttgttagaggcatacaggttcccgagaaggtatcttgtcctagaaagtcaccaatctgtagcggtgtgcatgcacacttttcagggttggccctgttcatggcgttttccagcacgggaattccctctggtaaaagagaccgaacagataccaagttcgaactgggccatctctcccatgtgaaggagcatttaataacggcgtcgttgtccgaaaggtgggtcgcaacggggcaataatgagcctcgtgttgtgacaggttcaatacctcacaagcatgactggggaaaaatctcacagatgggagagggggtaaacacgcc

SEQ ID NO: 415254 - DNA, 283 bp, Homo Sapiens
cggagtatcttcaccccaaaatcacgcagggattggactcctgaacggcgacagcatgtgttgtgttgactaggagccctaactgtagattacttctgttcacaagcaggtaactgaagagggaagcaggcagctgtggagagcgatgaggttagagggaggtggaggtactctcgctgctctgaccttacagtagagtcctccaccagtaagcatcagagtgtgacgtggcacgatatgcggctcccttcacaggccacaatgatgatgtcgtctccttcgg

SEQ ID NO: 415255 - DNA, 987 bp, Homo Sapiens
gggggtatacagagggcaagaactctgtcacttgtctaccatgcctaacaactgcaatggataaaacctgtaactaagtgcacaaacatatagcctgtgagctcccattgaagatgctgcctactccgagcacatggtgtgcatggtggagtgccccctgctgaatggtgtgtacgtcagcatcctaggtcactcgagggagatgggagaccttgaatacagggcggtgaggcggacgcagcttccagaggagcggctgctggagcgtgccatgagtccggaggcctctactccatggtctggcctccacctgctccgtgtcacgagcacttgcaacttgttacgctcccattggcaaatgcgcgttggcagtactccaccaccagcttatccatccatgctcaggggctcgaggggaacaagcacagagccctcatagaatgcccaatgatggcccccatgcagaggcaggcagcaaatcattgactgttctctcgtttctctgaacggagattattggacatggttacgaagacgtttcattgcaccaacggactcgtcagctgccattacaccagcagtgagaggaacatacaaatccctgtgcaggtaccgccatgcaactttcttcctcagtagtattcccttcagggaggttatagccgtgaaacttcctcagtcagcgattgtcgatcaaagtctgcatcagggatgtgtgctgtgtagagccggctcaagtccgtgtcttccagagctctggggtttcttaaccatggtcctccaagaaagagcttggctgttcgagaggatgatcttcttcatgtttgtccgccatgagggcaattgtagaagccgacgggcactaatcccattgcctgaaggttccctggcctcaagtgcatgtacccctggacacccgcgcggacaggacttacttgattgactagctccccagattgcgcccatttggacctgggaacgaataca

SEQ ID NO: 415256 - DNA, 248 bp, Homo Sapiens
cgtcaccctgtaatgcccagcggttgccttacctgtcggcctggtcagctgggcccaattccgtccgagcttggcgcccccggtcgctctagtggcagtcgcggccggcgtggtgtgtcgaggccggcctccttagggcgggagcgtggcaccggggcccggtgggcggctcgtccccaagctccgcgagtaccggctcagggactctcatcgtggcttacctcgggcgctcccatgggcccctgacc

SEQ ID NO: 415257 - DNA, 351 bp, Homo Sapiens
ggtcgtgaccaggcagttatgctgtggcgctaactagctgccgggacaccaagcgctctgccgtcagacgtaggtcacgacgactattgctgacttgaactcaagtctgaattctcattgagcacgaggacacgctgttgtcatcaatagctagtgaccgactaagcgccactgttcctttcgcaggaagaatgttgtgtagtgtccatcgcgcatgctcccctcatgtttgcataccagtgaatgaggtcgtatttgtacaagctacctgatatcaactcattctgtggctggatgcacatctcagagaagtccaggtcccggataggaaactccacgagggtgtccagc

SEQ ID NO: 415258 - DNA, 733 bp, Homo Sapiens
gtaaacgagtggacttactcactggcttagttatgcaccatgtctcctccccaggtgctcttggtccaaagcccagtccccaaaggagcatgaggtatttcacagatgagcggccatgaatcaggcgactgaataaaataagccaagtgtgctggcaagaaggtcaggatgctgtcatctccagctggagaccctggtgggctgcagctgacctgcctgcattggtatctgctgcttctgtttttctgtgtttccccctgctgacagtcatcgcgtacttgagaaacatgaacacggagcgaagcaaagatgcaagaggcatggtatgtcgccactttgcaaaacacgcacgccctgagcaacggatctggagacaggtagatgagctacgtgcatgtggcagctatatgcctttttctaaggtaagcagggtgccattctacacaacgcaacgcattcctttcccacgcttcaccattcccaccgtacgacataaactgcctgactgctcccatggaatcctgatggggacgtctgagcgcgtgctcatccattgctggggtcgtgcaaggacgagactttcctatcccgtgtgcatgagcacagcgtgacaatctcatacctatttcagcgtattcaactcgttcaacatccatttccgcttccttatggggcctcctagacggaaataacgtatattgggaaagaagggcccaggggtctttagaccatc

SEQ ID NO: 415259 - DNA, 325 bp, Homo Sapiens
gcacgtgtcgtctccgctctcctggcggcgccacaatcggcggccctacacggtcgcgccaggccttgggcctccctgtaaacagaccgccaattctctcctccggtctgccgcgggcggcccataagacaacgccaggaacgttgcacccccccatgagcgggcccggtcacgaccctgtggcgcccggccagaaaaaccaaccacgagggtaggcgagaaaggctccacgcgcgcgtgtgggctcacgccagagggcctgcccttggcgcccgcattcagacatgccggggggaaacaccaaccacaaagagtagccccccag

SEQ ID NO: 415260 - DNA, 780 bp, Homo Sapiens
cgagccaccaagcccagcctgtacatttttacctatgcaaaggaatacagagcaccgaacaatgggaaaagtgtgagtaaatataaaacaccctgttcttaactttttagcctctttacaaaagacaattgagacttctggttctgtataagaagtttgaacagtaatgagggagaagaaaaggcaaaaatcagttaggtaaacagttaaggctggtcctcgtgagaggcagcctgcctgagaaatcgcagctacaggcaaaacatagagcagcctggggaaaactcaggatgcacctgcacagacaagcacgcaaggtccggcacagaagccttttgttcttcgtgtgattaaccagctcccagggaaacagtttccccttcttttcagacatgtatgcagtgggctcggctggagaacttgcacagggacggagggggcttccctaaaacgagacccacagttttacaaactagagaagcggtgctttgtgcttgcctagagtcatacccacagctacactgacaatgggtgagttcgagcacgacagacattgtcagaatgaagcaagtagttacgcaagacacgctttcagaacctgaacgaggagttctcttcatacgaaaccttttggggattccacgcttgtcaaaaacgggaaatccactatggttcgccggatcacctgccacagaaccttcataacttgttcattaccctttcactcaaatctcaaccatttcctttcacccatgctcctaacttctccagtcttagaca

SEQ ID NO: 415261 - DNA, 764 bp, Homo Sapiens
tatctgcctagttcttccagctcttccccttgttacattattcataggcttttatttctcacttaggtaatttacttttaatttttatgtcactgtttttatgctcacttaacccaggtccttatcttgaaaaagtgactactctgagcagtgaccacagaacgaataaatatgctcatgctagttagctccatttttaagagacccacgagaagtcccaagattattgcagtttagacagaaacttcgtcagcagcctgcaagtgaggttctgcccattaaacagctggttctctaatctgggctacacattggaaccggttatgaggcagtttctggagtagagaaacgcaccgtatgcctgtggtctccgcctactcagagattactcgttttcaattggacccgaggtaagttgtgataaacgctagcccagtgtgattctaagtgtgcagcacagggatggatggtgtcaccttgaccaacaagacatacggcctgtcctggataggcgcagcgcatgtgcatcgggaaagtatcagaaagccacgctcgccatctacgctgcctatttccgtgcagccaaattgtatcagtaccttgtcgccaggaatttccaccgtgcctaaaagatggacgcagcaatgacttgggcatcgagatgctccatttgacgccccgaacaaggatgctgttaaccccatggggtcaccgggccccttagactcacggtcttgaaggtacctcagatttctgcgttccca

SEQ ID NO: 415262 - DNA, 564 bp, Homo Sapiens
  misc_feature (489)..(489): n is a, c, g, or t
cggcgtgagccaccgcgcccggccggtactccgaagccctcagatcggcgacctgggcgctgtaggcaccgagaaaatacaggcaccgagccagaagcagtgccgcaaccaagagacctcggcttggcgaaatggcggcgtctggagcctgcgagtgacgccagctggtggggctgtcaaggagaacattcgttacggcgcaaccaacggtactgtcaccaagaaaccgtcgtctctgagaaaaaaagagacgttcggccgccgagaaactccgtacaagtgctgtgacagaaaaaccgccggctccgcgcagcggcaaaagagccaacgggaacgccgggtgctgcgaccatgaccccggcactggaggacgtgggatggagaatgggacacacggagcgagaagggaaacgtttcgtgcagaccaactagcgccgccgccaccggaaaactgactcgccagtgctgccaatgaagtgcgtgtgaganaccgatgactggtgggaggagcagcgctgggcgctggacccgcgagtgtgagaatctggcggcgctaggaccctt

SEQ ID NO: 415263 - DNA, 769 bp, Homo Sapiens
aacgcatcctcattcctgggctcctcctcgacctctcagcccgtgtccagggcacatcatgaacacagagatggattaagagtctgagaggtacaggcaaagcagagaaccaagaaactggccatgattctctccctgccacctcttcaggccactgccacagttcccggtgcaggttaccacctgaaaggagttgacttaccaacgggtagtaaccaaagaaggccagagtcacatttgggaaatttggtatcaggagccttggaccaggagatcttattctgacctcattctgatatttcatagcctgacgtcaacggtgaagcctctcaacctctctaagcccagtttctccacgtataaagtaaggaccgttttatccaccagattttcactgggttttattactcaaagataaattgcaagctacaaagacgtgtgtgtataagggattgttattatccaggttaaaacataacctgtattcaaaagaattcgatcaatgcacatgtgacaaaagctgatgaattattaaaaggagcaattcctggattcctctcctaagtcttagctcagaacctctctacctagctaggcctggtgctaagggctggagatctagaaacaaggcactgggtcctgctctggaggaactcctggcctcatagaagtgtgttgttgacctactgtgtgcctagcactgtgaagcatgccagaatagacatggtcacacttttacttaaggagcccaaataaaacttttcaggca

SEQ ID NO: 415264 - DNA, 960 bp, Homo Sapiens
  misc_feature (498)..(498): n is a, c, g, or t
agtgattactttcgtcatttgaggcagcagatactcgggtgctaaaaatccctccaaacatctcaacatttttctccccctcgggaatcagatatggtgtcacgggaagaagtttaaagaatgatagcatgtccagccatcccactgtgtgtctatagatgccaggccagcccaggagatgcactttcagattcctgatggcagccgctataagcacaagagtttcctgaggtgctcctctctctccaatcagcttcccagttctacaaaactggacttcagcgttgtcacatatagaggttttcaaccactatcagctttggtcttccatggtattcagcaaagaactagcccacatattgtagtgaagactcccttagatcacatgacagtatctgagactggagatgccatgtagtgagttgtccagtgttcttggacatgagaagcgagacatcaactcacgggtaaagctagccccatagccgtgtatttttnccctccatgtctaccctctctcccgttcaaccccagctaaagaccgcaatttgacttcaaattaatgttgaggccaagtgtatgtttcatactgctagtgcgtgctgcagaagaaaggcaagcggcttctcacccgtggttaacatgtatgacttctctcgtgtaacccaaggcatctcaattactgtgatcacttgagtcctgggaaccagggaggtaccaacggcaggttgcctgaatgaaccttgtggccatgcatttgaatctagcaggaaaccgctcccaaaaagacaaaaaattcctattgcaaaagggaaaccctgggacaagcacacagcttggtaccttgcaccctgttcctgttatgagtcctctcacagaggcggaactacctgtcgaataggctgaacatggtttgggtgtgccatacaataatacaacaaccatggaaaaagaacacaa

SEQ ID NO: 415265 - DNA, 743 bp, Homo Sapiens
aatacaatggcttctggtcaattcagtcataagatgtattcctggctggaaaattctgctatttggaatctacagttagacaagactgcatgttagactctgaagttaggcagggtcaccaccctggacaggtatggaatgtattcggtgttgaggagtttggacagtacagcagcagctgctctagagcataagcagatggtgaatgttcaacttgattacattgaccaaacggaattggataacaaactcgaaatagtttgagaaaaaagcacacgtataatgcctagagatgtaaaagccattttgcaagaatgagaatgagtgctacatgctaaggaaagtggaatggaaagttaagaacagttaagaatgaggtgaagacttgaaaagggaaaattgtctttgttgaagagcgcttgtctcctgacagttactcagtgatgcaaagctaaaaagagcactgtgctcatggtggaaaataattcccaggacttgacagggaagaatgtactcattccacgccccgggcagaagtctgctgagacaaacagaacgaaagatagttagtgagcaaattcatcaagaccaatatcatgtatttctccccctggcctgatggctgatttgcactcctcctgtaagcaacaaaactgcaaaaccagtgctacaaaacagaagcacctgtaagtccgtgggagcacatctttgctcaacaagagatcctgacaactaacaactaa

SEQ ID NO: 415266 - DNA, 254 bp, Homo Sapiens
attccactgttaaatctagctgaatgtagcctgcaacatggaagccatgaccaggacaggtggaagtgcagtgtgaattatccaagcaatcatttcctcattccttgggtgggagtgggcagacacgcccaggagtccctcaccctgcctcccacgatgctctgcttcttcatacagtgcacacagtggtgggagatggcagcaggggcagagaggccctcattctggagaggggacctatgaatcttgtaaag

SEQ ID NO: 415267 - DNA, 685 bp, Homo Sapiens
caggatccccagcgaaagggagccatagtccgaggctctggctgcctgcctgtttggagctttgatggcctcgaggcccccagatgagacaggattgttcccttcatcttaacccccttcgtgggcgggaactggagcagctcatttcactcagctcgcctcctgccactcctggcggcagagcgtgcgagtgcgggaaccggagcgaccgaatgctggaaccggccggtcactcctctctggcgggaataggctctgtgcgggcctcacagcagcgtccaagccctggcctctcggcaccggggtacctgtccggcgtccaggaagaattaggtcatatgaacggattgaagagtagtgtatgcggaagatttgattgagtggtggctcctggtgggatgggaactggaaagcagacggtgaaagagggtcatctttccctgaagccgcaccatctgaagttagctgcgtctatctgtagtcttcaacactcttgctgcttctctgctcaccgctcagccgcttgtgttgctctgccagctgaagtcttttttatggccacaggataggggcgtggcaggccaaaaaaacaacatttgggcagaaaaacagggtcagctgttttcaaggccgtgattccaggcttagggtggggtttagctgggaacccagccattctgtatca

SEQ ID NO: 415268 - DNA, 938 bp, Homo Sapiens
cggaagcaatgcctctgtatactgagctgctcttttccatagcaacaagagtggcagctggccactctgtaactatacgcaacagccctagggttacattcatgtgagggttacattctccagatctggatcagctctagctgggtttaaattctagctctatcataaacttaactggcagcacagccttcggcaagctatcctctgaatgttgatttccttaccagttacaagaaaatatacatgcatacagatacatatgctctaactcacagagcaataagagagttaaataagacgatgcttgtgaaagatgtagagtattgtcagacacacggtgagtgttcaagagatgctagctactttgactatgttcctggagacatgtctatgatttcttctcctagaaatgcttcttgccgtaacttctattcaatgtggagctaccctcatgctgtccatctgcactctgaatgaccccaggactgtcaaacttgcaagtgacctttctgccaaatcatccccaaggaaacccgggcctttgttggcctcacagatgactccatccccatccacacatatcacacattccctcatcccaactattctcacacaggcctttcactgcaagcttccttcttccagatgatcatccattcctggaaatgttgaatcactagctgctagagtcagaggagacatatttattcatgaaaatccaaatggcatgtctctcttcctgcaacaacttctagttgacaccttttactatgttgtcatacactgaccagtcatgccttaggctgttgcctccgttatccaggtttcccacttgtcccccggagtgcccttccaaggctgtttgaggccctgttccctgttctgggccaggcttacctggtccaacttggcccgaatttcccagcttgggttggcct

SEQ ID NO: 415269 - DNA, 211 bp, Homo Sapiens
  misc_feature (52)..(127): n is a, c, g, or t
caaaaaaccagcttcagctgaactccaagccaacacgcagcagcaactactnnnnnnnnnnnnnnnnnnnnnnnnnnnnnnnnnnnnnnnnnnnnnnnnnnnnnnnnnnnnnnnnnnnnnnnnnnnntgaaacagaaaaaccacccagcagagcccaggcaaccctcagaactgtgagagataataatgagtttctgctaccaggaacaac

SEQ ID NO: 415270 - DNA, 996 bp, Homo Sapiens
  misc_feature (608)..(681): n is a, c, g, or t
tatggagtgagggctattatggtggaaaaggccaagtagaagccactagaactatctgtacttaggaaaatagtaaaccaagaagcaatgctcaattcctatagggactgaagagattagtgccaccataagtacttgaaggaaggcggggtggtgattcctaccatatgtccattcaactcgcctatttagcctgggcagaagacagatggattatcacaaacttaactaggtggtgactccaattgcagctacagtaccagatgtattgcttgagcaaattaacacaactcctggttcctggtatgcagctacctggaatcttgattgccttttctttccacatcacattggtccattacattgacgacattatgctcactggacctaatgagtgagacatagcaactactccagacctattggtaagacatttgcatgtcagaagtgggaagtaaatccaacaaaaattcaaaggctttttcatgtctcagtaaaatttctaggggtccagtggtatgaggcatgttgagataccccttctaaggaactgacttcacctgcaacagagcttggagaagctgaagcctaagggtgctctaaagcannnnnnnnnnnnnnnnnnnnnnnnnnnnnnnnnnnnnnnnnnnnnnnnnnnnnnnnnnnnnnnnnnnnnnnnnnctttttctgcatggaagaattaaattgagaaaaaacattagttatttacacaaatcacatcgtaactgagttacaaggcactcaggttctaatcattagattaccttccttcttcatcttcccagctgtttctaaagtcttcctcctgttagcttgaggtggctcctgcagagtcaagtattttttgaagaaaagccactgtgatttcctttattctggttccttatgctggctgggctgcgatcagaaaatcctgggttggagaaacagtgcctaaactttttagccctgcataattcccttgctttaacccag

SEQ ID NO: 415271 - DNA, 934 bp, Homo Sapiens
agaagacctcccctccccaccccagtgtcactgagccacttcctccagcacagccccacggagggaggcccttttgtgtcttgcccatcacctggctggccagatctgctcagctcttccctgactcaagaaaaacaagagagcttcattagtccgttttcatgctgctattaaaaactgcctgagactgggtaatttataaaggaaagaggtttaatgactcacagttcagcatggttagggaggcctcaggaaacttacaatcatggcagaaggcaaaggggaagcaagacacctccttcacaaggcagcaggaagaagtgcagagcccaagaggaagagcgccttataaaaccatcaggtctcgtgagaactcactcactatcacgagaacagcatggggaagctgccctcatgattcaattacctccacctggtctctcctgtgacacatggggatataaggattataattcaagatgagacttgggtggggacacaaatcctaaccatatcaagtgctctgtggtcccagataagccaagaaaccttcgtggaggaggccaccccacccttggctccagacccagtgggatgcctaggaggaaactgatggcccaggagcctggagatgtgtctgctccaggtcacactgtgggctgtaaggggtccggaacccagacatgtggactgcgccaggctctagccaatgactcctccaaaccactgaccttccccagccctccagagttctccttcttgagaaaacgggggccatcaggtctgaagggtcttccaatggcccttctggctgggattattcggaagttttgggaacctctctcttccagggtcctcgttgagtcccgcaggacgctctggccggtccaggttcccctcttcccttctgctgccactggtttcagccccaaac

SEQ ID NO: 415272 - DNA, 791 bp, Homo Sapiens
tttcactgcagcagaaggcaaaagagctgacttagtaagcagcaagtgataggatggtgaggtggaggacaacatcctttacacggggcacccgactgtgctatggggctcaagagctgtgggtctaactttctggggttaatttccttgatttcctgtcttctgcacaatcagatcagttttgtgagactaaagccaaaatcctagaagcagaataggttctgatccatccactatcccttcaacccgtccctggtccaacctgtcttactaactaacacttctccttcctcccaacaccactagatcactacaacccatctcacagccccgacaaaaaaggtcacagcactcagctccctccaagatacagagttcacagtgctggtatcttttcccatgagaagccaggaaaggagagggccatgtgccagctgctgccccacacagtcctctagggcttctggacgagtgtgtagtcccctcgcggcaggtcctgtacatctggtggaccactctatctctgcacactgtgtctccagccagcacagtgtccagtatgtagcaggtactcatgacacgcttgtggaacaaaggcctggttgcccccacccctaccgttcctctttcctttctgctagatactcatctaggggtaactctatttttagggcctcacccatgactaaatcccagacatcagaactgcttcccagagctgtttggtctgtttgtttaatctcacgccacagcaaaaattctcatgcaaaccccaaaagctgggaacccag

SEQ ID NO: 415273 - DNA, 265 bp, Homo Sapiens
ttacgatgaagctctgtgaaatactcggaagccaaacagaatcaagtgataattgaatgctgaccctgagcaactcactgatagatgccgtgggggaagtacaaagagttataagggaacagtcaagcaagagcccacaaaagaaatggacaccataagaagataccattatgttagtgcattgactgtaaaaaggatggcattcaactaagaggagcaacattttgatggaatttcaggcactataataaagtgaagaatcctg

SEQ ID NO: 415274 - DNA, 495 bp, Homo Sapiens
ctgggtaagaggagacgggtgccccccacccactcctcccggcgcgcggacctctcccgcgcagacctgcatctgcattcctttgagtttaccacggacttggggcgggatcaaagggaaagtggcctgagcctgtttcatcaaggggttgtggaccgaaaccaaggccgggggtggcggagggcacgcggatgaggggctcaggcctaggaagggccggtcctggacaccgcgccctcccctgcagccaggcgccgaggcctgcagcacccggagcgccgcactgacccgcgattctgcccgaaggccggcccgggtgcgccccggcgcggggagacaccaacaaggccagcttttccacgagaggctgcttagctcttgtgaccatatttggtctggcgaggaggcatcttggctgcctggctctcaattgtctgctagagcacagacggtgcccagaaagtgcctctgtcactggagatgcggcttcgccaa

SEQ ID NO: 415275 - DNA, 690 bp, Homo Sapiens
  misc_feature (595)..(595): n is a, c, g, or t
tcattctctgggtgtcactcctgttgtcttcactctggctctccacttttccccatccaatcttaactgactggtaagttgggaagaggaaccagacacatgtagccccatgccttccattctccttctctgtgggactcctgtccacaggaagtatatgctcttatctaagcttccatactgatagcatcccaggctggctctgcccttggggaaggcctgtggatttcagccctgtctgggacttgaggggtctaattcttgggtgaaatattataatcacagggttatggtacatttaagccacattcttacatatgtgcttaaagaatagtaaggtggtacttcaacccaaaagcatcttacttttttgtgttatttttcaaatgcctcagaaagccatttggatgtggagagataggtgtaaattattgagttcacctacagcccaactgtagccatagaaaacactgattataaaaagcatatttaaaacatatctgctttaaaggaggactaagtaacataaaattattcttatatcccaattgtcaacatgattactgcctgttcttttgtttcccacaatgatatngtttgaataagggtagtactggaatgaaaaattaggggattatttgtgtttaataattggcatctaattcctctttggcctttactacatatacc

SEQ ID NO: 415276 - DNA, 729 bp, Homo Sapiens
atccacttgtcgtgttcgttcgttagtttattggtttttgcttgttgctgatgggcagtggggaggtgcgagggtggagggccttctttgtgcatatatagcgatagtctgcactaggccaagcccgctactcctgggagaatgggaacacgcaaataatctaaacaaagttttctgctgtcatcttgtgaaggaccctctcccccaagacatctatgactggggtctatgggttaaggaggtgaaaaagtggccccatcccatatccataactgaatcacagaatccgtggggatttgaactgagtggctggcgcaagacctccgtttgcttccagtagctgctgggagcgagggaagaggatatcggtaactttgggggcgccaatgtggcttctgtgtctgccccttgaaagtttatacccggcgcttaacaaatcctttacaggagcacgtacgtccctgacctttcaggatactgttttatattaaaacatggacaggagggtagaaaagtaaaattcgcctgcaaaatggcttgtcatccttgggccggcagatctccaaaaccattttcttctaaagcaacaaaagagaaaaaaatacgttctaaaaggaaattacgaaaagagcctaactttcctaaaccaacatcacttcactcccctatcctaaactccacccaggtccggggtgcaaccgcaacactcccgtaggttcgagttctccc

SEQ ID NO: 415277 - DNA, 708 bp, Homo Sapiens
gcaagacagaggcaggactgagaagatgagaggtgggcttcgttcctgagaatatccaggagtccaagagatctaaattggaagatggccttccaatttaggtcagtttccaattaagaagtccaggtttttatgaagcaatatttgtcaagaattcaactatcaacttgctggtcctctacttcccgaaactctccagcctacatttcttcctcttcttcggtttctaaactcaaactgactttggaatgaaagggagcagctgctgaggtaggaaggtcggaggtggccctccaaaagcctcttttctggaagctccgctgccaagggctcgactggagtcccaggacatattcagaggccgccagacccctgcatggaggcccctcccttgcagctcctggttaccatgattgaatgatgtcctgcagctccgagcctcagccacctatgttgtcaaggtttcctctgtgaaagcatccaaaaactctgccagcaccttcttctttcctttttggttttcctaccagggccaggccaggctctgctggccatttccgattaagctcctcagaaggcatagagccactcacactcagaattatttaaaataacactagactgcaaatgccctaaatatccatcagaaataaatggatgcataacattgggtgaaagaagccataaacaacacagataagacccaac

SEQ ID NO: 415278 - DNA, 715 bp, Homo Sapiens
gtttctagacgaagggcatataccagttaaactccgccatttgcctctcagtgttcaagcttgagcccacgcatccaactcctgagatcttactgggaagctgctgatcatcagtttcaggtaagacgggttgaagatccgagaggctgagtcacttccacaaagtaacacagctgattttaaatgcctgcattcagcatccctgcagcaggctccaggtggaattctaatgggaccagcctccagtccctggaccttagccgtggaaggagagaagaggacatctgcacctcctctcagagaaagcctgatgcctactaaaggacttgggtggtggacgcagtgaccctcagtctggagcttgttcactgaacattggagactatcatttgcgcagatggtcttgggcctctatgagcagcaggctgcaccccacagtgacctcctcattctactctgaggcatcttcatgaaagcagatgtccattgaaaagcacccaagtgcagtctcagctgatgaacttcagaggcgattgagacaaaggctctcggtcccctctgcccttggatggtgcctctggtatgcacttggcctctgtgtctttatttagactggtcacttcacaacccatcattgtcaccccacccctaaccgtgcccactctgggtcctcccctcaactgcctgacttcccactttgagctcagcaaaggca

SEQ ID NO: 415279 - DNA, 581 bp, Homo Sapiens
caagaactacatatttatcagtgatgaaattggacacactcgattttcctcccactggtaatatttgcagtcagcatgaatagactttctcagtacagttttcaactcctggcacaacagtatcctttttccaaactatagcataaatcacagaaaagtatctcctcattgttgggatgagttttaattcagaaacaatttatagtaatattctaagagactgactgaatttgctttcccaactgaaaaaggaatcaactatttgttattatttaatgaagctttgaagcatgaggaagtcaattattcttcagtgcagtgatgtacaaaggggactcctgcattttccctgttccctgaagagattaagaacttctgagtggagacaaacgggaaaaaatattgtttgtggaaccttgcctaggcttgatgagaaggaggaaagagctcttacagctaaaactaatcagtaactgtggtttctccaaacatggaagaattttccatcaacagtcacaatggggagtgtctagttggaccatcatggaagatggatgggcctcaagaaggttagcaggatt

SEQ ID NO: 415280 - DNA, 777 bp, Homo Sapiens
gtccggcagcagatgcgggtcgaaaagagctgtgtgcacgctgtaacatcccctctcgggcttcggggtcgcgggcgttgctcttcgggcgccacggtgttcccctcgcctggacgcaggagtccactgtgggagtcacttgccacacgcctggtccagctacaagccccgtgtggagcctgctcctatgctggcggttggagcagcccccggacccctacactcagttgctcgcacaacccacctgctgggggctgagagcacagtcaccgaggccacgggatatgccaaagcgcaagccaggtgcggcccggcaggcctagtgggcgaacctgggccgagagaggcctgggcaggggcatcgccgaccacggaggtctccagctggcaaagcggcaccgaaaaaaaccctgcatcaattgtctttcattagtagtgagatcgaacatttgtatgttaccatttagcttaacatttatatatttctgtgatttgttactttttgggtcacgcgtatttttcttattcaacctataaaaattctacatcgggcacattatatgttacaggaatatatttttccatattttaaacgaaagaaatggatttattattaacctggagttcaaatgtcacaatggattacaggacatggagaactgactgagagaattacggtagaactgtctgccttggtggtatttatttctacctctctgagtagcagtccattaaatatgttctgttggggaaaccaacagatccctaattacccag

SEQ ID NO: 415281 - DNA, 449 bp, Homo Sapiens
tgcaaagctagtcatctctcaggaagcactttctatttccaaaactttggtttcatcagtacctggagcaaagcttctggcagaaacacaaatcctcatcaggggagaggcacaggatcaactcacggttataaactggactcctgctctgacgggtagcagccatcaactttgcccgattctcataattctgaagggtcaccaaggagttgctaccagccactgtacttaaagtggtgtcacaggattacaaaatagaagaaagtctttcttctctgactaatatgttagtgctctagtaagcatcaaagatgaaagacacacaatgtgagcctgctttggccaacacaaagtacttacagaattttcaggcctacttccagccctggagacaaatttcccatcattcttcattacaggagtaatcatcctcatagggctgtaatagc

SEQ ID NO: 415282 - DNA, 439 bp, Homo Sapiens
ctccccgctgcgccgggcacggtgtctttggagcgcgctttcccagccaccaagccggaggcaccgccaagtctgcgctggcagagagtgacgctgcccgacgactcccggccgccgagtatcctctccggggtggtggagaggctgggagactttaggtaggaccgaccactcaccccagcccactcctgttccaaggctcaagaggcgaaaagggtttccacctctccccgactgaccctggaaacgtgcagtcccgcaggcgcccggaccaccagactggtccccaagggtacggccaatgaactccacccctctccttcggcggccacttgcgggataccacggcagagcttctccggcccccgcgcgcagtgcttgcacgccaagcagagtccactagcccgtggactgcgagctggagaaaaggaggtggcgc

SEQ ID NO: 415283 - DNA, 603 bp, Homo Sapiens
  misc_feature (228)..(506): n is a, c, g, or t
aaatcaaatgcaagccattgctttgggaggtcaaacattattttacaaaatagtgaaaatcatggagattattttaagcgtggattaattaagatgagtttatccaaattttagaagctgttatttctcttaggttttattttcagtgttttagctggaactgaaagaggattagcatctagggtacttgctcaaaggcacattgccctatgttttcacatttatatnnnnnnnnnnnnnnnnnnnnnnnnnnnnnnnnnnnnnnnnnnnnnnnnnnnnnnnnnnnnnnnnnnnnnnnnnnnnnnnnnnnnnnnnnnnnnnnnnnnnnnnnnnnnnnnnnnnnnnnnnnnnnnnnnnnnnnnnnnnnnnnnnnnnnnnnnnnnnnnnnnnnnnnnnnnnnnnnnnnnnnnnnnnnnnnnnnnnnnnnnnnnnnnnnnnnnnnnnnnnnnnnnnnnnnnnnnnnnnnnnnnnnnnnnnnnnnnnnnnnnnnnnnnnnnnnnnnnnnngactgcagaggagatcaccgtttatatgatcagtttaggtgctggatcagccagtagcagacagtcagccctccatcctccctcccttcacgtatgc

SEQ ID NO: 415284 - DNA, 424 bp, Homo Sapiens
gaaatactctttttgtgggctgcagctttcgggtattttaagccatggttctgtgcccttccttgttttcaaaaacaccacagccaaaggctgcgggttgtgtgctttcattttgtgttaagttctgtggtggagacctggagtctgtttttccaaataggcaccttgaaatagatacgcttcttaagcggggaaagtacgagtaggtcctattatttgcaatgttttagcctttccagactccgtacaaatgactaaatgaagattggatcgtattttcaggcactgcaccaatgatagaaaattctcaacttggggtcaaaagcaagggcagctttcgtttttcttaaatatgcttctgatcaaatatctaaagtgttgaaagaaacctaacccttaatagcacaatttacaggagtgcatt

SEQ ID NO: 415285 - DNA, 633 bp, Homo Sapiens
gccgggctcgggggcgcagccggactggacggcggctcctgtgggcacttggccgggtttgctggtttttcgggaaataaggccactggggacagtcactacgttttcaggaaccgctcagcccctctgagtgccccgcagatggacctggcggcgttcctggctacggctgactgggctcccggagctaggagcgcccctgcgggcccagcctgggccctgggcggtgggagggcctccgcccccttcccgcttccgccccgctggcgccggacccccgtcctcgtctgtgcctgccaggccgggcccttccctcccgtcacaggcggtccctgagcccacccttcgtctccgagcaggctggaccggcgtatagcgtttgccagctgagttccaggatgtccccgagtatcttaggaaagggccgtgttggacaaacgcggggctcggtgtttcttccgcgccgtccctcgctgctggcgccggggccgtcggaggctcagtgatggcccagcccgcccgtttccgagaattccccaaacgcgggcccctacacgctgagttcgcgctctcccgtgacggcgacagcccgcggaccctgctgacagcacactctgggctgcagagggtacc

SEQ ID NO: 415286 - DNA, 779 bp, Homo Sapiens
  misc_feature (53)..(147): n is a, c, g, or t
  misc_feature (153)..(267): n is a, c, g, or t
cccggtctagtagggagggcttcctggagtagggacagccacattcatcccgnnnnnnnnnnnnnnnnnnnnnnnnnnnnnnnnnnnnnnnnnnnnnnnnnnnnnnnnnnnnnnnnnnnnnnnnnnnnnnnnnnnnnnnnnnnnnnngagatnnnnnnnnnnnnnnnnnnnnnnnnnnnnnnnnnnnnnnnnnnnnnnnnnnnnnnnnnnnnnnnnnnnnnnnnnnnnnnnnnnnnnnnnnnnnnnnnnnnnnnnnnnnnnnnnnnnctgtaagtcagagttaagactggagcccaggccatctccctccaccacccacacctgacatccgcacactgcgcttcctgcatggtggacagtgcctgcctgctcacaactgggaccactgcctcctctgcttctctgtagccctggccctagctcgtggaaggagcaacagggccatatttgagtttcagagcactgctcaggggggcagaaggcagggtcagattcttctggaagaggtcggaggtttcccagccagaacaaaactgggatgagaagctggggttcctcccacccctctccaggacctgtgaatgtccctcccctgtggagctggaaagccagcccgaaggcacctgccccgtgggaggacacacccctgagcctggatgcctcatctcctgcagctttggaattctagccccctaaccgatgtgtcaccccggtgctagaccatgggacgcgtccacggctgaggcgcaaacgccagccggaaaagagacaagcggata

SEQ ID NO: 415287 - DNA, 140 bp, Homo Sapiens
caggagctgtctctccaccctaggttatccacgttactttctgtactgtgtatgtgacgagagaaataaagcttctatcttccttttgagaaaaaaatgtcatcaggaggatccaagagaagaggacatagggcgggacc

SEQ ID NO: 415288 - DNA, 546 bp, Homo Sapiens
gggttagagagggagcaggaagcggtggtctgcaaggctcagaagtgactggtgaggccctttcctcctcctcctcatctctccgtgactaccgagcccgggaagacggaccggcaggtgcactccccaaggcctcgacagcagccagagaaaggcagcgacagggaaagacgagtcaggctcgcgaccaccagagagagaggccctcacgcccagccgagcgtcagctggtcggtccggtccgcgcgccagacggcggtgctcggccgtgcccggtccctgccctccccattctccgctccccaccgcgcccagctgcgccgacgccccgatcacgccccgcacaccagcccgtgaccatgcacgtcactacccatgccggacagggccggaccatccaagacaccacgctgaccccacaacgtcgctcagctacggcacccgcgcaccgatcctgagcggacgacccatcacccatcgtctccccgagcgcgtccacgagcccgagcgacacacctccccaccacccggcgcgaggaacggccg

SEQ ID NO: 415289 - DNA, 750 bp, Homo Sapiens
aagaacaaaacttcagggttgaatctggagaagaaaagggagatttgaaaccccagaaagtgtggagcaggattgcccgtcgcagagactctcaggctctcaaacagggagacagggcgaggtaaagatgagtggagttttcgcatctattcgggagagactagggcaggcccagcaaattgagggccccaccctaagccgcctagcgctactgagtttaggggagatcggtgacgccccaaaacttgcaggcctgcccagcctcctggaactgcgccctggaacacgcctcgacttctcgtgggtaaggcccggtgcctggaagacctcccagcgcctgcagcccgtctcggccccatgagtggactcagccctggctttccacggggacgcgccccgggactgaatcagccgcccgcgcatgctatgaggaaagttgtatagggaaggccggctgggcctgagcgcctgtggctgggcgggcctaagtttaagactcccacagaacccacaacaagctcacaccagcccggatcccgtggtcgctgaggcatacgacccttgaacactgcaaggggctgggcggacggcaggggacgagtgtcacgagatcaagatgggaagcgcccagacaggtgagcggagatgagatcatgagtggcggaaacaaagaccgacaggggccaccgacgacaaccaaacgcacaatgcggagaatcaagaggcgcaagtccagagcgccaggaccca

SEQ ID NO: 415290 - DNA, 681 bp, Homo Sapiens
  misc_feature (124)..(170): n is a, c, g, or t
tgtttttcagatgggctgtgggagggagctgctttctaattcatcaggtcctaaagggactttcacgtgagagaactaatccaaactcagtgatggtgcaagggtacttcttacctctagggannnnnnnnnnnnnnnnnnnnnnnnnnnnnnnnnnnnnnnnnnnnnnncccagctacaaactatcccttaagctaaatatgactggcttgaatggagcaactgtagaagtaatcagaatccccaagtgagtggaacaagtcagttctaaaagggagaaaaaccttgggaatgctggaaacagacagctcaatgggcatattcagaagaaaacaatagataccagtcttttccaaagtgtggtgtgaagagtactgctcctgtaaatttaacgaaattttccatgggcaagaaaaaagtttctgcttcaaaggaactcctgagaactgagaaatgactgtttaatgaacaaagagagaagtgacaatgagactgccctgtccagagactcccaaataaagaaggagtgggaaagtggaattagcaaagctcttgtaatcatagcaactcatttgagaagagctttggcaattatcaaagcaatccttcctgcattaagaagaaactgtttcctggatgtcactcgagtgactttctggcaagccccaagtcaacctattg

SEQ ID NO: 415291 - DNA, 385 bp, Homo Sapiens
aggtcattttgccctggtgggcctgtgcctcaaaaatggggtttcttcccttgtgaggaagacccatgaattagtaacggaattgccaggaatgctaaaaactatctaaatgccatgtatgttttcaagctgttactcctggaaggggctgggttggcattgttttagaggttaggagccaaacatcagctcatctattctccagctgttgtttgtcctccatcttcctgcaatagtcaggcacagggtcttataaaaatgggtttgtgctgctgtatgtttcgcatcaccatcctgtggtcacctgatctcagcgtctaggtcaactttgattcctttcttcttgccctgatggccggtgacatacacagatcccatcgactct

SEQ ID NO: 415292 - DNA, 406 bp, Homo Sapiens
  misc_feature (66)..(78): n is a, c, g, or t
  misc_feature (282)..(291): n is a, c, g, or t
gagagagagggggggcggcgccgcccaacaagaatccttcccgccggggggcgccccacatcgagnnnnnnnnnnnnngcttttctttgcacacggggggcccccccttagaggagggacgctctatattaaaacccgcggcgacgcgaccggcggccccgcggctctattatataaaacacgagaccggtgttaaagagcgtgggaaacaacacaagctagctcagctagcggggaggactctctgttatgaaaggagggacacccccttaattctcgctnnnnnnnnnnagaggaaccactcaaggtttggggcaaaacatcctcactcacaggaagagatatttaacgagcctccctcggggggactacttaataactaatttttagagggataatataaggg

SEQ ID NO: 415293 - DNA, 706 bp, Homo Sapiens
gggttcagcttctcttgagaacactgaccaatccaatcaccgttactcccgatgacttgtaggtgaagccccttaaggaaaatttctttcacaaatgagagctagggaaagatttactcttcctgagcagctaaagtattttctccaatggccacgagaaccttaaacctttccttctttccacgctcccattggccgccaggaacttgcagcttggctacagcaatcatgaaggacctgactgggctcagcacatgtgcccaggccacccaggtagaggtggagggcatgggattcaagcccaggccatcgttggctctgaacatatacctgaaacaacctccctaccaggaaggaggctgccctgcctggagtgaagagtgcatggagcagtctcagccgacccaggtgggatgcgtaacatggccgagaaatccacccatgctgctgagagctactgcgccatggggtcatgtgtcacctaactgacttagcccagcctgactgatcccccgtgtgtgaccagacatcagcacattcagaggacctcatactgagaattggtggacctttcagaatggacatgaccactcaaagtagggacattactcgctatttgatggcccatgtgggatcaaaggccactggggttccctcaagggcacagcacacttagaatccataagtctcagttctaaggcatgtt

SEQ ID NO: 415294 - DNA, 520 bp, Homo Sapiens
acgatatcgcctactcctttctcctcatccttcataggcccgatctcgctgactcagatgccacgcgctgtgccttgccgcgcaccgttgacaacagagaagccactggcgctagatgattcataaaaccacaggtagtaatgaaccgacgtcgcatgacatcaactgcagagatagctacggttactcaaaatctggacatctgatagaattacgtatacaccgggaggctctggaggtgagcccggaaatacatagtgtcccaacacaaatcccaggacaagaaagaggacgagaaagaacaaccatgacaacataggtcacagggcttacccgagagaaacaggcgagcccagaagagaacagggaacccgcgaaaccacacaaaccaggagcacgtgaagaaacccccacaaaccacacacgaggagcactaccagggaaacagttaaaaagatgaaaaaacagataggcgacagaaaaggccaagcagtaacaaacgtggggtgacagcacacca

SEQ ID NO: 415295 - DNA, 648 bp, Homo Sapiens
cctgtatgagctgggtattctgtataagctgtgatatcccttataaactagggtatcctgatatgaactggggtatcctgtatgagctgggtatcctttatgaactggggtatcctgtatgagctggggtatcctgtatgagctgggtatcctttatgaactggggtatcctgtatgagctggggtatcctgcatgagctggatatcggttatgagctgagctatcctgtatgaactggggtatcctgtatgagctggggtatcctttatgaactggggtatcctgtatgagctggggtatgctgcatgggcctggtatcctgtatgagctggggtacgctgtgagacctgggtaccctgtaagatctggggtgccctctgcaagctagggtaacaaatggacccgtgtgtgttctgaggactgtagaggtttatccctctcaggtaaaaatccacaggaatattccagccccacaagtggctctgctccaacgaagtcattcaagaagcaggctctgtccaagttgtgagatcctttttctgtctttccctatggcaatgtctatctctgcatggccagaagttttcatcaagaaagcagggagagggtgtggatgagacacatccataggttaagagctaggtgtg

SEQ ID NO: 415296 - DNA, 815 bp, Homo Sapiens
cgagcccgcactcctcagcccttgggcggtcaatggggcgcggcgctgtgaagcaggggcggcgcctgtcagggaggctccggcggcgccggagggagtgggggtttgctcaggcatgccgggctgcaggtcccaagcccgtcccgctgggaagaggctgaggcctggcaagaattagagcgctgcgccggcaggccggaagtgctggcggacccagcgcaccctccgcagctgctggcccaggtgctaagcttctcactgcctggggccagcattgtcagctgcctgctcggaatgcggggccagccgagcccgcacccaccgggaactcgtgctggccagcgagcgccagcgcgcggcccaggttccacccgcgcctctctctccaaacctcccggcaagcagagggagccggctccggcctcagccagcccagagaggggcttccacagtgcagcggtcagctgaagggctcctgaagaggggccagagtggacaccgcagcctgaggaggtgcagagggagcgagggctgctagcacgttgtcacctctcaatagcaagaccaaagcttacagatgtccattatgtaaataggtaagaaatatctggttcttttctttgttgataagcttctcagcatttaggtgttttaaaagtatctgtagtttattggctatatggaatcaactttaattttcttacttcttattcaggcttttttataagtcactatatgaaaaaagtcttaaaatcctagtttcagaaaagcaatgtaagctcaacaaatggagggtatctaacttctattgaaaa

SEQ ID NO: 415297 - DNA, 655 bp, Homo Sapiens
  misc_feature (448)..(448): n is a, c, g, or t
  misc_feature (450)..(451): n is a, c, g, or t
  misc_feature (474)..(474): n is a, c, g, or t
  misc_feature (483)..(483): n is a, c, g, or t
  misc_feature (504)..(504): n is a, c, g, or t
gcgaaggtcacaggccttgggccagtggtgggacactggagcaggaagtcggcctgtggccggccatgttcatgagggcgcgtcccttggcacccctgtagccgctatgtttcccacgcccgtggcaggcctgagagattatgtttgcggggggtgctttttttgtagcttctgtgttcgccatatttgaaaggggcagacggccatgttcgtgaacggcgcttcccttggtgcacctgtggccgccatgtttgagcgaggaccccgtggcaggccaggaccgtttctccggtgctatcccagagcatggcgcatccactcattcactcaagcccaccctctcctatcctctcggtccacccgacttagctgggcaaaaataaccctgtggtaggacagccgtctgctgttggaaagtatcgcagctcctcccgtggtcttgcccccncnngttgcaacattgttgccaagggntccctgggncctttgaatgaacggacacangcggagaaggactgtaggctctgagcctgctagggtgcctgagagactcacaggactacccctggggcagttggaagatgcccagaaacttcagggagccaccagcatggggcagagggtctcttctggagttggtggcatcagaatcagg

SEQ ID NO: 415298 - DNA, 101 bp, Homo Sapiens
  misc_feature (32)..(32): n is a, c, g, or t
cggcgggtgacagcttgcgccctttcgcgcanggactcggccaccatgaggaggggtcaggggctcaggattcggagaccaggcagcctcattagccttaa

SEQ ID NO: 415299 - DNA, 458 bp, Homo Sapiens
gtgttttgagcctgggactgaaggtgccacaagcagtgtctctttcctagtctgtcttcactttccactccctataccagcctgatgtctcggctctctccttcacaactgtatggtcacctgtcctcagaaaactgagtgctttggcacaggggcaccttatgagaaggggtggttaggccagaggaacctccactaactctcccactagttttggaaatatacctgagaagcacacaagaatttagggagggcagagtctggttatggcttggagatggagatctttgatgtttcaggcaatgggtgattggtaacagaggtgcgggaaggggattatggctgatgtggtagggtgatagggagaggccaaggtggccgtatctatccagtctgtgtggcctcaagcttgcagatgggtggggagagattgcaatgctgcaatctttttgaggcaa

SEQ ID NO: 415300 - DNA, 795 bp, Homo Sapiens
ccgaaatcctcactaagctctgcaaagacaacaagctggatggaccctactttcaccctgggaaaatacagataggaaaccaagtcttttctggaaaaactatcttcactgaagaggacactgatgagacagtggagtcttatgaacacctggccctcaaggttttacactcttgggaggatatcccagaagttgggtgtaggctggttcctgaacacatagaaactcggccactgtaccacaaggataagccaggaatggagcagggccgcctgcagatgtgggtggacatgtttcccaaggatatgcctcaacctggacctcctgttgacatctctccaaggcgacccaaaggatacgaattgagagtgaccatctggaacactgaagatgtcattttagaggatgagaatatcttcacaggccaaaaatcaagtgatatttatgtgaaagggtggttaaagggcttggaggatgacaagcaggagacagatgtgcattacaactccctgactggagagggcaacttcaactggcgcttcctgtttccctttcagtatctcccagctgagaagcaaatggtcattaccaagagggagaacatcttctctttagagaagatggagtgtaagactcctgctgtgttggtgctgcaggtttgggattttgaaaggctgtcctcagatgacttcctgggcaccctggaaatgaacctcaacagtttccctcgagcagctaagtctgccaaagcctgtgatcttgcccaagtttgaaaatgcaagtgaggagaccaga

SEQ ID NO: 415301 - DNA, 648 bp, Homo Sapiens
gaggaagaccacggggttttctctcttagaggggaggaatccttgatattcttcattccaattgttcacctctactgtagggctcagtaaacacttaaggaagttgccgtgcactgcagcctgccggagacatgaaggaatgtacgggaggataatcgcaacatcatcaacccaattctccaagtaatttgccatgggacaggcacaccccatgtgtttgggaagacaatgggaaggttctgttttctgctccaagactgattcaaccagttggatctggaaggggataaagggctgtgtggctgcttgattttcattgtctagtggcagccaaaattggaaaagagagaagtgcagactttaaagacaagcagcgacagctcatcagcagtctaacaacacgacagatgacaggcccagaggcacacccagggccgccagcccatcaccctgtgcaggatgtcaaagagcagctgcagcaaaggaagaagatcatccagacttaaatgtttgggccttgctaagaccatagagtctttgtgctttggaaacagtcctccatacaaagaccccttcctagaaaagagtggaaagaaaccaaggtggaatggatacaacagaaaggagaccatgctaatattcttgtgc

SEQ ID NO: 415302 - DNA, 656 bp, Homo Sapiens
gcacatattagtattcctcactttaactctgtttcattatgtatgttaactatactatttactcaaactcttctttctctggagttgtaactagacagctcaggtgataaggccttagcttagggataaatagtaaagggaaggaagagaagtatttccaagggcttcatggaaactaaaagcaccattcagaatatttgcacaatcttcacacagaagtcacagagaactggaatgtcactcaggacacatgtcactatggtagtccaaaatgttacaaatgacctggtggtcatactagtggttgccacctcagaagaaagtttctgttgttctgtcaggctcaggtacttatctggttttacctgatatttcatttctctttctactctcctctttacatcatcttttgcttatgcctggttttggccttgtgctgtttccataggacctgccctttgaactggaaaagagagagggtatgattggttcagctgattacctttcagtgtaaataatttggaggcagttgatttgattacccttcagcataaagaatttgggggcagaccggtcatgcctggtcatcataagaactgaaggcttgcctgaagttggctactcttaggttaataatcaaatgtcatctactcatc

SEQ ID NO: 415303 - DNA, 626 bp, Homo Sapiens
  misc_feature (306)..(306): n is a, c, g, or t
  misc_feature (310)..(310): n is a, c, g, or t
actggggctctggacttagacccaaggctagacaccccgggtctgactggtgggagagaagacgtcatgtgaagggggttggcaaccaagacgcgggaccccacttgcagtaccccccgtctgcggccggcgtcgcccacccgcagccgccggccgggcaatggcaccacctagcggacggcaccagtgcggggaccccacgcctcgcaggaggcgctcgtgccgggcggaggtggcgcttcagcaccgtcgtgggccggacagcgcctcccgcccccgggccctcgtaaaaaaatcccctttggncttntccgtgaagcccagccgtagggaccggacggaagacaccgaaggaatggcgaacctccccggaccgctcctgacagttcccgggtggccttcggcctgcaaagtcggaatttgcacaccctccgctcgtccttccctgagcccttctgccctccttgcccagcccgggcggtgtgggactaagcagcgcgaggctgcagaggggcggtcacaagtgtgaccattcgcactgcactccagacgccggctcctcaggctttactggagagaagccccgaggagggctaggggcaaaagaggggccttctgcatctcca

SEQ ID NO: 415304 - DNA, 1272 bp, Homo Sapiens
  misc_feature (324)..(324): n is a, c, g, or t
  misc_feature (336)..(336): n is a, c, g, or t
  misc_feature (417)..(417): n is a, c, g, or t
gccaaacccgaccatgctccccagacacaggtcccgagaagctagtcaatcgactgttatcggcgagggacttcccgcattggcacagagggccccagccccatgactagaggcgtagaatgctggttatcagtgccaggtgatggctactcgaggatttcagactcagcagtgtggaggcaggcaaggaagcatttgatgactgtggggctcggagatcggtatccgtgacgacaacacgaggcatcatccgtgatggacgaggtgatgacgcgcatgtcttgtgcgatggtcaccagagatgtcggcccgctctaatcctgncagtgtcaagcncgtggccttgtctatcattcactgaggctcccaacaacgggcgaagatctctatgacaccatgtgcatggtagtcccaagntccaatggggtagccaacaaacaattgcttggcgcatggtagattgagtgacttcctgggacatttgctgcgtgtccagaccggagaatacggtctatttacgcaatgtagtgagcacaaccaacacacgaacgtgtgacccgagcctcattgcgcccaatggagggaattgtcgatcgccccgagaaacccctgtgctgtgtggtacggtgtcaccccggcgtttgcctgtttccccacaagcgtacagatagactccggtgcgctgggagggagaatcgtttgtattgagaaggcgttaggagcacaaggagaaaccaaccttcctttgaaaccctcccgttgtggcaagacttctgttctttacgcacaagagcgacgcgacataagaaaggggcatggggagggatatcgctgtgaggaatcccccttcgatctgcggtgcgaaccagtgggtcgccgaagtgcgaggttcacacctcggatttgacacagacccgtatcgttgcacggcacgagggggagccctcccaaccgttgggaagggcgggtggcaaagcccagaggggtaacccgagccttgcggaggcaaacaggtttcccaccccggccagtcttgcattagcaaagggcaacacgtttggtagataggattggatccgtggttggatccacaccaaagtttgtgtggtgtaacatcaattttccgctgcgaaaaagagcgaaccttgttatcactcttattatactcgcccaagtgggttggaatacgcactgttgtagagcttcaacgcccgtatagggtgagacgagttttaggttgggtgggtttaaacttgtgtgggcacgggggta

SEQ ID NO: 415305 - DNA, 546 bp, Homo Sapiens
ctggagcagctgtaacttttcatgggctccacagttcagtgaggggtggcagcattcccagacaactcctgtgtattaattatacatatatttgagtgccagatgcaccccaaatccagacttcctggtgccagacaactgttcattccccaatcaagtccactttctcatgcttactctatgaaaagggcacccatgatagggtcggggtcccccctctagaatgcagacccacactgggacccaagacctccttacttgagaacagagatctccccaggctgccctcttggaagaacagagggcagaagccttactgagccaaatgtcctggtatctggagaagggcaagcgcaacatctcatttgagaggggacaagtggagatatccctggttggtcagctgaacttgaagaccaaagccaagagtaactcattcaatgctggttactcagtgacccaggttccaagcaagtctctcacaaagctttaatgagtacctgcccctagagtaaagtaatgaagacaataccgagtgctgtatgg

SEQ ID NO: 415306 - DNA, 791 bp, Homo Sapiens
cccaaccgctgcataaccggctgcgagaagtggagggcctggaggacttttaagcatagtcctgccccttgaagtgtcacagtaagatgtcatataatcagggataaaaaaaggaatggattggggcccctgctccacttactgtatatacttggaaaaagaagaaaatcagaagacatttcttcttacaggctagaaagcgggaaaagagcaaatcatccaactgccttatctccactgatccaactgatttatctcgtgaaggagaaagctcaagaaggaaggagaatttgaggaaggctgaactcagagaagagaggtgataaaatagagagaaaggtctctggagagatcagctacaccgtagccagctgggacctgtggaggacgaagatcattatgatattccctgcagcaggaagcagcaaatgaactgtcaggccagtgaggtctgacacccaattataagttgtcaaatatatacacagcgtctttccatcatacctacatttgttaacgttatttttatttaccttctgtttgtgtccagcactgatattgtgctaaatccttcagacaaagtttggtgctttcatgacctgactatgtgtttgcagtaagtgttgtggagaaatgagggagatgagagaagaagtgctgtgtatgttcacattttggggcacagcagtccccagatcagctggggaagcaaggtgagctagtgacaagtgggccagaaagtatagatgagccgtaggaaacaggagtggagagagacagggtggaaccgg

SEQ ID NO: 415307 - DNA, 313 bp, Homo Sapiens
gtgtgagccactgcacctggctcttatcttggcttttgacatgactttctcactgaggttaatcatttccagcttttgatctaaagtgagaaatttgcaactccttctttcacttgaacagttagaggccattgtggggtaatgaatggcctaatttcaatattgtccctcagggaattaggaggcctgggaagaggaggagagaggggagagtggccagttggtggagcagtgagaacatagcatttgttaagtttgctgtcttcgaaggttgtggtttgtggtaccccaaaacaattaaaataggaacatc

SEQ ID NO: 415308 - DNA, 735 bp, Homo Sapiens
cggcggggggagcagcaacggtgctgcctgggccgccctgtctcatccctccgtccgggccatgggacgcgtgaggagccggaccttggattgtgacctgcgggcgaaagaatcggttaaacggaccaggccaaggcggggagtgccaggcagcgtaggccagcggtggcgtaccaccatccgtcctcccccggtgccgccagcgggcccgtttaagcacggaatgccgacctgcctgctgattagaactgggggagggggaggggaaatgctgggaaagaccgaaccactgggcatgcagctcagagggggaactggaaagaaaagcacaaactctccgctctctctgttagcttgtcatgtagcgataggaacaagaagagccagcaagcttcacagccttctgaaaaccgcttagagacgcgatttggccggcggaaatatttaacttagcttggccccacctctgtgacgctacctccccgagcaccgacttgtgttacgcccgggtgtaaaccagtccattgagctaaagccctagacggagcccagacggaacagaaccaaagtccaccgagggcgacgggatagaacggcgattggctgaacaagtatcgcgcttctcagagagtgcgactggcccgaaggcacacgaattcacctatcacacagcgcggagcgcagtggcagtaaactcacagacatcgaacgactggacatatcaagtccatccca

SEQ ID NO: 415309 - DNA, 531 bp, Homo Sapiens
ctctgggaaccctcgtaggttaaggtgccgggatgcacgtttgccgctttttttcccggtgaaacttgagctgtgatgcccagaaaccctagggaccggagcccgatggaatgaagcctccgggtccacttctcatggccttccaccctggagaaggcaccattttagcccacccagccgcagaatcccctacagctagttttcttctgtcttgtgcccactcccccggctctgccctgacagcttctggagctctctagattgaccctcgtccctgccctccagcttgtgggacgtctctcacactgcccgtgcttattttaccaaaccgcaggaacaagatttacgtgttaaatacctgatttcatggactgtgtgccccggctgttctaaccaaaacagtcacgcgcctgtttcccatctcttgaccctcgtgttatgttactgttttcctgtcatatttgggagttagtctctgagttttcttcccaggtatgccagactagaagcctgcttattaaggactgtgct

SEQ ID NO: 415310 - DNA, 307 bp, Homo Sapiens
tggggctcctaagagccgcggggggcagatgggctggctctcgatcctcgcctcgccgggtggcctcccaccctgcgatggggctcctaagagccacggggggtagaggggctggctctcagtccccgcctcgcggtgggtgcctccccgccctgtgatgtgtgtggtcccgaaagagcagcgggggatgcatgaggggcttggctctcaggtccccgaactcgcgctgcgggtgcctccaccccgctgcgatgggcggtccctcagagccagcgggggcgaagagggagctggcatctcaagtctt

SEQ ID NO: 415311 - DNA, 590 bp, Homo Sapiens
aacaaactcgcaaatggaaaggactttgcaatgcagagtctaaggagggaaaatgaaaatatgacagatacaaagaactgaatgcattctgaaatcttaggggaatacaaatatctagtattgagacagcccaaagctaagagtctgcaaactcagataacagtaagaagctttttcaccaagaaataggaaacttagtgctctaggtacatagagcgtggcacgcaggcagggcctgtgtgttgttaatctgtcgacccgatatcttgctatagctgtaggattatggtacgtgattcagtttcctctctgtatgcaacatccatgaaaatatctatttacttactgcctcgggaatacacattccaacattgtatgatttagatcagacttcgaagatgtatttcatgctggagttttgttaacttcgtataactttctgattatgtggtagctggtggatcgtaggcatatttagcagttgggcgaaatgtctaaggcacaagattacctttgatacaaaatgccagtaggaagggaatcgaaggacgcagagtcgatgcctgcagttgcttgttgcggtgacccca

SEQ ID NO: 415312 - DNA, 276 bp, Homo Sapiens
cttataacctctcaaattcatttgtttatttgaaacgtctcctgatttgattatcagcctaagccatgcataacaacacaaatctacttctttccaagcataaaaaggaaagagatgggagagaaaatgaagtgaaataatatttaggtcatgtcttatatgggaaaccaaagctagcattggtatttcattgcttaaataagtaaggaacatgtaattagtacttaaacatatatacaaatgtcttttaacagtagaaaaactagattcttagtt

SEQ ID NO: 415313 - DNA, 661 bp, Homo Sapiens
catccagtcttccatcttccattggagtataggaaatgttgaataagaatctacaacaagaaataggcaccagacagtggcgaatgagaaaagtgaggatccatgccttctggacctctcagtacactctgcctaccacagcacctgaaacaaggcacacattaatgcaaagctgtttagttgggaatgaaccacttaagaggctcttcgagcaaaaacatcagtctatgtagcagacgtaggtccatgaagactgtcatcttgactccctagaggattataacctctgaatggattctttcatgagtatttatcatccttaaaaccctgatcagaaatatcaaatgatcatagttgcaacgtgcctgcttttgcaccattgacagccagtattcgcatcttgagaagagagagtttcatggatgaacagagtatcaacagtatgtgaggaacactagcagtgcttctgaggacaagactgtgctggacaatgggcttgtcccacgatgcgggaaggatgggtataccatgggaagaggaaagaacagggcttgatactcctccagctaattcaatgaccaggggaaaaggaatgccagtcacggaccactagggtgcatttaagcacataacatagacaacaaaactgaagggcaacgga

SEQ ID NO: 415314 - DNA, 665 bp, Homo Sapiens
cgtttcccatagggtcggacctccgtttgttcgggggaacatgaagctaagcctgggtgggctcatttcctgatcacactcacaagaggctgtcataggaaccacgatgggagcgtcactttgcagggcactgagaccctcgcgatcgtcatcaccgggcaaagtggagcaacacgagacccaatgacgcgtggttgaggtcccgaggatccatctcaggagcctcaggatagactaggctgcatggggccctagaccctgaggagggcgtcctatgatggcgtagcactgaccctgcgtgaatttaggtcagccagcgctctagggactcaccagtcaatcagcgttcctaatattcagcctgcagggctaaggtgccatggcgcactcacccacagaagccatgccccactaggggctcggaggcagaatacgaggaatgaaccgcgaaagcaaccctaatagccgaattgctgaggaccacgaattcggattctccgggagtgcgtattcagccatgagcaccgaaccccagagcagtatccagctaggaacgccggaaggttcctagaccggactgccggaagtccctacggccttgcgctcgctcagattcctctcatcatcctcacggcagaaggacgagaaagcttgcttctggaccc

SEQ ID NO: 415315 - DNA, 861 bp, Homo Sapiens
  misc_feature (82)..(91): n is a, c, g, or t
cgagtaataggaaacagttccaagggactcagctaagccactcagagaaaaaaagaccggagctttagttcggagagggagnnnnnnnnnngggtcacgggatagagggtcccttgggatcacgtgctcatcccgggcccagctcagctgtgatcagaggagcaagaccgtgagataaggctgaaacctgaaggaatttcaaagagggggccatgatgggcattcagcggcttcgtcaggagggggcacgagtaaccagcagatggggaaacccaggtaacgagtgcatagatgattggcctagggttcttgctgtctagtaggggagtccattgcgattcgagttcagccctagagaattcatcaactaccgaggcccagttgaagtcttctgggcaaattggagtttactaagatacaatactttccaaaatattgacatgtggtagatgtttgtttgcttggtctaggacggaaatcgtgagggttgcatgcatacattgaaggtttcttgaccctgggattacccatggtgggtaagtaattacgagcagacgatttaaatcgacagggcaatccgtggtccattagtccgatgacttcagccatggccttatactagcctgttgattctaccggcaatcttttaactttttgagtataaactcgaatgatatatgtggtatctttaaaaagcaatgtatttgggaaatcctgaagccttgtttaaaagttggagaggccaccgtgatggagacccaattacccaattaatcatggctcaggcagttatcaattcgtgtggcaaatcttttatggtgatctctcctcattcacctcctcgtgggtctgggaatcttc

SEQ ID NO: 415316 - DNA, 814 bp, Homo Sapiens
  misc_feature (152)..(152): n is a, c, g, or t
  misc_feature (280)..(280): n is a, c, g, or t
cagaggcaagattagaactcagtgctgtctgactccaaagctctgtccttttcattctgggtgacacttccctaaggagggccactcaagccagcttctcttgaaactgaaatgagcgtcgcagacagcagagtttcaaacatgtgtggctntggtacccctaaggaaggcaggcactgtgcaattcaacacggtccctgcagctcctgaagtgcaggacccttcacccaggacccttcactccttgatgttattttcttggcacagaggcattggagtntgcagcctctgtgagtgaagcaacctgaatgtataagggcaacttcttacgcagtctcttctttcagactgctttgaactgcgtattgactatttgcatgcttcatatgagtgactcacagccactatgatctccacacatcccaaagtggaacatttttttctttccctccaaatatgttcctctgtccttgttccctagctaatgactggcattgtccttgaaactcctcccctccccagaaacaatcccaagacttactgattttaccttcccaggatatctaccattcctctcccctccttcctacccccatcattcaaccctcttcgtctccctcttggactagcagttgccttatctctggtcttgttccattcaatgtatcctccgtgggtctttcctgagtcagcattcaaaatgcccatttgatccggtcactctgggctcagcattcctcagtgggtcctgtactcgttatttatcgtggcagaacaaattgctcccacaacttaacaagttaaacacagaaat

SEQ ID NO: 415317 - DNA, 714 bp, Homo Sapiens
gcggtggtgtccgaagagctcactgtttctgtcgcgtggccgctcagctgggcttggctgggctcagctctccgctcccgccgttaccaggacgaccgtctccccgcagccaggctgcccggactggcgccatgagctcccccgacaaggtgtccgtttgtggggccggtttcgacctggagggtggcaaaaaggctggctcccgcacggccagccccggagccccagggcccacagccacggcctcgatttgggggtgccgggcagcggcgatggcaagagcgagagcgggttcacagatccagagggcttcagcttcgagtctgagagcgaattgatagagcaaggaagggtggtgctctggggccgggaaggccggccaggcaccccggtggatgaccaaggggacgttgtggactactcattctacctggctgacgaaccagccgccatcgtgccgccgcccagcgtccagggacacccgttcccagaaggtgccgctgccgaagggtcggctgagaattgggcagatgcggaggtcggtcccagtgggagagacgtgctgggccacagccctggaaaatggcagcaggcctctgccggccgtctccacctctgcggtcctgggccagtgcgggcctggaagaacccggaaaggggctcgaagagcagatggagcctccgcgtggatcccagcagccctctgcgaaaggc

SEQ ID NO: 415318 - DNA, 1176 bp, Homo Sapiens
  misc_feature (739)..(739): n is a, c, g, or t
cgaccgatattagcatgctccagcctcttgtcacgttgatgccctgtgcttgctcggtaacggtgctgggtccctagcacgacaagaaggccctcatcatatacgcgctcgctcaactttggacctcacaagcctccataactctgagagaagcagtacacgctatgctactgagatggttctgaagaccaagtagtcgtgaccgcccatgacctagttcatccgaaggagttctatctaatgccttataaccacttggctatctctacgcatcgtctatcctcagtacgcaacatgcacgcgatgcgtggtgtggtaactacacgcacagcatggatttaccacgtgcaagagctttatgccagtactcgttagaacagagtgtgctagtgaagactcagtttaggacacgttgactcatgaagatgaacgaagattggacgttcagtatccaagaagtcaatgagagaaggcacgaactgctgtaggaccctagataattcacattggctactatacgactgcctccctaggaggatcgtcatacacagataagccagggaaagaggaccctaaggcggaacagtagaagaagatctggaagtgcatcctgagcgcatgagatcgcacgttgtatcactctaattcgttcgtaagggaacaggttcgccacaggaggattcacctggggggaacgtttgtattagcacagacatagaggaactaaaacggtgtgttntcacttggtgcagggctttgtctattgcgctcagtctttaccccttagggtgtccaaggaagccaaattagttagatgcaagcaatgtcagcgacggtgactagtgtagtggaaccgaagaaaatgtgaatgaaatggcaatactgcagagcttcggtcacacaaagcggagcccccaatttgtggcaaaactgtccggattgcgtgggaaaaccctgcggcaatcggaaacctctatcttcccacggtcttccaccctgtcaacccccttctaaaggcgcttggcaaaatctcagcagtaaccacttcgttaccgttccccctgcctccttgacaacctcgcgccccaaggccttttccgggaaacacccccctgtgtggagaacctgtagcgacaccagcagcggtgtgggcatgcacctgttcgccttggtgca

SEQ ID NO: 415319 - DNA, 775 bp, Homo Sapiens
  misc_feature (373)..(373): n is a, c, g, or t
  misc_feature (383)..(383): n is a, c, g, or t
cagcgcccctcccagcataccactccccagacgctgggaagtaggtccctgctcatcagcgaggcgggacaggcctggagtgctggccagacctgccagggtgccctgtgaagagctactcccacgcctaagcagctgcccgtggacgcaccgcccgagtgtcttccagatcccctggagccgaggacgaggaggaggactatgatgcagtgggctgtgtgatcaacagtttcatcccccagagggtagccagaacatctcgcgaaaggttgactatgagaaacttggtccagcgttctgtggcagtaagtgatggccccgagcttcatgaaacaatgtatgctcacttggacgtggacctcacgaacggatnacacctcgangcgagttgtcgccattttatgcgaccgatcatacgaattatgctcgcggcaattccgtctcactacaagcgcaacgcacaagtgtcggcttgaatatgacacgacaacgtgacacccacacggacgtgcggccgagcattgcccatctcgagcacaagttttctactcccctccagcagcgtacggtaagcaggtctcacagaaaccctttggccagaagcaacagttggcgaccagggctatcactacgtcggtaccgggggagtcccctgagcgatggcaacatcccatttggcccactccagcacaccaatcccgctgaagcacaccagggcatttcagtcattactgctatgaagccccaataagaccaaagggataccagttactac

SEQ ID NO: 415320 - DNA, 883 bp, Homo Sapiens
gaggaagtcgcgctcgtgccgcgcctgtcacaacagccgtccaggctcggggtcgtggccgtccagcacctccaactccacgataaagggaatctgtacgtcccgcttcagaaagcgccaaaaaggtttcttggattccaggcccagagcagccccatggactctagccccctaaagctgccgcccagcacgggcgcgcgctccaggtccagctcgccgcgggcgtcggcgcagtagcggaagagcccagccttctcgccgcgcagggacgcgcgcgcagcgtgtccagcggctccgaagccaggccgcgcatggtgatgcgcaccggcttgtctcggcagccgcggcccgcgggctccaggatcagcgttgctgacatctcggagctggagcggggaatcttaaggtcgaggcccgaggcccgtccaagatcgtggcaagtgcgccgattgtccagagggcgtccggcgtcccctggtgccgggagcggccggtggctgagcagtcccagaaagcgcctgggactttagaccagttaacccggcgccctggactcgtctgaggcaaaaggagccagactcctctcctgggtcctctccttgggccccggggagcgcagactttctttgttacatttacctttttaaaatttggaaacggggcctcgctctgtcgcccagcccggattgccgtggccgttccatagctcaccgtgtactctcgaatctcagcaggctcaaagcatatcctcgcctggcctttgggccaacccgagtatgtgggaactacaggccattgagtcactccaccctggggcctaggccatcccgccctggccctgagatgatgtgctaaatggcaccacattattccctgcatcccc

SEQ ID NO: 415321 - DNA, 945 bp, Homo Sapiens
gccgctcatgatgccagagattttgtgtgccggggactgagagggtgcagtgggcattgggcttctgcccctgatgtctgtggtgggtgtcacatggaatgatgagggctcactcacatttctggcgagtggtgctggctgccagaagctctactcctctccatgggtaacttctcacagcttggtggcaggactgtccctcctcagcctctgaagtcaggcagcatcatttctgttcaccaaggcagcaggtgcagggacataggtgagcagaaagcatttagacacgtgtccaggtcttgacaacaggctggagtttggaagaagtccggataagcagctacagtgccctctgtcttcctcatccctggacacatcccgcccagcccagaactgagagcattaactcagctcctccgatggaagactccctcgtacagcctcagagtctcaggtttcccaggtgccctatagattctcccagagtcccaagggcagtgggaaagcctgctcctctctcccaggggccttgcccagactgcagtcttgctgccagaggcctaatagctggtgttctgggtgtaccactgtggtgcagtttgtctcacccccaacccctgatggttgggtctctacagctttccacttcccacttgggttgggccctagcctgactccagaagtgaagtgacttttgtccaagaagggtgcggttattcacagtctcccctgggcctttgccgcatgctgttgttcttcttgcctggaatgttcttcctactttgcccacattgccatgtcaacaaccctatctgggttagattttacttcctcaaggaagctttctcagacctcttcctgccaagggtgggcacacagtacctgactggccctgcgggtttcagatcctcactgacctgtactggtttcccttgtgtttctccc

SEQ ID NO: 415322 - DNA, 623 bp, Homo Sapiens
cacttccgtgactaggactacagttgtagtctctcgtcagggagagagacgtacaaactggagtgtaaaaaaatcagaggtggaggtcaggaggttaggtccagaagaaaacctcgtctggagcccagcctgcatcatctacgtcatggaagagtctggagtccagggcacccgtacagcacccgcccaggagcaagtcatccgtggccatcccagcccgagccccggccgtctgggaggctcatgaggcagacagtgggggcctgtgaggtggggatgggacttgagagaccaaggctgcagagaccatctatgtgacccaggagcacgcgactggatcccgtcatcgtgcgcacgagggccaaggaacgaccgcagagcactgcgctcagcaagtgctgtcgttgtgctgaaagacaaccaatgaatgctgattgacggctgccggatttatacgggtccagagtggcttccagcgatgagctagtgtcaaggaacagacattggggaatacgtgcgagccgagcaacttgtatcgcaggtgggaagtaacgagtatattcaacgtgtgcacccgattattttgagagcgagatttatcggagattcagcaggaaggggag

SEQ ID NO: 415323 - DNA, 1057 bp, Homo Sapiens
gggacttaccatcactccagaatccactacggaggttgaactttctccagtcgtccaggagaccccgactcagcctccttaatgaaagttgtagcacaacttccagtatatcaatgaggtaacagtttccagcaccaggtcaggatcaggctcagcatccaattgtcacgccagtcgattagcacgttcagaccatattgagacctgaggaactattactatgcacatcctagtaactccactatacaggatgagttgagaacatttcatatagccgccttgtagagaatgagctttaagttcgctccgacataggcatcggcctataggggtgacaggccttccgatcatccacgagccacggttgcagacgccagacagttcaatagcgcatgtagctcagaggtcacaggtagataccatctggtagccgtgggagacttactcatatagctaccaggaatccttatactacagaacggtttaacaactgatactccagacgcatgcagtaggtgagcacactcagacttcatggctcatccatgaaaccacaggggcttgccgagtagacgtcgcgagtcaaccctacatactcacgagattgggacaagttcttgacagtcgccgtgcggtgaagacttactaagcttccatctactccgagagtcaggcgttcaagaacgtcatgacctctgataacactggactgaaagtcacagggtcccaccatactagagcttagaaaccatactcaagggattcatttggctgcaagtcctgacacagtgtaccattcccagagaatacaaggctttaagcgtggcacccagagggaacaagaagggcgcttccaacaaagcacccaaaccaatattgtggagctcttgtaccctggcggcagatgaggattgttgtccatgtattggatctccaacccaagagcaacaggctccggccaagtgcctgtggccagagcccaaaaccacaatggcacctttcaccatcttgaacatggatggaagcttggaggccattaatcctcagcagaaaaaca

SEQ ID NO: 415324 - DNA, 932 bp, Homo Sapiens
gaaaagtagacacgggggagattttcccttggtcggccggcgtaaacaacccagttttaggtaaacgacagggcctaaaaacgtcgtactcgtcgagcgcatgtacaggtattagagagcgtattataggttgagtacttacaagcatatcacgacaagagggtactactaccaagtaggcaagattagcccttttattcaaaaaaccgataatctagcacggggatttttgtcgccccgcgagaggggaaaaatcgccacgagcggggggaatagacgtcaagcgactggaatggtggagagagcacctcctagactagagtctttccctcacagacaacagtgggtttttctccccagcattatgagggcattttgggggcccacggtgggattaggaggccttgaacaatagaaacccgtgtgtgagactgtcgcagagacagacaaatgtgagccgcaggagcactcggtgctaacccaggtgttgtgaactggggcgacgcgcccttctacgagctaaaaaggcgtgacttctttcaacgccaaatactcccccataattttaattacagaaggtttcccaagagcaatttttttcttcccacattaaatatctgtcgtcccttatacacagtttgcccaccttttgctgtgcgataacaaatgtgtgtataacaggggaggtgcgctatcctacagtgggggtgcgccgataacagaaaatcttttccggcccaacattttgtgtggctgaacaaccaaactaaaacatattctttactcaccacaactgttaggttgtcgagcaattacccacaaagaaaaacaaaccaagcaacacccagaacacaacacacaaactcaacaagcacaacagactaccagacgaactacactaacaactcaataccagagagaaacacgaccaa

SEQ ID NO: 415325 - DNA, 705 bp, Homo Sapiens
agaaacccgcggatgggtgggccggcagctcctgggacgcccgactcacagcggagccggctgggatgagaaggattgagggagagaggggggccctgtcccaggtgtctaagaagtcccccacctctgtactccccagcccagcggtgacttcgaggtgggcccagggggcctggagggaggggcgtggatacagcgggaaaggagagacccctagcggggtggacaagaagggaggaactccacagaactgcttaatccggctccatccccatcagcgggctttctcagcgcctgcacccctctctatcccatctcgaagcctccagttaatccagagtgagacgcaggaccgccgggaggcgagcggggatgctgaagctagggcaggctaaagccccgcggccaaagggcaggcttggtgcgccctccggccctctcgcccttcgcctccgacgcccaggaccctaatcgcacagcaaaacgaaaacacgggaaccaggcaggtaacaaaacggcccgaggaagagagaagaaccgggggaccctggcagacctgggccaggggggtataaggacgcatacacagggccgaaaagcctcccaggctggagccgcctgcaccctgcgagaacgggaaccataaacgcagatgaaccgctaccaaggcaagaatacagccgggcgatgggcggggagtgcaca

SEQ ID NO: 415326 - DNA, 1156 bp, Homo Sapiens
  misc_feature (129)..(138): n is a, c, g, or t
ggcggcgggtagaggcgaagtgtttagagacttcgggtccctgactcgcctccagcagtggagacaggtcatcggtctggtctgcgtgtgtgcttctgggaatgtttcagtgggcagggagagcgcgcnnnnnnnnnncttgttgttctgctagcgcgtgaggtccgtgttgcggggagctctcggggagtcctcgctcggagtacgtttcgcagtacgtgttggagttcccatgatgtctgggagcccatggtctccgcattggaaccagtgcttgggaggtcttcgttgcacaagtagcgctagggcgtcgatggtggggaagcgaatcgtgtcagtgtttggagacttgctctgggcagttcgtgtatcatttgcttatcacatgcgtacttaaaaaggggtctgctggtccccttgcttccctgctgctgtatattcttgtagaaaattggttttcaggttcatggctgacccaagtaataacatccccatcattttaaatactcctccagaaaataactctggtttaggtgtatttcatgtataagtgtagggatcaggtgtctaggtatagggtataattttattcgtcttataataacatctctgtcaacttcgtattcccatattacatgctctattgagagctatttagattgctgccagtttcatcaaggtggttgctttactctgggtacgaattgactgtcaatactagattacacagtttacaggaacattggtgctgggagttcctaagttaacccaattattttgacagtctgtgttggacgtatcttgtagatggtatatccagtagggtaattgttggagcattccagtggtaatgcgttatgtctagcgtagttaacttcattatatggtgtacactgtgtaatttttatagggttatagagaacctgtctcccggttttctagatattggattgcgaaatgataacgagactgtggccataggcgtgatgggtagcatagtcctaatggtgaagttatgcaacatgaactttgatcccaagttaggttagataaatgtttattagtggaggttgttgtatgtatcggtagcacgtttttgttactagtagataatcttgatccggtgtgcaatttaattgtcgatgttgggagtatg

SEQ ID NO: 415327 - DNA, 456 bp, Homo Sapiens
gttactattctttaataaatgcctttttgtgtagaaatgcttgttggtttctgagagttgtaacctaaagaatctttataagccattggtctgctgtggggagcgttcgagatgaaactggaacgttgtttgaacctagatcataaagtgactccaacatcttcataccagggagaggaggaagctgtgctgtgaaggatcctttttcatcatgattattgcatccacagaagcagtgataaattctaacagataatgcaactcagtctacttggatgttcacacctgagactggagaagacctgctgccttctgcagagccaaacattcctcacatgctcctccacaatgctagttaatgcagcaagaatagtcttatatagactataaactcctggtacactgtgtctacattgctcactgcagtatcccaacatttaagaccatggtcttaga

SEQ ID NO: 415328 - DNA, 633 bp, Homo Sapiens
  misc_feature (583)..(583): n is a, c, g, or t
gcggcggtttccaggacctcagactttttgccgaggcggcagtccctagacgaagcgaaggaggcggcgcctgccccgcccacaagagctgccgcgcgcgggtgttatagctccaccccatctgcaaaggaagggggagcggaaagagcgggatctagcgtgggataaagtgggactactacagtgtaactggggcattgcgcccccttccttaaaaattgatggggaatgcaaaagcccttgactgctccaggactcgagggatcctcggtgccaggatgctgggtcaagcgctccgccgggacagaggactcataccagggaaatggagcccagcctcgtgataaactacgacccaagctgggggaggaacctagttttcgaaaggaaaataatatgcgcaagctttaactgagcagtgggatggtgtaagtcagaggaaacagatgacttgaggggctctacaaacttttagttcccttcccaaaaacccaaccccttgagcccaagtcgcggcagcatccttccagtcggccagtccccttgctgcagttcatgaaaactggcactaattctatggctntccccaaataaccgtttacttcagttaattagaaaacaaaacataaatgg

SEQ ID NO: 415329 - DNA, 825 bp, Homo Sapiens
  misc_feature (519)..(575): n is a, c, g, or t
ggcggtgtctccggggttgggcacacgagagtagcgggcagaagccaacgcaggttgggatacgtggggccacagccagtctctgtggtccccgggtctaggcttagcaccagttacagcaaccagacatccaacaggtgtttaaacctgttttttctgtaggctaaattcacatccgtttgtcaagaggggattgtcaacctctgtccagcgtctctttccgctgcaggaccatcccaagatgaacttaaaggacagccttgatgtggcaaagccggcggacgccaagaatggcaattccatccgcttggctttgacagtgtcagaagcatgatgcctgacgattgcgcatgagggtcggccccttgcggcagcggtggggtgcactgcctccatagtacaccgctgcccgctgcttggattctggtgggcccacctcatgctgatttccaacacctgaggttgtgggagttgaagagtttccagttgtggctcagtcactaactagtgctgagactnnnnnnnnnnnnnnnnnnnnnnnnnnnnnnnnnnnnnnnnnnnnnnnnnnnnnnnnntcctacccttcctactcacctaggagagcgtaggtatgaaagccttccaacgtccccagcatatgtaacgggataacctttatacatttaattagaaccaaataggtgaaggctgcaaagagccaggtgctcattactttagggaaatcttcagtacatctgttcccacactgggactatgagcaggtttgcggccatgtaagagaagggtgaggcaaaatccctcatcagacttgccatcaggaataag

SEQ ID NO: 415330 - DNA, 656 bp, Homo Sapiens
ggcaaaagcaggtcctgaaggcaggatcctgaagatcaggcaccacctgacagaattctcaagcacctgactcatcacctctgcagtgcatccctttccagaagtccactctcctgattcaccaccagtggaagttttaacaatggaaacaccatctgtgcaaggtgtccacattgctagctgggcggtgaatgattcagctccaaaatcccatttgattgcctgctctttccagacacaactgcagcaaactggattgtctagacacagatgatgagacagagtttagggtgcaagaagctaactagggatcaacacctgtgtaaggaagcaggtggaagcacaattgaagttgagaaagatgaagaggttgaactgccctgcaggccagatagagccttgccaaaccagtggggaactcggaggaagtcctgcctgccagtttcccatgtggagccgaaacagtcgtgcttttatctctccaccttgctcagtcaccagatgcaggccacgcccagaagggtatgtttttctctgcagctcagactgatgttgaggagctgggagctggaagccacctgctgactgcactccctgcagctggtcagcccatccttctcgaggggcatctgaatggcatcttcatcagaatgcaa

SEQ ID NO: 415331 - DNA, 141 bp, Homo Sapiens
ctgctacggttcaggttagatgagctgctcccgttggtggtttttatctcttagctacacagctgcctgtagcactctcgtctttcagaagagtgccaacttccattctggccgtcagaattaaaacaaagaatcatcctc

SEQ ID NO: 415332 - DNA, 598 bp, Homo Sapiens
  misc_feature (114)..(125): n is a, c, g, or t
  misc_feature (242)..(242): n is a, c, g, or t
  misc_feature (276)..(276): n is a, c, g, or t
  misc_feature (318)..(318): n is a, c, g, or t
  misc_feature (323)..(323): n is a, c, g, or t
  misc_feature (340)..(340): n is a, c, g, or t
  misc_feature (390)..(391): n is a, c, g, or t
  misc_feature (403)..(403): n is a, c, g, or t
  misc_feature (410)..(411): n is a, c, g, or t
  misc_feature (422)..(422): n is a, c, g, or t
  misc_feature (458)..(458): n is a, c, g, or t
  misc_feature (525)..(525): n is a, c, g, or t
  misc_feature (552)..(552): n is a, c, g, or t
  misc_feature (574)..(574): n is a, c, g, or t
  misc_feature (586)..(586): n is a, c, g, or t
gagagagagagaggggcggggggtaacctctttacttcccctaggtgaagacagaaagaaggggagaagcaagccgggggtgactgggtgggcagcgtgccttacgcaacggcnnnnnnnnnnnnaaacgggggaaacaaagaacgaataaagttaactggttttgggaacccaataaaaaaagggaaaaacacagcagtctctttcctttggcccttgttagcgggaagggcacgacctcnttccttagagagggggggttgttacgaacggccntagacgcggacgcatttccaccttgggcccatttgcccatgnttagntttaccccagcgttganttgccttagatgtcatgaagaccaggggtatttccccaagatattccctnntttcccaggtgnagccctnnccctccgaganaaaaccgatggggagggcaacattagcagccaacanctaattgcgccccctagcaaggtccctcggtagctgagacccccctgagaacttggctaacccctgncccccccaagttttgggcctggattgnaagacccaagctgagcccaggntggttcaagccnaccccccgagtt

SEQ ID NO: 415333 - DNA, 585 bp, Homo Sapiens
  misc_feature (94)..(94): n is a, c, g, or t
  misc_feature (110)..(110): n is a, c, g, or t
  misc_feature (120)..(120): n is a, c, g, or t
  misc_feature (145)..(192): n is a, c, g, or t
  misc_feature (207)..(207): n is a, c, g, or t
  misc_feature (340)..(340): n is a, c, g, or t
  misc_feature (470)..(470): n is a, c, g, or t
  misc_feature (507)..(507): n is a, c, g, or t
  misc_feature (512)..(512): n is a, c, g, or t
  misc_feature (545)..(545): n is a, c, g, or t
  misc_feature (554)..(555): n is a, c, g, or t
caggatgggagcggaaacagagcctcttgttcacactccacaccctcattttccagccaggtgacgggtaagactattaacaggtggctttccntttcccaaatttgggnttttccaaanttttcccaaaaacgcggcaactccnnnnnnnnnnnnnnnnnnnnnnnnnnnnnnnnnnnnnnnnnnnnnnnnaaaggaaaccatccnttaaggaacccagtattgtggtatctcccactccgagcccgagcttgcaacaaactttaacatggacaggacgccagggaattcacgtacaggcttataaggggattgacgaaagggacaatttttcagcagncttaagaggtgtagggtggggcatttatttttactacaagggagcaacacaaacgtattaagcgaaaccctcaaaggaaacaagttacctgacagcactaaacttcctccaaagagtggggttgaccaantcctgtattgtccaagttcctaccagttcctttacancgtgntcagagtgtgtgtgggcaaatttaggtcctagntaagtagtnntgggacgcaaactgtagacacgacacactc

SEQ ID NO: 415334 - DNA, 252 bp, Homo Sapiens
caatcgctcacacaagtgcaagtgcgtcacagcgccaaaaggaggggggttggggtggaaaattcttaaactgctcttacaagcactggtaacagtttgggaaaatacgtcctacagcatcccacgcgtaggtgaacttgggctctccgtgtgttcagtttggaggacatcgaccacacacaccaatcagcccagcagtggacgattgtccaccatcgtcttctatctgaaattgttacagcgcttctctgg

SEQ ID NO: 415335 - DNA, 514 bp, Homo Sapiens
  misc_feature (429)..(429): n is a, c, g, or t
  misc_feature (445)..(445): n is a, c, g, or t
  misc_feature (479)..(479): n is a, c, g, or t
tttcaaagacagctatgagggggaatctctcagtgtgcagggcttcacgcactacacttggtcatcaaatcatgttgaaagagatgcagcctcagcctcagctttgcgcaaacttaatttacccaaaccaagggaaccccgggcgcctaaggttgggccctttgggaaacaaggggggggccaacaaggaacaaggaaattccaattcaaggaaggggcccttaggtgggggaaggacggaaaaagtttacgggaggcaatccatacgcacaagggataatctcgggacagtaagtggtttagtcgttagacttgaacacttaatgtggacgaagacacaattgtaggcgaaagactctttcaagcttgcaggttaacacctaccagaaactcagtctactttctgggaagacggcaactaggacaggnccaagctagaatgganctgacctcaggcgcacttggatgccagggccagntttctggtcatttggccagttccaggtgctgctga

SEQ ID NO: 415336 - DNA, 249 bp, Homo Sapiens
  misc_feature (46)..(46): n is a, c, g, or t
  misc_feature (101)..(196): n is a, c, g, or t
  misc_feature (201)..(201): n is a, c, g, or t
gagactatagcaagcagtaccttggtggcttactggggtgcacagntggggcgcacttccaacggaaaaatattcaggtaacgaggaatagcagagaaagnnnnnnnnnnnnnnnnnnnnnnnnnnnnnnnnnnnnnnnnnnnnnnnnnnnnnnnnnnnnnnnnnnnnnnnnnnnnnnnnnnnnnnnnnnnnnnnngcaanttcctgggaagcgtattcctaggcccttaagcttttaacagatgaaac

SEQ ID NO: 415337 - DNA, 626 bp, Homo Sapiens
  misc_feature (84)..(84): n is a, c, g, or t
  misc_feature (116)..(116): n is a, c, g, or t
  misc_feature (308)..(308): n is a, c, g, or t
  misc_feature (394)..(394): n is a, c, g, or t
  misc_feature (403)..(403): n is a, c, g, or t
  misc_feature (433)..(433): n is a, c, g, or t
  misc_feature (440)..(440): n is a, c, g, or t
  misc_feature (497)..(497): n is a, c, g, or t
  misc_feature (553)..(553): n is a, c, g, or t
  misc_feature (556)..(556): n is a, c, g, or t
  misc_feature (560)..(560): n is a, c, g, or t
  misc_feature (587)..(587): n is a, c, g, or t
  misc_feature (604)..(605): n is a, c, g, or t
gatcagggcaggctatgcgtcgcggtcggagtggggtctggcgtccggcgaccgtcgccatcgtcctcgttagtatagtgtggnacaacgtggagccactacagcccccccgcccnttttttttccctttaaaaggggggggtaaaaccaaaagcccccacccccggttggaacaccgggggaaacccaaaggggcccaaacgggttgggacacggagggaaactttccttttccccccaatgggtaaacggcacgaaactttttttggaaggcaagtggccaccccttgagaattgggtgccacatnttggcccatgcgcacagggcagcacacatggggcgccaggatcaatgctggcattcattattcacctggcattcccattggggccntgtgtgccnagatggggtttggggctggacatgggctcnaggggcnactttgggcaagccaagcccaatgaaacttggggcaaaacaatttctgggtcggacnaaaaaggtttggggcgcaacaagcacgcgttcatcgttcgcggcattggcaaaccntcntccntttgcagattggggtccgaaaaaaacnttggttggaagatcacnntttatggttatttccaaatag

SEQ ID NO: 415338 - DNA, 404 bp, Homo Sapiens
  misc_feature (87)..(87): n is a, c, g, or t
  misc_feature (119)..(159): n is a, c, g, or t
  misc_feature (327)..(327): n is a, c, g, or t
  misc_feature (352)..(352): n is a, c, g, or t
ctgagagacccgcagcagccggagaatgtactgctcgcgaggatttccgagaacgcggcgccgagcccgcgtacacggttaccaagngcaactgggcccggtgccctgagccccggtgnnnnnnnnnnnnnnnnnnnnnnnnnnnnnnnnnnnnnnnnnttttttcccagggtcccgtaaaggggaactttttcttgggtttccctggcggcctattggcgcgcggcggcaaggaacccctttcccaacgggcaagttcaggcctaggttcattccttaggaaaaacctttcccaaagggcccctcaagaaggaaccaggccgacanccttgtacccccgatgggggccaantggggccgggggtctcaaggggcttgtgtgccccctcctccgccttccctga

SEQ ID NO: 415339 - DNA, 290 bp, Homo Sapiens
gtaaaccgctgccggtgagtttgggagtattttcgctttttgaaagttagtatttggctctcacaaagcctcctgattttagtaggctttccctggaatgacccagattccttttcgttaccttagttaaggcaccccctccccgtgcagggtcagggttggaaaactaccgcgctgagcccaaattaccgcgaagatcgtcggaaatgtgcgcaactcagctaaagcggagatttaatggatggtattcagtagaaaatgggacaagacatgaatggacagtttacagg

SEQ ID NO: 415340 - DNA, 121 bp, Homo Sapiens
cctgggaaattcatcgcaaaaagatcattgcctaggtatgttgtcatcaggttatctaaaggtcaagatgaaggaacataatcttcaaagttgtgaggcaaaagcaccaggtaaccttatt

SEQ ID NO: 415341 - DNA, 252 bp, Homo Sapiens
acggtgagccaccgcgccgtggccgatgcacaatgctgtaaagacgaagcagtacaccgagacggtaaatagcagaggatgcaggccgacccattaaaaacttctgcacaggttgcacgatcatgttcaaagtgcggaaagaataacaaactgggcgtaagactcggccccaggtgcaagcgggacatccacggccttgttaactcaccagacacctatgagggcagcgaccaagcactgcgaaggaaacac

SEQ ID NO: 415342 - DNA, 692 bp, Homo Sapiens
  misc_feature (513)..(513): n is a, c, g, or t
agacccccaaaagaggctgcagattcttagtggacagctctcatatcccctccaggaaaatgatgaaaaatgtcttcagaaaaatagctttatgaaggcaagaggactttttgcacctgcaagacatgtctgaaagctcctcaggtcaaaacacaagtagtcaagagatttgtccatctaattcatcatactactctgatccaagtgagacccacactgggtcagctccatcaaggagaagaacattccacccacgtttggattctggaatatcatccttgcttccatcagattcttgtaagtacctcacttggcacaaggtagacatgacgttcaaggaagtcaactgcgttgcccaagagtaagagaaggaatctctgaagaagagcaacttttcagacaggtagagtgtgccttgctcccaaggaaaagagttcttgaaaaaaacaaatgggaaacatggctacaagaaaactgggaagactgcaagaatttgaacatttcatttcaggngttgggggatccttaccaagttgaaaattttaacagaattcttagaagactaattcgagttgaaaccctctggttagtggataattcactggtggacttaagtgccataagattgccaaggcaaaaacatgctaactgacaagaaaatcatgggttttatacaaggataacaagtgctg

SEQ ID NO: 415343 - DNA, 689 bp, Homo Sapiens
tgagttcagcctatcatttgagatccgagtatgattggggaaatatcctgaaatagtctatgatttgaagaaatggatagatggctagaataacatgctagatggtagtcaagttactaactgcagaattgatttgataaaattctcatcgtgtctcctgacttaggagaaatattgggtctgatgaatgggtaaaattcccaggtgaaaagaatttggtctgtaagatttggcagcaccctgaggtttgccatatctgatggcctggctttagtggcagcacctagtgaaggcccaggtgtccttctgacaacctttaccacctaccgttttgtccttacttatgttgaatcactacacacaggctgttgaattcagctgtctgtggagaaattataccaaccacatggttagacagaaggaatacaatatattgcttaatttgtatctgaaagctaagcaacatggaaaaaaatcaagcctgctcagtcacttccatgaggacaaatgaagacacttcaaggaggacattgacatggatctgccagctttctaagactttccccagattcaagtccagtcacatcaagttgccttattaaagggtctgcccactcaaaaggagaaagtgcaaaagatgctcagcaagggtagcaaacgcagtcagatgatacttcctgacagcatcc

SEQ ID NO: 415344 - DNA, 991 bp, Homo Sapiens
  misc_feature (202)..(243): n is a, c, g, or t
  misc_feature (490)..(566): n is a, c, g, or t
caggatccttccagaccaggaagactctcacactctgcagagaagttgcggcttgtttagcatttgacctacattcagaaacgaccagcctcccaactttcagctctaaggattacttaaaaaaacaaatggtgttcattctcagatatcttgcctttctcaggagagaaaaatgaagcttgcaattagccagcaaactagnnnnnnnnnnnnnnnnnnnnnnnnnnnnnnnnnnnnnnnnnngggagcaatgtggtatgttgttgaccagctggaagttaggatctcaaaggaaagaacaggataacttaagaggcacttctgggactgcagagctgagctggtggttctgaagagccatcggagtgtgggttcaggcagcttccctaattcagaagcagccccaagtgaatagatgacaaagaagtggatgtgaacatgacagaaaaagccagtcatggcttagaataaattttattattgttctttnnnnnnnnnnnnnnnnnnnnnnnnnnnnnnnnnnnnnnnnnnnnnnnnnnnnnnnnnnnnnnnnnnnnnnnnnnnnnccggcccaaaaaaacccccgagaggggggcccaaattatcacagaaccaccaataattgcactaaacacagggggcccacaaaaggagggagcactataaacaacacaaaagaaacggggcagcatattaaaacaaacgcacaagagagagagaaaaacgagggccacaggtcaggacaacctgctgtgagagaaacaaccacacacgcggggggagcaaacaaacaaaagagaagcacaacaaacagcccccccacacaagagattgacaaccccctcgcagggacgaaacacaacaccccgcgcgaggcgactaacagggggcgaaaacaccagcacgcgacaaaataacagccgccgccacgaagaaaaatcgcagcccccatacaggagccatagatgacacacaacacacattacagcga

SEQ ID NO: 415345 - DNA, 810 bp, Homo Sapiens
  misc_feature (136)..(144): n is a, c, g, or t
ggccaccttgttagtggcatcatttataaccctgggcagcattgctataggaatagccatatcctgtaggtctataatgctgtagaaatggaatgtgtggtgcgaatgaaatttaaaatttaagtagccacggtgnnnnnnnnngagaaacaagtaaaattcatttcataatatgctttatctctatttccaaaatattatcatctcaacatgtaagaaatataagaagtattcatgagatattttacattcctttgttcatcataagtgtttgagatcccatgtgtgtctgacacagcacctgactttgaactcaccacatttcgagtgccccatagcccatgtggccatggtttagagatttcagaaagcattcatggaaaattctctttcctgatcctcattcactatcctgggaagtggccagataaggaagcaaggcccagaagggcccagccagtggctctcagactccagagtcatcgagtccctcactcgagggcaggttaactcacagatggctggcccccaccctctgcatttgccatccagcaggtctgggtgggtaccaggatgcggattcgtaacaggagaggctgatgctgccagtctgggtccacattttgagaagcattcctccaagggtcccagccacgcgtcataccccagtaaagtagatggctccaaattgaaatccttgctttccatcttaacatctcattctcttttatatgcacaaaccatgaagccaggttgctaagacagtctgaaaacaaataccaaagaacagaggtgctgtcatggttacca

SEQ ID NO: 415346 - DNA, 859 bp, Homo Sapiens
gccgcgctttggcttcagcgactgtgcatttttcccctcctcttcctccctgccgccttgcagagaggactggtggagaatgcttgcatctgtaatgagccactgtatgcggtgaatgccaggcctgatccgaaccggcccagttaatggtagatgaggtccgagccacctcccaggggaacagggcactcctaagatgaggcgggcatttggagaggatggggcccacaagggaaaggaggaagcagtcatgggacttctttcacgagatcctgacccagagaagcccagcagcaaggcttccggttcattctgggcctcctctcacctctgctacagacaggcgtggcagcctgtccagctgagcaaatgctcagtccctaatatgtgcctctgctactgcccctccccagtgtcctgggtttgcataagagcccttgtgttgggaagagggggaataggtggagtggggagctgattggtcactgagggggtggggggccgggcagccgctagaaactggacttgtttttaattgtggggcctgggggaagggcctgagaagaaactctctttcatgccgtaattgggaaattccactttgctggcctcgtgcattctgccctgtggacagggccctttggctggggccaaatcaccaaggtgtccaaggccaccggccgtctgcaccacttggcgcccctcccaagcccagctccccacatcagggctctgtcatcccctgcagctgccgaatctcgagtccattttggcatcgggaccccctcctcactctgtgagtctttgtgcggtgccccctcacctgctgggaggctttggcgggccccaagaagccatg

SEQ ID NO: 415347 - DNA, 292 bp, Homo Sapiens
aagaggcaacgttgactatacgtgtttactcaaggcttttttataccggactatatgccatccaggtttaagagaagtccaggcaggctctagcattatgtttttcacagaaaaagccggtgcagtagcccggatgcccagatccactcatttcccaaaccggttcccacacccgctgcccaccacctggcgaggaaggagcgggcgaggttcgctcgaatcgtcgtcacgggtttccgtgggtacagttattactcgttacataatattaaacaattaagattaaaaatgg

SEQ ID NO: 415348 - DNA, 866 bp, Homo Sapiens
cagagggttgctggcaaagcacaggaccacaatacccagggatccttgctgctagtgggccggatgctgagggcctgcgacggcttctgggaatgcagtccggtcgcatttctccttcttaccagcgcgttttcagtttcatagggaagcctttccatgaaactggagcgcctggaggagaaggggcccagagctagggaggccctagcgatttctgcgaaagagttccaagtataatttcactgccaacagtgtcataactactttgcctttatacttagtacagctaggttcggttctaatgccagctcagagcagtgctccaagcagggcttaagaatctgtgttgtcggttcttagttctgggccctgtgctgcaggcacctgcaatccgccagcaaccccttcatccctgcggcgggtctaacctaagaggcattgagaaagcttgctaaggaggaggtacaccgcacgctacagttcccgcgcctttgccgaggcgcttcatttacctttgccaaactcgacacctggaactccacgacttgtgtgctttctcagcctgacacctggcctgaccaacttgtatccagtacattaagggccacggacgaatataatctccgtctagaatagtctctgaggtacactgacaagttgccagtgttgagaagcatcaacagggtccagaggaaaggcctgggttatgagtagggcgtggccggtaattatccacatctagtattactggtcctggacagtcagacgttatacattgggaccatgatcttatcaccctctctgcttgccatcgagtcaagcaaaagtcttcactttatacactcacgccagatgcccaagacctg

SEQ ID NO: 415349 - DNA, 814 bp, Homo Sapiens
  misc_feature (71)..(134): n is a, c, g, or t
  misc_feature (157)..(282): n is a, c, g, or t
catcttgccatgctgtggcactgagcatgaagccatcaggccggaagtggagccgagagttgagactagannnnnnnnnnnnnnnnnnnnnnnnnnnnnnnnnnnnnnnnnnnnnnnnnnnnnnnnnnnnnnnngagacggaagtttcactcttttnnnnnnnnnnnnnnnnnnnnnnnnnnnnnnnnnnnnnnnnnnnnnnnnnnnnnnnnnnnnnnnnnnnnnnnnnnnnnnnnnnnnnnnnnnnnnnnnnnnnnnnnnnnnnnnnnnnnnnnnnnnnnnctaaaatgtcattttcttcggtgccacggggaagtgaaatagtcctgaacaaaattatatatcctatctgaggttgggatgaggcacagaggtgggaagaaaaagtccacagtcaagtacatgggctggacataaatgagagcaagactgaaatgctgaggggtctgcagggagaggcacaagttacttgcatatagcggtgataagcctaagtgaggcaaactgaagtcctcagggttttctatgttttgttttccatgtggctaaaaattctgtgattttagtatactactgcagaaatacagaatcaggtcttttatttcataacttactgacactggcttaatttctttgcacagttctaccctatttccaaaaagctaaagagaggaatgtgctagacaaccctccctggctcactatgccatagtctcttttgggcacacattatattcctatccatggcaaagcagccagggcagaagaagtctctacatatgtgccaccttggtctccaaaaagctggtgtccc

SEQ ID NO: 415350 - DNA, 528 bp, Homo Sapiens
gtcactcgaactgggaggatggtgaatgtggggattttattgagtaatggaggtgtgggtcagagggatggatggggagctggaaaggagatggactggaagattatcttccccctggagtccagctgtccctcggccagtctcctctctgaccatccccagccgaacccctcccaacattcagacgcaccttctcttctctccttctctgcctcaccgccctgccgttcttctactcttctttttttctgctcatggagcttggggtttatatggacacacgataggggtgtggtgagccagagtgatcttggagaaggcaacatttgggcatgaaaacaggaaagcttgttcccatttagggccgtgggtttccaggcttgggggcggggcctttgctggggaaacgcccttctgcttcctgtccgtatcagcatgcatgtgatgtaatcatgtgcacagtttcagggagggaacccttttcctctactctcttaggtttgtattgagggcctgaaaattaaactg

SEQ ID NO: 415351 - DNA, 570 bp, Homo Sapiens
cccaatttctccagatttagaaaatcagtctccggcaaaaataaattttcagtgggaaggatgtcaaactagctattctgcatcatcagtcccatgtttggaagtagccagatcaaggctgaatagtaagaggctcagtaagatggaactttacttgtggtgtttgtgatggtaggactctcctgctgctgtgaactgagagcagcagagttctgtgttctctgtgggtctccgtatggctttcttgtgtaggaatttggtttaaatacatttttcccctaaggactaaagcgaaatagagttcattatagcctttttagcaatgaagttaagcgctgtactttatgaagtacgttagcatcagtaaagagcaaggttttatccattttcatttttctttctgttctagaggttttttcctcccttattttgcttagtggtgagttttatttagctaaatttgactcatttgagattgagacaaatgttgaaagttgagggctaactgctgttttaaaacaggaaaaaggaatgcaggcacttcagctgtttcctcctccaatacaaata

SEQ ID NO: 415352 - DNA, 909 bp, Homo Sapiens
tttttgttagtattctgccttgatgatctgtctaatgctgtcagtggagtgttgagagtctcccactattattgtgtggtattttaagtcttttcataggccaagaataacgtgttttattaatctgggccctccagtgttgcatatgtatatatttaggatagttaagtcttcttgttgggttgtaccccctattattatgtaatgccctcctttgtccgtcttaatttttactggtttaaaatctattttatctgatataagaatagtgactcctgttgtttcttgtttgtgtttgtatggtagatcttactctatcactttacttttagcctgtgggtgtcatcacttgtgagatggatctgttgaagacagcagatggttggatattctttttatccagcttgccattatatgactcttaagtggggcatttagccaatttatattaaggattggtattgatatgtgagatttcgatcctatcatcatgtcgttagctagttattatgtagacttgattatatgatccggctttcatagcgcctatgagctgtgtgactaagcatgtttgtggtaactgcctgtcacctccggcttccatgtctagcattccctaaaggactggtaaggctggccctagcttgaggatgaattccctcagtagtttggcttgtctgagcaaggactcttatctcctccttccctttatcagcctcaaggttgtcgccacgactatgacgattctttgggttggcaattgctctgcctctcaccctctccttgccaatcggcccccatgtctggctctctccgcgttcagctccgcggcctgcccaatacccctgtggggttcctccttccttcttgcactggcaccttctctctactgcccctcccgctcttccc

SEQ ID NO: 415353 - DNA, 958 bp, Homo Sapiens
tgcttctatcacactccagtgctttaagcaggttttccccccatattttacctaggagggtatagctgttacctgtggaaaggttggttcagtgggggctattctgccattaccaaaagttgggtcctgttctctactttttaattggccggaaaagaggcataaactcggagaacccaagaccccggcctggcgtgcagccccagcagccggaccagccttgggcaacagcgtgcgacgttcagctgtctgtgtctccagtgctcccattccatcgcacctgaatgagggatttgggaggtaaaacagggctgagcgtgcgttcgagcttctcctgcatcatgaccaggatgctctgggacaccttgtccacgtctgtgtccaccagtcctgctcagaatctccccaggggcttttccacgatgcccatccaggcgtcaccctcactctaggccaggaggagaaggcatgccctgaggattcagcctcttcttcttcatccctcccagcacccagtgtgttgggtgcacacattatggttccaaaccagagtttccctaggaaataaacacggaggggctgaaaggacctggggccatcgggggtggatggccatatcctggggccttgatgccagtgccgactgttccctgcaacgcttccacgtccacgccaacattgcaaggctatgtcacggactggaacagctacagtgatgacacacctgaggtgaacacaaactccagcagcatcctggctctcatgggggcaagtgcatgtgggaatctaaaaaaccttccacaagttgaagccctgcaagggtggctcatgggcttgccagaaagttgtttcctggatcccagtgggtaggcaaggcatttcaagcaaccttgtgaaccttcaccagaagcagctcagggatatcctgctgcctcctaagagccggtgtccggcccca

SEQ ID NO: 415354 - DNA, 686 bp, Homo Sapiens
cgcccccagcccagagggccgcctgcgctctcgcccccggccctggccgcgcgtgccccaggtcccccagtagcgccccagcgccgctgctgctcagacacaccgaaataggaatgatttaatccaacgacacctcccagggctgcccagtcccggttccgccggctcctgagattggggaggggcagaattgggtggaactcgggctggggggcggaaatggcccgagtgggagggaaggcgcggagtcggacgctaccttgtaaccgagttagatttctgcagaagaggaggacgaaggtcgcccacggaccctcgggtgacctcgtgtgcggcctggtggccgggcacacccgcgcatggacgaggtccctcccaggggtctccctgcaggggtctccggggaggtagtgggcacgtgggtccttaacctctccattgcatcatccccatcccggtgggtacagaagcgcagcaaccccgcggttgctcccggaagacaccgcgtctccaacatttacacggagatgctgctcggctcaggtcgggtccgtacgcttccgaggtgcgtactacgcgagccacacacatcactaccgatattcctgagaaagtcggtgccacaagtaagtcagctgcaagccgtggggtggccggtgacgcgctgttgcccgtgaatacggcca

SEQ ID NO: 415355 - DNA, 1321 bp, Homo Sapiens
  misc_feature (307)..(307): n is a, c, g, or t
cttagggcgtcttcttgactgaatctgactccattggaggctgtgaatccatggaacccagatgcacagtgcctgcgtggtcgtaccactgccccttagcactctgctcgcccgtggtgcatgagaccacgagacccccatgagcagcacgagcttgatcccacacgtgatgatgccatcatggctggtctccaagcctgcagcctcgcttgctcgtcagatccatgggtgtacatcgcaccattctcaatgggccacaaggcgccggtctgactcttccaggcttagcggagtgtcgacagatgtngtctcatcgattcctggaggctgccgcatggagtcactagggctgctctcatggttgggcctttgccgataaggacgaggctaagggtagtgccgcgaagactatacacgcataggacaaaccatggagtggacgggagcagtgggcaaagtccttactctccctaaaaggctaccccaatgcaacgttcgagacacatggggcagaccagcgtacaagacacaccagggatcctcgctgctggaggaacaggggagacatcataatgccaaccaccaaggcccttcgagtacacgctcgccactggggagtcaacgtgcctgacatggctagcggagcagctccgccgggggaaagtagcctccctgttggggcccttctaagcatggcgtcgggccacgatcacgcgcactgggagaggccatcagggcccatgttgttgccctttgggaaccttcacagggattgcgcttcgcttggggacccattctgggtgttcacccataggggtatcgacttggggccttgcgccatcacgaaggcccttccttccttagtttggcgcattcgctaacacccagtgagtgtgtgttggcgctcgtccctgggcgtgggttgagcgctagatggagcaccccttttggcgtgtgtcgtgcgttcattagggcttccctcctttcccacttagggggctttgtgtggaactcgcgttgtgggcgacgccttgcgcaccattacacaaaggcctaggccgccaaaaccgtcccaattgcgaggaccccgcgttattcagacccaatcgtcgcttggacgccccaagtgtggaagtatcgttcaagcccacaaaggagataaccttcggaacgcaaggcgatccacagtgcccattttccgtggcgcgacaggaaaggacccccccacaagagggggacccccccgcgtttaagtgccataggcccacccgggtctaacaaagtatgccttccacacgcattccatggaatataacgttcc

SEQ ID NO: 415356 - DNA, 636 bp, Homo Sapiens
  misc_feature (186)..(194): n is a, c, g, or t
gtggtttacaaagtgatcacagtagttttggcctatgagattggaaatttgatattgttcgtttgtgactgtgtaggattcacagagagtagaatcaaacacactgctgcacagtgctggctgtggagactatattttatatggtccagttgttagtgagtttaatgcagtgggatggaagtagannnnnnnnnaaggcactgtttatggacataacatattaaagtgcaatcatgtgcattttgggctagtttgcacattaaaacacgctgtgaatgttcatcataactgccaagagaaacagggagatatttggtgtttccttttttctgggctgaggctttttcccccctttccttcgtgtagaagtggctggaatagctagttctaaaatagggccttgagtgattatttcaaccaatttcttcacttcaaaaccacagtgaaaataaaaacctgggtgtcccatacactgataaatatggtcattagaaatttatcaaacaattctgctttatgtagggggaagaatctggcgtgttgcatgttatctctgatctgaatgttgcaatgctataaatttgcttctcagacttcgctttctagcaaatgatctttctcagactgtccacacct

SEQ ID NO: 415357 - DNA, 265 bp, Homo Sapiens
  misc_feature (42)..(111): n is a, c, g, or t
tgagggcagagatcctgtcttcttttttttatgagggcatannnnnnnnnnnnnnnnnnnnnnnnnnnnnnnnnnnnnnnnnnnnnnnnnnnnnnnnnnnnnnnnnnnnnncaagtatcacttaccttattacataaaaatcattttcctacattgatcttacccccacatggtaagcttccagatggcaaggaaaaggaattattttgtatttagagtgcctagcccagggattcaatttttgtaagaataaaagctaaaacat

SEQ ID NO: 415358 - DNA, 853 bp, Homo Sapiens
tcttctctcttcctccttcggctcctgttggccggtgccttcctgaacctgaagaatatctttgctctttccaactcccacattcaaaacagagtcttacaactcagccacattttctgctgagccagccagtgggaacaaacaccaagagacctggagccacagaaacactcatacatgagccaagaagaaaaaattgtgtggcagctgcccagctctgctctgcaaccatgcgcttcctgtttactgactaagacctgatgaacctgtatctactactgcccagggcacattagagtcaccacaacccctgctagatgactattttgatatggaggggaaagaattgctcccctcagcccatggggataaatttaggaccatcactggccagccttatgtccttgcctgaggagttggaactgggaaccaaaagggaaagttcacctgacttggaaacgtgcacacaagcagtctctcaacactgtgacgttatagtgaaggaagcatcaccgaagagagttgcgtttcattcggatggccctggccataataacactgtcctgaatggaacaataaatacattaagaaaataccatagctacagacaactatcaaagaaatgaagatcgactgaagtgacaagcagaggggggcgccgcgcgcaaaagaaattccccgcggaggggaggcccacgctggtaggcctacaacccatttttgggccaaggggggggcccataatgaggcgggaataataaagaggggccccgggggccgcgattaaaaccgcgggtgcgggcgaacagccggcgaagggcgacatcaggggagagaaaccctcctcgggggg

SEQ ID NO: 415359 - DNA, 355 bp, Homo Sapiens
aagacactgtcttggctcacttatacagcaagtgacaaccaatttagttcagacctttcttgcttctagacctgcaccatccactcttatccacttctcattcttcctggaagctgccacggaacatgcagacccccgtatccactttgccagtagggacacccacttttgaaaagccacggacccctggcaacgcagctgcagacataccatttaactcaccctgcctggaaaaggaaagtaaatgttttcttcccaatttttgctagggaaatccaggcacatacatgtattcagtaactcaatgatataaatttcagggcttgtgtctgtgtgttattggaaaagcatttga

SEQ ID NO: 415360 - DNA, 920 bp, Homo Sapiens
cagtgagatgcttaaatctgcagtggagggcaagagacacgaccccaggagacagcaactggtctctgaggcggtggaaccagctccctgttggagtctgaggccttggtcctactcccagtttcactcctggtttgctgaatgatctggagatctctgggccccacggctttccatctgcagagcggaaagagtggatgggaagtttctaggttccctccacttctcatcattgccggcattcgcttataacaggggtcggactcctctctgtgcacctgtcctgcgggcagacctaggaaggatgccaggaccatgcccggtagagggctcagttggagtttcagggatgagcacctgcctcgggggcctgaaggaagcccatggaaggccatggccaaagaagctcatcgccctggggccagaagaatctgcccatcagatggtcctgtggaggatccaggagctttctgactgagtatggagggaggaccagcaagaccccttcatactggctgacctggacatactggccagccgccatcaggccttctgccaagccctgccacaggtctcgcccttctatgcagtgaagtgcaacagtagcccttgggtgctgcgtgtcctggccgccctgggcaccggctttgactggtgccagccaggtggaactggagcaggtgctgggcctgcgtgtggccccctcgcgcatcgtctatgccaacccctggaaacctgcctcccacatccggtatgctgcccagcacggggtgcagtcctgacctttgacagcgaggagggagctcaccaaaggtggcccagaccacccaggcccaggacagtcagagcacctttcctctgagcacaagttcggggccaggctggaagctgttgggacctggtcacgtctgcaaaaactg

SEQ ID NO: 415361 - DNA, 749 bp, Homo Sapiens
  misc_feature (34)..(34): n is a, c, g, or t
  misc_feature (535)..(535): n is a, c, g, or t
ggccatttattaaattgccaacacctggaacccnctttctaccacatgcgttgtggtggcagacaaagaatttcacctagatttgtttaatcaaagccacactacatacagttggatatagagagatagagacaaatgtacatggacaacaaaaaaaatagtgcaaatgcagttgaggcaaaaacattaagatcccagcatgtgcatcctgtatctacaacaatgccattgaaagtatgagctgtgtcattggaagtacagcagcggaaacagccactcatgaagttcctgttgggaaaggatttgggctgctggctggctgctttacttccttgtgttcctgccattattttctagctgatttctccaccttccctaccatttctatactggaatcaatatccattcaataacattttacattgcaacccaaagccctagatgttcaaaagtgtaacaaaagagatagtagaacaagggtactgaacagagtgatcaagggaagaagcaggagagaactagaaagctgagtgtngtggatggacataaagagagtacaatatttaagaaaaagttatcaaaagtaaagattgacaagtgaaaggaaaaaaggcataggaaatgtggaaactggaaattggcctagtgaaataaacaaggagacaaaattagtcacagaataatcacattcatagatgggtaaatgcgagaaagaccagtcagtaaagacggagaccgaaagaagttcc

SEQ ID NO: 415362 - DNA, 975 bp, Homo Sapiens
cctgtgtctgcataccctgatgttcggtgcccagcttagagaaggagaaggggcttacctactgcagacacctgtccactgcgaggacccacttgtcatccctggtcaattacatgatcatgtctctggacttgccctgtgatgctggacaggagctgacagccgggatctgggagcaataccttcaggatagcacagcaaggtttagctgggcttgatctgcagtggtgcagaggctgcaaaggaggggcgattttgttatgtgagaaataagcccacctacttgtggggactcaagatgacttgtttggattctgcatatgcaaattgaagatctcctcctcttcttgagagttccaagacccacaactcacttttgcccgtgagtgtggagattgaaggggatggaaaacatgctcacctgggatgaataaagagaaagtcagtgagtaagtatttattatgaagcattagtttgtatcactcctgcacaaggtgctgagacatggccccagccagaaggaatttacagtccagtcaaaactgcctagaagtgtgacagcagctgagttggagggaggcagctgaaccaagaaaaccttatcagcactatttgaaacttttatctcatctggcttggcgcctgagttctcccattaggggtccagcttcatccttttgcatgtggatatccagttctcccagcaccattcttcaaagaaatgagtgttttccccactgaatggtcttgtacctaaagttttactcaagctcggtgaaaacgtgctctcactgatgagggcttgataacgttttgtcttgactggggacctgggaatagtgctggtaatttggagatgacctgaacctttatttgggggctaccccaagtgctctctgctggttgaggccactgcgccatccagccagttgggaggttgtactgagggacctgattgaacacagcgcacgaag

SEQ ID NO: 415363 - DNA, 160 bp, Homo Sapiens
aggctttgtacttaaagtgtaaaaagacgtgtacgtccgattcggatcggcgcgtccccgaagagggacggggacgagcgacgggtcgcgcgagtcggtaccaccgaccgtctgaacacgacagagttacacgcggctgcggagcaggcggacatggccg

SEQ ID NO: 415364 - DNA, 960 bp, Homo Sapiens
  misc_feature (424)..(424): n is a, c, g, or t
  misc_feature (611)..(631): n is a, c, g, or t
  misc_feature (802)..(802): n is a, c, g, or t
tttcataacagaaagaaaagattttaggcatctattttaccatctcagaggaagatagctgcagttgtgtaaaacagtgaaggaagactttgaaagagcagaatcgtgaggaatgatgccagtgccatttgctgaaaatgaaagcaggaacttggaccagaagttttagaatcctgaatttatcaaagaaatgtgaaggctgaggcttacagagatcgaagagtagaggatgcattgaggccacagttgaaggaaagaagcctggatttccactgaattgggctaaatttccactattcttcttcctcttccttaagattctgctcattgggttacccaccaacccaggaaacagacttatctccttatcctcaagttgctgaaggcaggaagaatgagcaaggtttgctcaaggaagagctantgtaacaaaataattgtaattagtctgatagtgcagggaaagaaactccatttcttctgaggaattcggggcattatttgcatttgaaaaagcaatctcattagagcagtatgttatattataagacattttgcagaaaaatgttcgagaagaaccatagcagtctcttgcatgtgcatgtgtgccnnnnnnnnnnnnnnnnnnnnntctgaattttccacttaaaagtacatatacttcaattcaaaaagcaatttgacacagtaatataaattgatcaggggatgttcctaaatttaaagagggaaagacttgtagaggtttaaaaataaaaggacttggggttggaggaacaggcattagggaaagctatatggncacggttaaagaactgtgggaattaatgctatttaaaaatattgcttagaaatctagctaatgggaatagtccattcattgacttagatagttataaaattattcctttttggggggaatttaatgagtggctacaacagatgcgctgagagaatccc

SEQ ID NO: 415365 - DNA, 945 bp, Homo Sapiens
  misc_feature (276)..(276): n is a, c, g, or t
ctcagcctagagcggctgctgttcagcttggcccctgaagggagaacacatctgaggatgaagaatggttgaggcatttgttcctctggttttctctctgctccagtgcagtaggttggccttgcccttcttctgaagcccccgtttccatcgggtggctggtttcatgcagctgtggctcctcacagattccctctctcagttgccataactgctaccctccttgctcctacaggcactggggcagaagtggttcctccattattagcagcccanggttctttcaacctgcctacatctggaaaatacctccttatcaaactcttcatcaccagtgtcagttcatggtcagtttctttcctgagccctgacccacacccaggaaaggccaaccttccgtggccaagatgaagcctcttccactgtcagctgggcacttctaggggctgtgagcgctgaagaatggagagattcaggccatgtgtgtggctctacctcctgagaaacaggcgttatcaggcctgggctttgctcacagcacctgccggctcctgggaagaagccacatctgcctcgaactgccctgactgccttgttacgatacctacccgtggcttgcttgtgccaactctgaaaacacagggctgcctgagggagctctcgtgttagcaagcagcagctcgtgggtaaggaaagccccttcatttattaacattacagtgattggcaaactcgtaggtgagatacttatgccattgggctctgtctggataatccacctgtattaactccagcgatcctcttactccataaaggaaggactccttatgtccccatcttaaaagctccgaagagaacggagatactgatgattggctgggattgatccgaacattgggcaaaggcacgtgcaaccagtgggtggccggaaacagatgtaatcgt

SEQ ID NO: 415366 - DNA, 740 bp, Homo Sapiens
cccgatcacggcgagggcggagctccccaccagtgccatgccgtccgccagcactcctcagcccttgggcggtcgatgggaccgggcaccgcgaagcagggtgcgacgtctgtcgcggaggctccggccgcgtggaagcccacctggggcgtggggggcggcttgggcatggcgggctgcaggtcccaagctctgccccgcggggaggcggttgaggcccagtgagaattcaagcacgacgtgggcgggtgggccagcagtgcaaggggacccagcacaccctccgaagctgctggcctgggtgctaagcccctcactgcctggggctggcggcgccagccggcggctcccagtgcggggtccgccaagcccgcgagcgccgcgcggagccatggttcccgcccgcgccactcgtcccacacctccccgcaagcagagggagccggctcctgcttctgccggcccagagaggggttcccactgtgcagcggcaggctgaagggttcttcaagagtggccacagcggatgccgaggccgaggacggtgctgagagcgagcgaggggctgctagcacgttgtcacctctcactatgagcaagccctctgaactatcggataaccgtctagggttgaaggggcattcagaaacgttggaggaggacctgctcttgagctggggtactttggggaagctcttttcaacaccagatctttcaaaacttacctgtcccctgttcca

SEQ ID NO: 415367 - DNA, 879 bp, Homo Sapiens
  misc_feature (270)..(432): n is a, c, g, or t
tagtttctctgtcattatgaaacctaaaagcattgaattagcccacagagtcttattcaggcatagacttgcgctaaagcccatattgattaacagtctacagttacagtgtaaacagtttagccctgtggatagtgagttactctaaggaggactgtgatatttgtatcgaaaagttaagagacatacaaaagactattgtgcaatatatgcccagatggttctcaacgtgactacaatctttagcacctccagtgctctcactgcatnnnnnnnnnnnnnnnnnnnnnnnnnnnnnnnnnnnnnnnnnnnnnnnnnnnnnnnnnnnnnnnnnnnnnnnnnnnnnnnnnnnnnnnnnnnnnnnnnnnnnnnnnnnnnnnnnnnnnnnnnnnnnnnnnnnnnnnnnnnnnnnnnnnnnnnnnnnnnnnnnnngaccctgttatatacctctgtgttgaacgatgttgtgatttggattactaaacagtacaagtaagtaatttcatatatttgctcctatgctgttcaactttgttaggtgacagtatttgattgtaagcgaaatgcagaatatgttaatgagcgttgaataagattgtttcttaaaatggagaatatttattaaaccacttaagttcagaaaggcaattaaaaaacacaaggtttaggcgaaatagaaatgagtgatatttatatctgaagctttctgtggcaaagcgaccaggcattaagctaaactggaaggatattgagaagattaatttgatatgcttgtgaaatagtttcttaactcctcttggaacagctggccccatgtaggggatatacaggtgatgatctcaggactattcctaaaagcagagagtgtacttaggtgaa

SEQ ID NO: 415368 - DNA, 636 bp, Homo Sapiens
  misc_feature (516)..(516): n is a, c, g, or t
atttttttaagaaacaaaacattaaaaagttttaaactctatagaagtattatgccatagggctttataaagattaagtgaggtaatatataacaagtgcttaaaacatacacagtattacagtagagttagctttattattaatagtaactcaagcctatgatgaccaaaactgagtttttgattcctgcaagttcaacatctgctcctccccttgtctttccgtttaataagttgttacaccatctaccctaattcctgaattccaaaaccttggagtcttctttgatttctttctcatgttctccacgttagtaggccctgctgctttccctcctcagtgtatgctaaactcatttaactttctccatttttactgacaatgcacaccatcatactctgtcatctatgccactgtaacacattcttaaatggtccctctgttcaactgttgcccctgcaattcattctatatgtagtggtgaaagtgaatacatataaacacaaatcaagttntgttacttgatggaaaccctccaataatcattcactatgaataaaatccagaccttttgctatgaccctcaagaccccatgtgacctggtccttgcctacctctctggccttggctctca

SEQ ID NO: 415369 - DNA, 957 bp, Homo Sapiens
  misc_feature (165)..(245): n is a, c, g, or t
ctttggagtctagctaacacagcatcttggatgcactcctaagagaagactacctgaaaggagtgtacactggtctagcagttgagatcagctagtgttccatctatcttctgtcatgtggaggagttcttgctctgtcacctagtctggaatgcaagggcacannnnnnnnnnnnnnnnnnnnnnnnnnnnnnnnnnnnnnnnnnnnnnnnnnnnnnnnnnnnnnnnnnnnnnnnnnnnnnnnntatactggttattgtggatccaaaaatcctaggacacagactttgccctcaaattatttactgcatagtgggtggcctgaaaagcaaacataagcactaaatatggaaaaatgcaaaaggcaatgggaccataaaaggaacagatctcttctaagatgtcttgatcgactgaccccaaagccagagggtaccaggtcaaaaagcaagaaaacaaacaatactgacattagagagaagcaaagtttctatagaaaacctattacactgtggtataaatcaagatgaacctgcagacatctattttagtttggaagtctggaaaagttcaagattggccatctgcagctggtgagagcctcaggctgcttcccctcatggtggaaggtgaaggggagctggtgtgtgcagagattacatgcttttctaggtcatcattctaggcttgttgaagcatgcattttggcatgagggtggcagcctttgcactatgtgcatggctgaggagttaggatctggagggtgatgaaagcaaagggtgcttgcctggttactcttgggttcatctagcaataagatgatctgaatgttagaagttcgccaaatatggttcctggggcagtctttgctctaccaatccaactttgctccatggggggagctagaagtcaccccaacattttccgcatggcccagtctaaattctaagagaacc

SEQ ID NO: 415370 - DNA, 431 bp, Homo Sapiens
gcgtcggtctgaggaggggccgcttcgccatgtcgccccgcacctgctgagcccggagcgtccgaggatgtccgcgctgaggaaggctttctcgccatccgaggcttggccctagccctgcgcggcttccctcgcggctgcgaaccctctgcctgcgcccagcccagccacaatggggactgctcaggttttgcctggcattctgcagaagcattgctgtatcttaccagacaggaatacaggcaatgctgtgaagcgtcagagggaattccgttggttactttcccatacggtcttgttcagctgcttgttctcagaaaagtgtgtttgttggtggaggagaatgcgaccaaggagaccatccttttcatgaaggcacaaacgtgaatacatatgtgacttttaagcctttaaataaaaacccaaagcac

SEQ ID NO: 415371 - DNA, 737 bp, Homo Sapiens
gtttccaggtcacctgaccggtctcctttgctgtcggcgccaagtcctgcaagtttgcttgagcagacgagaaagcagcaagagttgggcaaactttccaaaccaggcttttgccttcagtgtggaatctaggcggcgcacacgtcatggtgccagcgtgggtcacaaacagctccgtgacctagtttgtaaacgcgatgctcgttagtaccagactaaccgctcacaagggtgaagcacttaattaattcatctcttaatcttgttaggggccaacggctcctattagtgtttgagcgtgacggcgacggtgctgtttatgaagccctagcctatttggaggtgaggaagaggagtctgtgggtaacctggaggtcgacagaccgggaggaacgctcgagggagcaccaggcctaggtacaacagagcgcgcgccgacagcacgtcatccgacccacgccggcgcaaccgacagagcgcgctcgccgagcaaccgacggatctcgctgcgatacgaagccagcatacgtcacggccatcttctgcttctccattggggagagcacgaccggggatatacgcccagaaaagattcccaaggtgggcactttggcaaaaatgtagtaaacccgaaaggcaattaaaattgtgcgtgagcacagggcaattaaggtttaaagaagaggatataaaaagtacagttggggacaggaaaaaagtgggagaaaagggaaacc

SEQ ID NO: 415372 - DNA, 760 bp, Homo Sapiens
ctggggctcagcggtgcgcgtcctgataaggagactgcgccttccaggctctgggaagagggccggggcaccgggcagacagatgcgcgcacacacatagcgcaggcacaccgctagcgagcaaagtacactggaacaccggcactgagggactcccacctggcagcagtcacctccgcacctttaccgaccactgcagggagccccggtgacagaagaccccttcctgggcagtgtggacccctgctattcagagcccactctccatcaacttgagttgtggccttggggctagtatcctcttagggcttcttttcctatatctaaagtaaagggttggagggaatctgcacaatctcagggctgatgtgcagattccaggccacacaggcctccgtacccatccccacaatctgccccaggcattgtctcggaaactggggtcctcaggaggggacccaactcttctgggcatgggctaggggcctcctggcctcccagcccagtgggagtcaggcccaaagtctgccatcacacaaacaacattagaggggggaagcatttgggttccaataaaaaaaccaatgtgggattaacccaccacaaaaataggaagcgcaaaacgacacccaccgaacccaggcacgaccccaaaagcggaccgtatgtgacacccgagggccaccctttgcgcggaaccgacgacacgcgaatatccccgagaggggacatttgggaaagtagtgggcgatttgtggag

SEQ ID NO: 415373 - DNA, 443 bp, Homo Sapiens
  misc_feature (210)..(287): n is a, c, g, or t
tgaggtttcgaggtttcaccatgttgcccaggctggttttgaactcctgggctcaagcgatctgccctcctcagcctcccaaaacggtcggattataggcgtgaaccaccgcacccagccgcctggaatttttaagcctcaagtttgttccactttgaatgcaagaagccacctcatagatggagtctcgctctgtcacccagatgggannnnnnnnnnnnnnnnnnnnnnnnnnnnnnnnnnnnnnnnnnnnnnnnnnnnnnnnnnnnnnnnnnnnnnnnnnnnnnttaagggcccttgggcgggcgacattgtatacccttggggtaatagattgggccaaacctttggcccccaaagttggccaccccaaagggccgttaacaaatttttattatataggttaaattttaatattttaaaaggggtttaacggaaaggaa

SEQ ID NO: 415374 - DNA, 453 bp, Homo Sapiens
  misc_feature (257)..(257): n is a, c, g, or t
  misc_feature (268)..(268): n is a, c, g, or t
  misc_feature (275)..(275): n is a, c, g, or t
  misc_feature (350)..(350): n is a, c, g, or t
aagtgattcttttgccacagcctccccagtagctgggattactggcactcaccaccacgcccggctacatttgtattttcagtagagatgggttttcaacctgcgggccaggctgctctcgaattcctgacctcgtgtgatccgcccgcctcagcctcccaaagtgttggaatcacaggcatgagccaccgcgcccggccaggaattaaccttcaccaggatagtttgtggaattttatcaagaggcttcgctcccnagtctcctggnctttctntacacagagtttggaagcagcggaccggataggaaaactgcttagggttccaccctcatgccaagtggcagaagngcccccccagagtggggcaaagggcccgttcccgttgcctgcgaaaaccggttgggggaaaaccaaaaaaacgcgggaactggccgggtggggccccattaag

SEQ ID NO: 415375 - DNA, 225 bp, Homo Sapiens
tgcagctgccacaacagtactcatgatgtcaatgtcactgactgctttgccagcacagggacccgacctcttcactgccactaccaaaaataagaaggagtccaccaggcccatgcgagtgggctgcaagaagggggcatctgttcacctggatggctaggttcctcctgacaacggcacctgaatgacttgcaccctacgccttcaaatctgtgcagcactgtc

SEQ ID NO: 415376 - DNA, 776 bp, Homo Sapiens
acagccttgagtttccctagtcttgactggggaatggtcttcgcctctctggaaaaggccacctccccgattgaatattccaccatgggaagtggtgaaatggcgccctgagaccccgggggagcatccttccccatcccggcccgtggaaccagcaggtggcagatgtggcagcagagcctcctcaccttgtactcaaggccctcttacttgtgtagagctcagcttcctggtctatggacttactttgccttttctgtatgaaggccatcctcgatgaactgtaaagccaatcagtgttgaatgagtgaggaaaaagcggaatgaaaacagtaaataaggagttgccttctctgtattaatattagaatctctgcctcaggccgtagagaaaatcattgacgtgcttgctagaagcagctctgaaagacgtttttgtaaaacgctttttatcccgtcaaaggctcagctcatttggggctaaggcttcctgcatccaccatgggcttgaacgtgaggcttggaaaaagcggagacaacgttggaaagaatgaggcctgagaacgagtcagtgccgcctcatccgcgtcaccacatccctgtaggatgcagtgtcttcattcgtaaaacaagggtgttggactactgtatcttgagggtccccttggcgctgaatttccatctttgagagacaatggcactcttacctttgagctttcgggagaaatccctgtgaatgtgccctggggtcttgcatgcctctcagcattctcctg

SEQ ID NO: 415377 - DNA, 731 bp, Homo Sapiens
tttcctccacaggggtctcagtctgggctctaaagagctcctccaccaagtttctaaattttaataatttcagcctattgttcccccagagtagtaactgctttctggaactgaactctgtgataatgtagtatttactttttgccttttcaataacctagttaacaattttatacctactgagttctatttaaataatggtattttctatctcctgactggacagatacccaggagtagggtttgaacttcctactttctggtttgcatatatcttattaagataactaaagtacttgctacttgccagtcttcagacccggtcagtgtaatgtcatcagtgcagcagatcagtgtgatgtgtgatttctcaatgtgatcaaaatctctggactatattagagagcaagagtgttaacatagacctgaagcaagactgtaatggttgacacaaagcacaaagtgcttctgagatttcatgcaaacttaataggaagaaacaaagcatttgcttccaaagttatacagaatcgtgtcgattctgaccccgtaaaaaatactacatcttgaatactagctgacaattacagtacacgaacctttctgtggtatataattcactaagctatactacaagaatcatctgaactaatataaggatcaaacaggagcagcatgcatggcattggaaagaatcctataaacacgacaggtatatgctatgacatcca

SEQ ID NO: 415378 - DNA, 444 bp, Homo Sapiens
cacccagtggaggttggatccagaaggacatggggatcagtgtgggctgtgctgggccaaggagggctcccagggcagaggcaactgaggattccactgcaattgtcccttgagaagatgaggatcaggtcgggaaatggaaacatctgagggctcaattcaaccctggcttctaaaacgaacatggtgaaccatagattcaactactgaacttcttttaaccctcgtggcatcctatctgtgaattgtggggaggaaacagggttccacccgctgctgcacaagaggggttgtgtgcagaccgtcacctggttgtctgctgatagcaggagacccctgtgccactgcgggactgaaccccatgaattggcagcatgatcataactcgggtctctatctcgggtgtgagtaaaggtgtggtcccatctaaaaacaaacacaaag

SEQ ID NO: 415379 - DNA, 281 bp, Homo Sapiens
  misc_feature (218)..(218): n is a, c, g, or t
  misc_feature (228)..(228): n is a, c, g, or t
  misc_feature (242)..(243): n is a, c, g, or t
cgaacttgggacccgctggcctcgctcggtgcgcgcctccctccccgcatgcagcccgccgagcgctcgcgggtccccaggatcgacccgtacggattcgagcggcctgaggacttcgacgacgccgcctacgagaagtttttctccagctacctggtcacgctcacccgcagggcgatcaaatggtcccggctgctgcagggcgggggcgtccccangtgagccggnatcagtgaagcgcnntatgtccggaacacggggttcccgctgtgagcacctgt

SEQ ID NO: 415380 - DNA, 567 bp, Homo Sapiens
  misc_feature (530)..(530): n is a, c, g, or t
atttaaactgacttagcagataatacagtgctagcttgcccacgttagtttgccaactgtcagtgtaagaaagccgagatcagcaaacttttctgtagagccagattctaaataatttaggcttgccgccacatggtctctgtcacaactactcaactctatcattgtagccacaaaagcatccacagacaatacgcaaatgaatgaatgtggctatattccagtaaaactgtatttatggacactgaaatatgaattttacataaccacgtgtctcaagattttaaagtttttttcaaccatttaaaaatgtacaaacctaatcttagtttgtgggctacacaaaatcatacagtagacaatacatatcatacatatccaggcaagaggataaatctgccggtgaagacattaggcccaagtgactagaacatgagccgcaaattgaaataattctaatcacagcaaatttcactgatttctttctaggatgattccggatagcatcttctccaacaggcttcaatttngatacttgaatcttttaattgccctgagttagttcgg

SEQ ID NO: 415381 - DNA, 727 bp, Homo Sapiens
  misc_feature (183)..(238): n is a, c, g, or t
  misc_feature (527)..(540): n is a, c, g, or t
gaagaccaatgtcagtgtctggattctagaagaccattacagtttgactccgggaagcttacccacttctgattctagaaggggctgccagtcatcgtgcctgcccctggctatagtgatggttgcgggaaaagtacctggcccggcccatttaattttgtcattaaactaatggaagcaacnnnnnnnnnnnnnnnnnnnnnnnnnnnnnnnnnnnnnnnnnnnnnnnnnnnnnnnngaaggaggggggcgccgggcggtaagataaaagagtatctctctccgagagggggggccacaactagtttgcgggatacacacatgcttgttgttagtaaaacagggggtcgcccccatatatatggaggctgctttatataataatagaagcagtaggcgacggtggcgcgggtgtttttacaacaacagtcgtctactaggcagctagggaagaaacaatgcgtggtatcacgaagtgaggagatatcttgtggggggagagaagagcgacccactctactcctgtnnnnnnnnnnnnnnagcacaattatgtgggggaacaacaactccctctcattgacgagaaatatttagaagccaccctacgagggggaataatatttaacaattttttagaggggtgtactacgggggggtctactaaccatgaggtgataatttattgtgtgggggtgtaaaaaagttttcgctacaagggaatatttta

SEQ ID NO: 415382 - DNA, 581 bp, Homo Sapiens
ggcagctggctccaacatcccagagaattgtgtcactcccattgagcaggtgtgggggcctctcccacatggcccaggtccaccactctgtcaaaggtcgcacagcccagacaaaaacaggacacagcagtgtgtgaatgagccgggctttctccttccctccacgtaatagaaggtgcctgaggttgttgaaacacagtccatttctcctgggaatgacaagaatttgagggatgctgactttcaaggaatactgcatgacaggcatcaagataaacctgatgaagaaaacataggccagaatctgggaatcgggagcaaagtaatacagcttcggggacaggcacgtaatgaggtcatgatgtaggagactccctgcaggactggcggcccctgttccctgggttgttctggctctttcagaacctgaccctggaacaggactgagcaggtgcctgtgtgcacagaagaccttgtgtgagtcctttggtaccacgtttgctgcacgaatgtctgagacacctcacagtcgcttggttcagcctctccctcctctctccgctggggaacatcatccctca

SEQ ID NO: 415383 - DNA, 278 bp, Homo Sapiens
cagccagtgccctacactatacaagatgccactgtagggacagggatgacctctagcgaggtgaccctcagtgggccagagggggcttctgaagagaatttctctagcttcttggtgtttcctgcctgctactttcaaacaagggtcccatttttaatgttttcccagtaataccttatgaatgttattgcaaagcagcgggctaaatcaacaccacaggccccgtgatcaatatatgtgatgaggacattacatcctggtgttgttgccccaagtct

SEQ ID NO: 415384 - DNA, 859 bp, Homo Sapiens
ggtgagagcaggcggtgaagagtagacacgactgatgacttcagggatgctacacctttctctcctgcctgggcaagcctcggtgtccgccccagtcctacacccacttcatgccttctgtgagaagctgcctccacacctcagcccagactgagccaatcaggacattccattcccctggccacagtgatgggctcaggaatcggcctgtgccccaaggcagggcagtcagacacggcgaggcttagttcggagactttggcttgacctgtttgggaatttgctagacttgaatgtgagttgggagtccagaagagagcttacctgaggatggagccaaacagaacaagaaaaacccaggagggaccctgcccttgaagaccatagtctagtggaggagacaccttttgataggggtaagggtgacaatgagtgtgatagctcagagcatggggcagcataatcaggatgcccctgggggcacttgcagctggctgggctattcatctggtcatttctatttttgcctcttggaattgaattctgctgggaggcagccagtgaggtccaaagtcctctcctcaaggttgttggatcgtttgatgattgactccccaaccgttcccagcagctgcagcttcccaggcccttgcattgccagagctccctggctcttctctctaatcaggctcccaggctcactgggggctgattaagacatttcctgtccttccccaatcttgggagtcttgctaagatcctccctgacaagcttctcctggcctccagcctgcctttccacaagcttctcccatcttgttgccagagaagctaagacacaagtctgatccatgccacc

SEQ ID NO: 415385 - DNA, 753 bp, Homo Sapiens
actagggaaagccggaaatgggattgcaaagggtgggtggatggaccctgatctgcgaggtcctcgccactaaacgcgggcttcactgtttgtcttcccccgtgtcatgtattgccttctctgtggttcctgtcctgtggaaacgtgtctgtcacttctctgtggcactgcagcaatgaagtgggcactatggaggttgtctccctgagccatggatgcctgctccgagggcccgttgtcaccctcaaagctctcccactgcagtggcacaggcgccacgtgcgggtgacagctgcccctcatgggcacttagcgcacactaggtatgcctcaggggcttctgtgtctccacgtggtgaaggcttccgggcagctctttataggatgcctgactgtgtccccactgtgcagatgagactgaggcccagaatcagtgttcatggcagggccagacggcctcgggtgtgtccttggcaccgctggcattgagtggggattagcactccggcagtctgacccccaagcccgtgctcgccctgttcggcctcctccttatgggttctagctttgggggtgggactgcctctcggggggcagggcagagtgcgacatggaatgaagtgatcaacccaaagtatgcgagtcatctcacatgaggaaacagacaaggtggactggaggaaccgtgttcctctctggcgagtgggtgttctggcaatttgtgcctaggtcgcagggccgcccttcgagatg

SEQ ID NO: 415386 - DNA, 116 bp, Homo Sapiens
ctggtaacacgacctccccgccaggtcctgtgtgttgctagctggagaagggtagttgaggactcagaccaagcacagtgtttatatcggtcaaaactggaaaactatgtccgggc

SEQ ID NO: 415387 - DNA, 988 bp, Homo Sapiens
atgtaagggaggctctctttgctagcatgagtctggtgctcactcctcagccaatgaaatctcaccaaatttgtggagtttgggaagagtttgacagctactatggcagtcatgtggacatccttgagcagctgaagagatgccctgcccggagaggaggaatctagagaggcaatctggctacagtggctttgccgagctacagtgggctctacccagtttgaacctcctggcagctttgtttacactgtgaggggaaaaccatctacttaagcctcagtaatggcagacgctcctctctctaaggtcaagtgtaactgtttacttcagactgttgtgctggctgtgagaatttcaagcccgtggatctcagcttgctgggctccatgggggtgggatccactgagataaaccacttggctccctggcttaagccttcttttcagacacagaagaaagatgatgatcagaagccatacattgtaagacatttaggctcactcaggtcattcacagttctgtttttcctttgactggactaagctccagctttgaatccaagtggtgcagttaacaaggaggagcaagaaagcaggacaaaataaagcagagagctagtcaccagaggggatgtgtttgatccagcacagcccttctcttcatagcagagaatcgacacccaattcaatcacagcaaagtacattttacaaatttggaggtaaactttttatggtgtactcagcggagatgttcaagacagagggtaacttccgaaagaagacgcctccagacagggacaggagaattggggggaccctttgtccactttacttgacagaacgaagggcaggaaggctctccaacccatggttgggagcctccaatattgaaatttccaagggtcccgaacctgtgacctagtaagtctcttcattgtggtcaacgcgacaacagacaaaaaacaggggacccgtctaaattccccgg

SEQ ID NO: 415388 - DNA, 787 bp, Homo Sapiens
tttttttgagacaggtctttctatcatccagactggagtgcagtgcagtggcccatcgtggctctctgcagcctcaacctccgagctcaagcgatcctcccacctcagcctgccgaggagctgggaccacaggcatgtgccatcatgcccagctaattttatgtttgtttgtagaggtggggtctccctatgttacccaggctgatctcgcactcctgagctcaagagatccttctgcctcaggctcccaaactgttgggattacaggccttcattgcttcaatatctcttataaggaaagactgaaaacagcacaagtacagagaaccaagcatgtggttgattctacatccacccagtgtgacaccatgcagctgtcaaacatgaaggaggacagtatctaggtactaatgtggaatgatattgtcaaatgaaaaagctaaggtgcagagtggtgtaatatgaacagagaagcaacataaaattacatgttcctacactagtctttgcataaagaaaccttggagggaccaaggagcaactgatcacagatgatttcttgcaggggtagatgacagcacacggtgaagaaggccagggggtgtctcgtattctatgcattggttacatgtgtacataattgggaacattttacatatatgctaaaaaacaacaagttctgcacaataagacgagaagataaacaaacgtattttgtctacctattgattatgggaaaattaacgaaagagatgggtaagagttgtgaaacccatgggcgcactat

SEQ ID NO: 415389 - DNA, 912 bp, Homo Sapiens
  misc_feature (205)..(277): n is a, c, g, or t
  misc_feature (451)..(565): n is a, c, g, or t
ccgcgactccccgcagttcctgtgtgttgctggctggaaaggggtagttgacaaactcccaggccagcacagtatttatgtcggtcaaaaatggaaaactatgtgtccgggcgtggccaggaaggaggatcccttcaggccaagagcagcctagcaatatggcgcaaccccacctctgtagtccaagcctcagcctcccagctannnnnnnnnnnnnnnnnnnnnnnnnnnnnnnnnnnnnnnnnnnnnnnnnnnnnnnnnnnnnnnnnnnnnnnnnccaaagaccaacgaactaccacagccaccagttccagaacctgccaatgatgggcaatggaaagtgagggagttcaactctgttttcagagaaatggaataatcatatcgctgatctatgtaaacaagttgaagaattgtctgacagaaaatacgtttcgctttagtagttctnnnnnnnnnnnnnnnnnnnnnnnnnnnnnnnnnnnnnnnnnnnnnnnnnnnnnnnnnnnnnnnnnnnnnnnnnnnnnnnnnnnnnnnnnnnnnnnnnnnnnnnnnnnnnnnnnnngcagacatgaacttgtgaattcaacaagtgaagatttacaacttgataaaccagctgcaggagtaaaggacgaatggtatgccagaatcactaaatgacgaaagcatggcggatcagctagtctgccaaagcaatgtgccgaggcctggggagcgctgaggcctggggagcactgaagccaaggcgctacgggtaccaagacttcgaaagggccatggcgaatgaatcggcatgctcggaaagggcatgacacagaaacacatacgctcaggacagtcccacggggacagcgcaccgccaggctgggaaactcatagcaagtgggcacatcgaaccacagtctgcac

SEQ ID NO: 415390 - DNA, 773 bp, Homo Sapiens
ctcagctcacctgctttgtcctagagccagcagagtccaggctgctgttaacaacttcatgtgcccgtgggtagcaggcaggtgcttctgtctgatctggctctccttgaccactgtactcatcaaatagaccaagatccccagagtccaagatccttacaagggggccagaaagggatgagctttctgaagaagcactgatgtaaaataccaggaatttgacatcgaagaagattgtgtgatggcagctgggattggccataatctagaagacacatggtgaatacagttgcaagtcatttagtcatatttcttgctaaattgctgtgtcttcaatggtgagtctgttcaactttacttttgtgatgcttccctcaagtcacgaaaaggacaaagcttctcaagcagactggtcctgagtaaaagtgacctgaattctctgataaagaagagggaaagattcggctgggtaatgccaggtttgtctcacttgacagtacaagtgtaactagttttgccataatgtagtgagaggagatatgtgtgggcccaagaccagaatggtggaactatgcaatcaatcgtagatttatagcatagcatgcaacaaaatgcccagggtatggtgtcaggaagcccaggttcaggcttgcaaatcctacgattgggaatcaggttccttaacctcttctgacttaaggctaacttgattataatgaccacgtaaagaaaggcttgtcataatggttgtactagggaaaaaaattgaatca

SEQ ID NO: 415391 - DNA, 748 bp, Homo Sapiens
  misc_feature (225)..(288): n is a, c, g, or t
gcgggcgctggctacccggccggcgctctgtcctcggatgcctctgggccttccggaggccggggcggaacgggggaccctctctgaagcggctctccgtggagttggatgttgcccttcgcgggagggagtggcggtcaagacccctttatcctcggcccagaggggcaggtggcctcgggtcgccctccgccaactccgaggtggcttcggccggggctggannnnnnnnnnnnnnnnnnnnnnnnnnnnnnnnnnnnnnnnnnnnnnnnnnnnnnnnnnnnnnnnagcgtgggtttccgaggtcccgcggttccaggtcgagggaaggtgtaggggccctgaagcgggctggtccccgaatgttgcgttttctgtgccgcttttgggcaacacgcagtggcgctcgcggcagccacggctccttgaccgttcatctccttcacccgggtcccgtggaactttcagaggcactgttcttggtggctcttgcgggtcagcacgagccgtgctgcacgagcgtgacctagtgaaggccttgggcgagttggcgttaacaatttataggcgtccgcagcgctcgctttccgcacgtggcctctgcggagggtcaagccatcttattaaatagtggattctattagaccctgatacccgaggctaataaggaagctttaatcatccagatgtgtaatcgtgcagttcctttcctcaccggtcattgcccccaactctggagcttgaatgg

SEQ ID NO: 415392 - DNA, 524 bp, Homo Sapiens
acaactaataaaataattttacaatgtttcaacaagagcagactcaagcatttgctagagattccaaataaacagaaagcctgcaaagaaatgctgatacgtggtataagaattcaaaattacattgtaacaagaatattaacatcggaaaaagtttaaaatgaatatgtgaacatttgttaagtataaattataacattttgttaagcataaacctaatacacataatctttcttgtatatagatatatcaatatctaaattgtaaaagggctggaagtatatactaacatgcccaggatgatctgagcggtgtttgtaacgtagatatattggcttttcatccctttatgcttttacagggtgtgtataagtgcgtattgctgaggaccagagaaagggaggggttagcaacgaaaatgttgggggaaagatcaagcgccttgatgggctgaattattatatgaatagggaaaccttatctagtggtcacttcttcaatctccacagccacaattcgaaatg

SEQ ID NO: 415393 - DNA, 472 bp, Homo Sapiens
cgtcaccccatcgagaagcgcggctggcctggcctgggtggctgggcgtctgcaccccgagagagctcccccgcgcgcgggcgcctggcccgggcaggtgggtgcggagcggctctgggggccccagtccccggcagctcttgtcccgcgcgtggtttttgtgaagacactgtgggcgggatgggcgcagggtttcggtagccttggaactctcgccaaagaaaatcgcgggcgccggtgcctcagccgtcctgcctgagagactcgcctccgagaggaggaagggacagaccaaagcagtaaatcggccatcctgcagaggagccgccttctgctgtctgtgggtacagccagaactcccatacgcgggcgctgaagtgccaaaccttcgtgcgtgttctctagtaattaggtgcattgttttcgaaaggcacataacaggaaagtgggctaactcccaaataagggccag

SEQ ID NO: 415394 - DNA, 998 bp, Homo Sapiens
ggctgaacacggtgcgcttcacctcggagttcccactccactccaaggatccaacagcgcacaagctgctcttcacgggcaactacctctgcaagcttcacccccggccccgccacgccccgcagggttccctgtctggtctggatcacctcgctctccctgcgcctctctccttggcctagctagacaagtgcttctcacgatccagcgcgtttaccgctcggtttcgtcgccgctaaggggtggtggtgtctgatccgtcaggctctgcgcttctctctcggatccatcctcaatgtccaggcaggactctcacatgaagccggtgctgtctgctgttcactctaagatgtccagccactcaggacagttacgatctgtcatccaggcccaaaccgactctcctctattgctatctgaggtaggcagtctcctctgtgaggtcggtcccatccatactgcctagatccctgcgcaggaagactgagatgaggaccctaggagacagcagccaggggatagcgaaggtggagggatgagtataaatagcgaccccagcgcgatcagagaagctcccttacccccaccatcgcagtgggagtgagtcttcagatctacccccaagaaaacgaaaatcctacccggggccttgaagggaaacctccactccaaccccagaagaacgccttagatgagcacagtgcacgacatattggattaggctcattcatcaaaggccatgccctcaacaggtcaggcagtgctggtagggggatcctgcctctctggagggtccaggaggcgtctctgaagaccgaacaaagattgcagggacgcacaacgggtttccacacacggaagttctcaaaacccacgatcttgccagttgttagaactctggtaacacacaagtttcccactccgcccccgtatgttgcccactgccggcagctatattatgcagggccacagaaatccttcacaccttttattgtccc

SEQ ID NO: 415395 - DNA, 862 bp, Homo Sapiens
caaggacagcagtaggagctgaatgcagtgactgtatcataactgctggttatgaggattggatttctttttgcagatgtcacgtgccggggtgaactgttattaactaaaaggagtcagggcttagctgcaagaaaggaggaatgctcttaaagtgcttggaagtcaccgatctaaccaacggacaaaaaatttcctgaggacagaccctcccctctggaggcctccttctatcattggctcctgactccccgaagcaaggtcaagtgggagtttaatagctgttcctgggactgtgcagagggcagccctttgaactcagtgtctcaatcccacaggtgggaggttcccaccactgcgtaatttcgagagggagggccgagactgcctggggggaagtcccatggctacctggttcgaggcagctctttgatatctcctggagcactcctggtcctagaaccagacagctctcaactgaactgacacaagtaacaaactcagcatcccctctcctgggcattcctacaagccatgcgagccccgtgttggtggagacactgccttctccaccgcagacaccaacaagttagaatggagaaactgtctatggccctaccactctgaacacgccggatgtcatctcatctcggaagctaagcagggtcgggcctgcttaggacttgggtgggagaatggagaaattgatggacttttgacgatgcaggttttaacatcagatctgagccctaatagctgtgtgtctcagctgtctgggccaccaccattaacagggaacagtttcctccatttaagaacgaaaaagacaaagaggagaacgaggcatacggaagctctccgg

SEQ ID NO: 415396 - DNA, 597 bp, Homo Sapiens
  misc_feature (292)..(339): n is a, c, g, or t
cacctggagagtcggggcggcacgttgagaccccaggcgtgaagggcgggggatcccaatcccagccctgttttcccctggcctttcacggtgaacactcatgatacatgtgttccaccattggttggaaaaggtgactaggaagttgtccttaggcattataattataagacgtcatttagtagaatagcaagatgagttgacaaggaggatgagttgcgctaggacgtgctaagcgttgttgtagctacgaaagggggaatactactgtagagagtggtcgactcgacannnnnnnnnnnnnnnnnnnnnnnnnnnnnnnnnnnnnnnnnnnnnnnngaacacacggccacagtgatagccaaataccaaaaatgaacagatacagcactatacgcaaccaaaccaacaccatggactactaagacaacaaaacaaaaaatacgacgaaaggaagaaactgaagctacaagagaaataacatccaaacgaacgacaacactgaacacacagaaaacccacaggcgaacacagagacgcgacaaacggacacaacaaagacagaacggccaactggcaaggcgacaaacgagacac

SEQ ID NO: 415397 - DNA, 701 bp, Homo Sapiens
gaaagttcaaggaactgaagacccggcagacacatgtcacttcccctcagaattgctgcccggctgagctcccggaaccctggacctgtcctctcttcctcttcactcaggcccagccttgaggacgagcttcttctcttttggttattcccagagcacgcttgttatcacacaaacaccattttcagttgctccatctcttcaaaaataagactctcctgacaacacagtacactgaacaaccctgaatgtcctgtgcggccacggccactcagccctacctggggaggcagggccctgccagggggtgacccagagtttcctgctcttgggtcgtccaggaggcgtctgaagaatgttcttaggctgctagttacacatcagtccaaagcctcagggatgatgaggattttgaagctattcaggcacctgaggctgggctaagactcccactgtcacctgtacctacttccctgtcaccaggagggcctggctctgtcccacgcacacctggtctgcacactcacctgcaggcaggcctgagctccacccggggctgctccactccagcccgaaagcctccctaatgagggaggttgttcagtctcaccgggggcttgggggtgaccaggtggaaggtttttggggcatctgcgcacctggtgagatgggcacgtgttctccctgagagcacagtcatg

SEQ ID NO: 415398 - DNA, 284 bp, Homo Sapiens
  misc_feature (101)..(117): n is a, c, g, or t
aggaattacacgtaaacaatggctgtaaatcaccattgcatgcatggctgcgagttgtaatgtgcagatttcgcttataagaacacttctagtatgaatgnnnnnnnnnnnnnnnnncaaacaggttgaaaaacgagtgcagtccactgccagacgcataaagtaagtaccgacagaacggaggagggagagcacattaagcacgaaagaaaagctcacgtacgcagaaaagacaagaggacgagcaaagacacaagacgcgaaaaagcagagacagagaagag

SEQ ID NO: 415399 - DNA, 697 bp, Homo Sapiens
ttgaaacccacagaaagaattcccccgctcgacgacggcgagggtgtgggagctactggcgaggcacattggtgggagccgcccggcccagcctgccttgccgagtcagcgcgctcttgagccgctgggcccttcccggtgcccgcctggcagcgcggcgcggctggggcaggggtctgctgggggccggggactaagggctgtgggcccatccacacacgcctcatcccttctttccgggggcagcagagcagcagcgggagaccgggagcaggaggggtagggcgagagaaaagcaggacctgggccgggggtgggagtcgggccgttgacgctcgctctgcgaggggctccctgggaacgcccaggcgagcgcctcctgcggggccccgccccccgagtgcctacaaatggtgccaggcccgcacccagtcctccgcgtggcttagcgggacagcatgggctgagcccaggcgccgaaagtagtcaccggcggcgtcgcaaggtgggctgtgccagggactggtggggagagccagcccgtccactctccagcttgttcccagatggttcattctggcccgccccagggcgcctgggttcctgagctcccgaagcattccacttgttccctaaggctacgtgggtttaggtggactttttacaatattttcttctaagggaaaggggggacgga

SEQ ID NO: 415400 - DNA, 656 bp, Homo Sapiens
gcacaggaagcatagttactctgcgatgaagaaaaactcagaaaactatccagatgtgggaatttctcgggtattccttgcacttgaacttaaggatgaatgaaggtatatacaagtctctacttctcctacataaatgccttgcatggcgggaactaaatcaactacacagacccatacatccagagagcagaggtgagctggatacaagtggcttagagatgtggtggaaggaggccagagctccaagggaagggcagcaaggagacaacagcatgggttgcagctcagacaacaggtaaataaaaccaagcaaagctgctggtcacagatttgaccagggtggcaagaaatgacaagctaccatgagattcaacagtggcacggaaggatgatgagaagcaaacagattaggagaagctgccaccaccgtacatagaggcacagatgaccaagcagaacagcaccagtccctgcaaggtgtgctcagatacagctcagcacagccatctggccaggagggaatgataatgcacatggtgtgcactgcagccgggaagttgagaaccgctgtgggcacctcaggactgagtctggttaccctgctgatccaagaaatgaagccatctaaaatttggcctgctttcacaattttc

SEQ ID NO: 415401 - DNA, 744 bp, Homo Sapiens
ctatttctttgtcaagcaggaggagatagcttcagggtcacaagaaaatttgcagaaggaatgaatgtctttatgcctttgaaggacattgcaatcaaactgctgacgcccagaagtctggttgttcaagatgttatctgagactgaagaaacacagatttttcccttggttcctggcaactccccctctcttattctctagctgcataaaaactccctgctgattttggttgttattgttgttaagatggatttgagagttcttgccctcctgccctctcactttggccaaatccaatgaacctttcacatctccaaccacctgtgtgtcggtatttggtgtcaactgcacatcaggtacataagcctcaacttgggcttctataacaaagtcacaaactattactgcatttattcatcatcttctcccataatctacctttccatcatccatgaagactagaactcaatagatagtccaataaggtccagaggttctgatttggttccctgtcttcttgcttattctaatagatgatgcaactagtgcacaaagctaaatgtcttctttaagcttgcataaaatgcgtggctcagtgattggcatgctgttctccgcgcccccccttacatccacaaccaattctaaccagttaattcttcattttattttaatgacctatcccagataaaaagctaaagacaccccattcagcaccatataagaattaaaatgaaaaggac

SEQ ID NO: 415402 - DNA, 778 bp, Homo Sapiens
cgcaaagctcccctctacacctgagcgggggacagatgtgcatcaatatttattcggaactcccaggaaacctggatgaagtgtaattatctcagctcaatcagcttggattagcataacatcaagtcacccatcagacggagggtttgatttcggggatcaaagcgacggctgtagccgctgattaatcggggagaaggaagcggcgagaagaaagcggcgccggctctgctagccacagctgcaccgctttgaagcgccggtggtgccaagttaactttgccggccgcccccgccgctcctcggacccgctgcgcccgccgggtccgcgggttttagcgccgctccctgggctgcgagtcgccggctctaaaataaaccgtgccccctgcccacccggggctgtgttgggggactgtttttcctcggtctaggatctgctccgaggtggaggggcgctgcggggcttgcccggcccgggacctgggctggaagctcacgagaaaggacgctcctcggaggtgtgcactgaaggctgcctaaggctggagcggaggagtgaaatgatggagcgcaaggccttccccaagctggtctcagctggcgtttcctgcctcacctgccccatcccctcacacgaacacaaattacttattttcttaactcatcaggctttattggttctgtacctttgttacaatccgttttccccaattggggtgcacttctgtctccttctgttcccaaaacactctgacatccgtaataatcaacctgg

SEQ ID NO: 415403 - DNA, 634 bp, Homo Sapiens
  misc_feature (371)..(371): n is a, c, g, or t
ctctggtctcctgactctggcaggtggaacatttgcactgttcttgttccttaccccaggagctggcctattgcacaacctcaggaaacagcccctatgcaatcctggcccacagagcggacatgttctggtttttattcagcagcttttttatgaagtgtgttttcctttcccatcatgtcatctggaagcaattcctcccaacagctggatatgctttcacaattggtaaacaccgcgaatggaaggccggggacgatgcggagctccccggaggagccttgtccccacccgcttggctcgcgttctgaagcttatcgcgggtgcctgcacaagcctcatcaaaatcgagggcgtcctccagcaggcgnaccacattgcattccccgcttaagagggtcaacgtgttcttcgggggagaaattttctagaatgctttgcagataacaattgatcagatgcaggccagattgccagctgccggggccgcgtgcgcctagtggaggccccaccagcgcggggcaccagcgcctcggggtccgggggaggcctctctctgcaccgacgcaacaaagccagtaagagagggcaaaaccccaaagagcactgactgggccgtcaaggaagatgaatg

SEQ ID NO: 415404 - DNA, 868 bp, Homo Sapiens
ctcgccgtaggccgggcacaccctctcctctgggcctggatgcccccacagtaggagaccaagataggtgggggcacacacaggcctggccactgcctctgctccatgcggagtgtggctgggccttcctgctgtggcttgagtcccggccagcaccggaaggcccaggcagggaaactggctgtgcagtgacccctcagtgccatcccttgaggagaagacccttgggggcatgctgggtgtgaccctgtgcactctgagagtgggactctagatgcccagcaggtgactaacgggggagtaggatgccacctctgagcatgacacccaacacaccaccaaagaagacaatctataggaacgcctacccgacagagagcacctggagactaggacacctgaacaggacactcgacaacgagacggtgcgtgcaccacggacctggcgaaagcaaggacacaagacgagcggagaccacagcgaggaggcaccatggacggagagcacagagccaacgggcaacatagacgacacacgaacagacacacgcaagctaaggagacgcagagcgacaacatggaaccacagccacaaacaaaccccacccaaccacaaggcaacacagactcgccgccaacccaaaggcaacacagcacgaggcacaaagggaacaccgcaaagacaaagccgaggccagaacagcacgaaccgacaccgaccccacacaccagcgataccacgacccacagagggcagcaccgagagaaagcaggagaccagaaagcatggggagaaccacagaaaacgccaggaaccaaacgagacaaagacgacacaagacgcgacaagcccgggaaaacgaacaca

SEQ ID NO: 415405 - DNA, 770 bp, Homo Sapiens
gctgatctcatgctaatgaagttagaccatgtgagccctatctttgtctgtgggaaggtggatatcccttatacatcgtatggctccatcttcatcgttatagtaattatctggcaagtgaaaaggagccaccatgaattgagttcagaacctaaaaggagctgctgccggtgtcaccaaaaagtcaggcaaagagctagagatgcagcatcaacagctaggagacgttcccgggaagaagctgagaagccacagaagctgctctccatcattaaaagccagggctggcttcctctggagagaagtgtgcggcgaatcctgtgtgcagatccctgctgccaaatctgcaattctgtggctctggagattcagcaatagctggtgggtgagaacaaccagatctccctgactttatcggggccattgcagggctcctcttgcctagagatgctgtctacgtctagtatgtcttatagatcagagtactggagtttcattcctggacacaccagagagctttacaacatgtcatctgtaaacccaacaactgtcacaattaacagatcagaaatctttaagccagatcagcatgcccaggcaacgtatgcagatggcatacaagattacagggcctgatcacatccagcctaagggcagggaattacaagctgccaggatgtgcatccgcgggacccaaaaacaccaatagctaccatcaacggcatggagcaaaccacaagggcaccacatgacacaaggaaggaaaagaa

SEQ ID NO: 415406 - DNA, 647 bp, Homo Sapiens
ggactggaggcaggacaggtctgggtcaagccctccccggggagctcggccaggccactacccagaaaggagaggctgctccaacagcaattcaccgggagtggggaagcggagaccagactgtaggggccataggaatggggggtcagaagccaggatgtcgctgactcaaggcctgataccactagagcgccatctccgggccacaggacgccgcccaggccctcagcccgcagccctgcagagccatcgttagcaccgcaggttctactctgaaagcccagcctcctccttggcccaactgacacctgggaggagccccagatctttagggccctcagcgacccaactgcccatgaagaccccccagatctttggggccatgagcgtgccaaccacccgctcaacagctaaagatggagcctgaggcatctggaagtatccacagtcctcgccctcccagacaggatttggaatgaacctttggggcttactaagtttcttgccaagtggacaggattagggtaatgtacaatgccctcagagtgaccccggcctacggacagccaacagccgccaggcccacccagccaaccgtccccttctcggccaaccgacacccagggagaggctccgaggcagcccgg

SEQ ID NO: 415407 - DNA, 1070 bp, Homo Sapiens
  misc_feature (943)..(991): n is a, c, g, or t
cttcccggggcgcctaggccaggcgggccccagcgtcgtcctctcccacccccccactcccctgccacacattctggatcaaagcagacatgcggccggcgctctgcgatccaaggcacactgggtgtctttcatccggtgtatttaaagacaggaggaaacgaacacggctcagaggccagggccccagaaagaccacgcacttcctggcacaagtcttcaccgtacatattaatctctttggcatgcacgaggacaaacactgcagctaattttttcatgggatcaacacacaatataacactgccaattatctttaatttactaccctttcgatggtctattcacaccgaggagtaaagatttcaacgcccacggtccatttacccacaagtatacggtaccaaaaacccgttgacggcatgccttggtactctaccgccgccgccgtacatcccgcaagaacccggaagcccagtcgatacccggaacacctccaagaagcactggtgtcaaccacgcaaaagatccacgccggcgacaggcaagagcccctcacctggcgaggcaaccaagggacgcccccatggacaggcgctggggcgaaacccgacacaccgcctacacggccacgcacgacatccactacacgcgttgcagacaccaccggcatagacaggattgacacgcacggaccgcactgcaacaccgcagttatccgaacgaccccgacccgttgggccacccccaaaagggggcccacagcacgacgcccaaagcagaagcaagaaacggcgcctacccagtgggtacaacaccgctggcgcgacaaggacagccgacactacgacgatctgcgacaaaccacaagacagacccaccatgagcatgagcgccattccccaaagggaaacccccacgaaacaccacacggcactatagnnnnnnnnnnnnnnnnnnnnnnnnnnnnnnnnnnnnnnnnnnnnnnnnngacaagcagacaagccgcgacgagcagcaaccaaagaacaacacaatgacgaccacaccacatgagcgaaaccacatgg

SEQ ID NO: 415408 - DNA, 678 bp, Homo Sapiens
  misc_feature (285)..(285): n is a, c, g, or t
ctgttgccctggaaagctcaatataagaaaacaaagaggatagtagtgtgggcttggaataagactcaggttcaaattcgttactctaccaactagccagctgaatgccacagccatctctttgcagaatagcttggatgctcaattttcctgaacgatctccagcgagagatagaacaactatcaccacatttcatttaaaaatctcttcaagacccttcctcagttcttaaactggcaacctgcccagcatcagcctcacttgagaaattcgagaactacctngatggagaagagaactagatttatattttgtttgagtcacagaaaagtgacagtttaaattctgaaagaagatcacatttgtagtgcctctttggagacaaaaccttaggtcttggatttgtcacatgttagagctcaatgggagtttatcagtgctctccaagtccagcactcctatttaccagaggtgaaaaatgagtgtgagtgaggaaattattatttccagggccacacaatctaaaaaagtcaggtcagtactagaaccagatgccctgatagcagttctctccctggcatctccttgcatttactttgcatttcactttggcaggagaagtaccagacacccttgagacacaagacaggatacaatggacatgggagtagatagag

SEQ ID NO: 415409 - DNA, 278 bp, Homo Sapiens
ccctctcagcccccctcaggagacgtcggagccaggacatgtcgggaatggggggatacgaggcgaggagagaaaggcgtctattccgtcgtgtggagacgagtagaggacggacgcgcatgagacggctcgagacatggggatcgacccgccgctcagcggtcggtcgccaatggcaccggacaaactgagctctgcagctgagactgctgcacgctggtctatcccacgtcgggtcggtcccgcgagccacgcgtgccacacaggataaattaacg

SEQ ID NO: 415410 - DNA, 836 bp, Homo Sapiens
gactacttaaacaaacaaaaccagatcaccacctgtaacaacaccaaacaaacaaaaccaagaactaggaaaatgaggaaaaaatatctgactgaatgaaaattattacctgaagcaatacagaaggagtacttaagtgttcaaataaagtcattgaccaaagtatggaacagaaaatataaatgcatatttttaaagcaaacatttcatctcctaaagacaagataagacatggaatgagaaggagaaataaattaatcccaccatccaacagtgaaagaaaaaacacagaacatgaggaggaccagaaagcaatgtgaaaaagagtgaaaggagtcactgctgagctattttagattctacaccctctatccagccatgaacctatcagcgatcatgcctaactattgcataccccattagacaacctaatgtgaatgtaggaagcctattcatctaaaggacatggaaccgagtagatgtaactgatacttcactattgacctatagcctattaagatctaccatgagtcatatacatttgacaccgtggttttcatttcataatacatatcttcactaatttgtctatcatttgtcaaagggctaaaactatagtaatgagtacattcttaatgagtttttctttaactaccacaattgtatctaaatttgtctcatcttatgttctaaaattgtcacagcaaagtgatcaaggaagctagagattttacatatgttcttctcaataagatgcgtgtatctcttctatatcaagtaaataaatccttgatacatgaacgaaagtatggttccagttaacaaattaatatgat

SEQ ID NO: 415411 - DNA, 837 bp, Homo Sapiens
  misc_feature (286)..(295): n is a, c, g, or t
  misc_feature (363)..(373): n is a, c, g, or t
ctgctttcagaggagtggctggtagactgatggctcttttattagtgaagttcagatagggcctgtgatccactccacggcaacccgagggagaggtcaagtcacacagagctctgtgtcaccccctgacagtttcctcaccacagtcagaatggcactgtgacagacactggagtttctctgctatctaattaaggttccattaacttaactaggttaaccatatttgctttctattatggccaacctccaggccagaatttcaataattatcatatatgttgannnnnnnnnnccacaaacgctttccggtggccactatccttcagcaatggggcaagccttctgtctatgtgacaaaannnnnnnnnnnaaaaaaaggatacaatcaaactgcgttcattggattgggcagatatattctagctggctaaatgagctgctggggtcctccagataagcccctgcattctgggagctggccctgcagtggctgacatggacatgttcagcagagctgtgtaatgacgtgcggccatgtgccggtagattccaagtgctgtgttatcacacatgaggaaaaactggggcagtcatggaaccattacgggaagaggaaagggctagagtgaatccaaaatttcaactagagatgtggccatgggcacgagagaggcagaagatatggcaggaagaaaggtagtgactggaaccacattgggaaacagtgcatttattcaacaagatccaccagtgccggaacgaagagagcgcagcagagcacgagcatgatgtcagcaccctgactggtcccaacatagaacacttacaacgggg

SEQ ID NO: 415412 - DNA, 921 bp, Homo Sapiens
ggaaggaccctgtccccgcaggctcgagggtatccgttccctccgcctgacctctggggggcttaggacacctgctcccatgtcagagtggggcggagcctggacactgtcacagtccagccaggtgtgcccatgcttagggcaatgctgacacgccaggctgacaccccagccccctgtcaccttctccccctccagacttggggcactcgcgagcgtgaaaggggaagcctagaggaagctgagggtggttccggaactggcctgcaggtgccccttagtgccagcagcctgggtaccatgaatagccgcaggaggcagtctcctgggtggaagagggcgggtcccgggcaagggagggcctgaagactggggccatgctgtcagacccgcagacaggaatgggagcttgtggtacattttccaggcccacccatggcaccccatgaaccaatcagcacgcgcttcttccccctctgaggcccataaaagttccaatctcagccagagcaaagaagaggacacagagatgctggaacgaccaggtgcacacaggagctaccctccctactgaaagctgcagacgacctgcctgccaagtggagccacccactctagtgcctcctctcgctgagagctgcagacaacaagatgaccagcaacagagaggagctaccttgtctgctggtagctgaacacttgtggggaacgacctgcctacagagaggagctaccctttctgggcagggagcttaatattcggtggtacaccctggctgtggagagaagctggcctccagcagggtcttctcttgagctgttctatggctcaataaatctcctgttggtcttggtcaaccttccattttcttccctggtccgcaggacaataactcaggacccatttgaccggtgaggcta

SEQ ID NO: 415413 - DNA, 149 bp, Homo Sapiens
taaataaataaattgattgtgatgtcatgaaggtgcaaagacagttaaagattactgatattgttacaacactgtgttgattgtagtagtgggagaaaatactgttactgaatatatatcagatatagctcattatatatgtggtgaaa

SEQ ID NO: 415414 - DNA, 932 bp, Homo Sapiens
  misc_feature (173)..(223): n is a, c, g, or t
  misc_feature (271)..(335): n is a, c, g, or t
ctccctctcaggaaactaacagcctgctatgaagcccaagccacaaagagaggccaaggggaaataaacagagtgtgattatatgcaaaacctacaagaatgaggacctccaaactcagtgtacagagtgattttctgctgaaacaattggcttttaaaaaattgtgtgactnnnnnnnnnnnnnnnnnnnnnnnnnnnnnnnnnnnnnnnnnnnnnnnnnnnaaaataaaagagacatcagtgtgtgaatgacgactttctgttgctgannnnnnnnnnnnnnnnnnnnnnnnnnnnnnnnnnnnnnnnnnnnnnnnnnnnnnnnnnnnnnnnnaactgaattgaattcaaatcaaaaaaggtctgaacctcatttaaaagatggttttgtaactgaagaattgaaaggatttctttatgaactagcatcatcttaagacaaaggataaggaccctgaagacagcattatagtgaatcccagaggtgctctccaaaatggtgctaatacagccaagaatacaggtatgaggaaggatgtggaagggtaccttacaggagaaagcaccacttatccaccaagatggcagaggccttcttgtctgacccgtgagtacaaaaagaaaacattatcacggagagacaataggcaaacaaagagcacacggagaagaaacatagaatgaaagacaagagagggtcaaagagaagaaaaataagatcacatgaaggttgataatacacttttatatagaaacacggcaatgtggcaaatccacaaagctgatcctaatatttacatgttgtcagaaaatccaggctggtgtaaatacctttttggaaattgagaactctgcaagaagccagaatcagggcatctggggctggaatctaacgccttccatgttctcagtggacctcctttttgtgccc

SEQ ID NO: 415415 - DNA, 477 bp, Homo Sapiens
  misc_feature (273)..(273): n is a, c, g, or t
gcagtataaaactattgtttcccttgatgcatcactttagcttaacgatggtgtgtagtcctggtgttgttattccacgggagggaattttagagtgtgcctctttatcgctgctcttctctgtctagtacttcatcacttctgaattcatgacttgctctcagatgttccaactagcattttgtatgaatttaaacttggctgcatctgagctgtttctgtcttaaaacattggcttcttggaattcccaagcaaccggacaaatttcccanatattggaacaagcaaacagaaatcatgaaaaatcctaataaaaacggtcagaaatgctgataaactaaacaaagtaagtcttgaagacaagggtaaaatgcctttaggaagtgtgtccaaaactgttcactgcattgatgagtctgaaattttccatatcatcaagctaatttattttcttcaatttgactgacttttagaat

SEQ ID NO: 415416 - DNA, 287 bp, Homo Sapiens
atagaaccctgctcactgccccctgcccatagtgaacaatcggcactatctatttggccctccagaacactaccgtttccgtagagacagtactaagaggaggcttatttcctcctgcagacctagcgggagggcggaggcttaaatctagaaaaccaaccattgagagcaggtgaattctaggtatgatgagctcattttctgacctgcagggggtgagggtggtcaggggtaaacctgtgatcccaaaggccccaaggggagcgtcagcaggtctctgggatatg

SEQ ID NO: 415417 - DNA, 664 bp, Homo Sapiens
gtgacaaagagcaacaaagagccacaaagagcaggctgcgggcgggaccatcgggaccatcacagaggcatcagccctgccccggagtggctgcagatgcatccctgagggagggggctggggtgcaggtgctccctcccgaacagggggtttgttagcttcatctgcaaggccctgaagccaggctcttttcaaatcgtcatcatgtgtgcaccgtacactcccttctgactctgggggcctgggcgcctgcttagtgcagccttaaattttttacgtaccagtaaaaatactgcatgtaagactctgttcctaggaggataaagggatggccagagctggctaagcggagtctcgacggactaaaggtatgggaaaatgaagacgtggacgctacgcacgttctccttctacctgtgaacttacggatttgtaaacttgcatttacgatgtcatttgtcacatcgcgtacggctgtgacttaatacagctcacaaacgaggactttttccaatgtatttaaactggtgtacgatgctggcaaacaaatccagactgagggcaaagcccgtgcagcgcaaccccatgcagccaagagcgtgacggaccaccctggtctgggtcctgggaccccgactccagggtcactatccttcatcttacc

SEQ ID NO: 415418 - DNA, 534 bp, Homo Sapiens
gctggcgtcagaggcacggctggatcggtggaggcggcgggcctcgtcgcttcctcgcggcggacgggcgagagcgccccagtctccggcggcccctgctcggctcccctcgtgcccccttcgcgccacatgaatggactcgcccgggcggggggcggtgcaagcggcctcggccccggaccctggccgcgcccccgctgacgcgcgccttccgtggcgctgttgcagcccctcgaagcgcctgggctgatctcgtgcgggcggtggggcggcagcggggggagccggttggcagcgcgcgagatgctggcgagatggactctgatctgaacgcagaaagaggcgggaacaagattccgcgggggacccgagggcaatccgagcgcaaagaatagagcgagaagcacaccagtgaagacgggcagcggatcaccaggagggaacagtgagaaaccgggggggccctgcatccaaaaggacccagacttacagagccgcaaggcaaccaaggagtaccgaagaaccaagagagcc

SEQ ID NO: 415419 - DNA, 749 bp, Homo Sapiens
cgaggcgctcccttctggacactcagagaaacgggggcatttctcattctgtgttttcacattttataattatctgtatttttcttttccatctagaccaccagccctaagagggcaagggatgtgtattagtcagagttctacagagaaacagaactaataggataaatgtacatatgaaagggagtttattagggagaactggctcacacgatcacgaggtgaagtcctaccatacgccatctgcaagctggggaagaaggaagccagtaatggctcagtctgagtccagaaacctcaaaaacaggaaagtcgacagtgcagccttcagtctgtgacccaaggcccgagagcccctggcaaaccactgatataagtccaagagtccaaaggcggaagaacctggattgtgatgtccaagggcaggaagcatccagcacgggagaaagatggaggctggaagactcagcaagtcggcttatcccaccttcttccagtatgacaggctgataggctgtgtcacagtcagctgtaactcagtatgataggctgtgtcacagtcagctgtgactcagtatgataggctgtgtcacagtcagctgtgactcagtatgataggctgtgtcacagtcagctgtgactcagtatgataggctgtgtcacagtcagctgtatacactgaactgaacacctgctattctgggcaggcactgtgcgcaatttgtgtctacgtatttcatctaatccta

SEQ ID NO: 415420 - DNA, 791 bp, Homo Sapiens
  misc_feature (671)..(671): n is a, c, g, or t
ctcggcacgacccaggttccatgctacaggcctctacttgtccagacctgagggtcagattcagatggtgcaaatgtttaagacctgggtcttcaacgagatgaattatcagctatttcatagctgcagtgttggatatgccgagacgataaaagcaacagcaatcagaatcaacagttgaaacgacatggcagacgctgtgaatgctatgaactgctgtgctgagcagcaggattcctgtgtcctggcgcaatgcccatggggattcatgctttcagagggtcacgccttaggaacacgtagaagggcaagcatttcatctggcagggcactgatttaatctgcacgcatgtttggctgtaaaactagctcctcccccttaccatttttgagtcgctgccggactcaaattccacagattctggaaggtgtccaggaactcgttgatttgtcaaacttatggctacacacagctggaatggagacggactccactgaggagactcatacaggacaggagggaattttaagaggataaccctgagattgaaaacatcaaaccaaacctgaagcactgagaggctgggtaaccagctctggtcactgagttggtgagggatggattcagaagaggtctccaattgtgacaccgcagaggacctgctcttggncactacactctaccagctctgcaagaagcgcttccacacttttcatctcagacccacagagccagtgtgtgcggctgaggtgctcagacttggcaggtgaaatgacttcattagtgccct

SEQ ID NO: 415421 - DNA, 979 bp, Homo Sapiens
cgcacattcgcagcccgggcagccctgcttgcgcaccgggcctcgcgccccgtgccccgtgccccgagcccctgagcccctgaagccggtctccaggatcatgtggtatgtcagcaccagaggcgtaaccccagcgggctcaacttgtgagggggcccgtctttctcatggctatgcaccgtgacggggcgtccttcctttatgccatgaagagcctcccacagcttggacacgagggacccatgttgaccagttggaagacacgagctcgtcctatcctgtgccttggtgaaggagctggtgatgcccatcttcaattgtgtgctcgtgagactcctttccacaaagatgaagttaacactgactcgtagatcgacccgaagcctttcaaggcacggattaccggtccaccagaacgaacgtgggtccaatcttgtcccaggttgacaggagactgcggctgaaaccgtgatatggacgccttgttgtgcatttgtcgcggtcaacatctattgccattttaaatgcggaacctggttccccgtgttcctttgacagcaaaccaaccaggttctcccgtggcatcgtaacctttacacttggagacggacagcacgcgagacgaaacggccacgcgattccaccataggctgcggtatatgctaccgtggagaccacttctttggggggagaaaccaaccaggtcgcgaacacgtttagcttgcgcccaacttatcggaaacaaaagcttggttaccatacacggcgtgcggccacagatacggacagcccatgttgtcgaacacaatttgaagtccctgcgatctcctatggcgttaggcccaccacaacaaggaggtaccactcatgggaccacccccacaaaacgcgcaagttttccaacgcgagaagccttcctcaaagcgaatttagaccccaagcacggggtagccctctagcaaagtcgcacacgaacacg

SEQ ID NO: 415422 - DNA, 839 bp, Homo Sapiens
  misc_feature (13)..(13): n is a, c, g, or t
gctgcacacaggnccatgcccaaccagcaggctctcagaggactcttgaggtggaaatgaaaacaggtactttgttaaccagtggaagcacaaagatgaacaaaccatactcctcccctcaagacaactctttcgtgagggagataacccaggaaataggagtctattcatgagaccgctgctctaactagaagaataggaagtaccagaaggtcacaaaagaggagctgattagctcaacctgagaaagtctcccaaagcttcacagcggaaggaatgctgaagtggggatgaagaggtgttgatcagaaaaaaaagacagtctcactgtgtcacccaggttggagtacaatggcatgctcactgctcactgcagcctcaacttccctaactcaagtgattctcccacctcagcctgttagctgggattacagggttctgtcaaagcagatgactcccaaaggtttcataaatcttccggaaaataagctccttcagctatataatcatggcacccacggtttaaaagttgacagtgagaacagcattgaacagcctgctgcattcagcaaacagatgggagaaacaatgagttcaatcagtagactcccatgaccccttcaagtgacgcaatcatctcttccaagaagttgcagctacttatctcgggataagcgacgacagacgagaaaccacaaggaatctgcagacgcgagaactccctggactgcagaatatacagccatctccaataaggtctaccatttaaacctacaagcttctcctgttgaggcaagcatatggtggaattatggttagcagaccttatgcattcccag

SEQ ID NO: 415423 - DNA, 647 bp, Homo Sapiens
ctcaaccactcattgcttgcatttgagaatttaagtcacttgaccaaagtcagacaacagtgattatattactacagtgattctggagtgttctcaacaaataataacctcagaaacaagtaggcacttggagacattgggctgtggattcaggttgcctaggtttgaatcctagtcccaacatttactaaggctctctgatagtgggcacattatttaacttcctcagacctgtttccccatctacaaaattggattacctatgctccaaggtttgtgatctagaattcaactaataaattcaggcaaattattccaattatattaagcactagtactcaaagctgacatttgaggctcaaatggagtgtcttcttagcttttgtctcctgtcatttcagccctaagccgaaatccaaaaataatgggaaaattctatgccctgatataacacagaattataaaggaagctacaatatcccatactccttgcttcatactctagaatccatttaaatgaggtttaaaattgttccggttgagtcattccttccagtcaaggcatattctatctgaaggactcaaattaattagctacagttaacagattattaagtcaactggcttctacggagatggtgagagag

SEQ ID NO: 415424 - DNA, 703 bp, Homo Sapiens
  misc_feature (19)..(19): n is a, c, g, or t
aagcaggcggtaccggccngagtttatggatctgggtgcagcaggccaagccccactcctcaagatggaggaggatttgctgctcccggtggggactccccagtaggccactgggggaagccccacgacccagacagcaggtggagagcagcagctggccggagatcgacttcagcgagaaactgtgcggagctccagcagctggacttcctggagcagaagagccgctgaaccccgcccctgctgatctcactgcacacagcctagggccccacccgccgaggactccagaaccttctcctaccagctcgcccagagaccaagccaagagagtggtctctgaggagcccgctagaaaggcaaggcgaggcccgcagagaaggatgccaagcctgtagaagcagagacgtcggggatgggggacctgccctgggcgccgccagaggcccaagcgcccagcaccgcaggagctggagacgtcgctgagcaccaggtggcgccggcgcggttcctacagggagcctggaggcaggctgcggggtggctgtgccgggagactggagcggctcctggctccgcgcaggcagggcccccagagacagctcatgcaggcagatccgcagccccggggccctcaggcaccgccgcggcttgcgccctcgctcagtcccgagcgcgtccaccctggccagccagctgcccc

SEQ ID NO: 415425 - DNA, 384 bp, Homo Sapiens
acggttagtccttaacaccgtgtgttaaaccggctgtctggtgcggaatctgggatgagagagccttgcctcggctgcaatgactcgaaagctgccgctctcgctccaaccggcgccgctcgggccacccgcagcttcctggcagtcggctcttctttcctcccatccgtcccccgtttctggaccgcagactacgctcctgttccagcccacctactcgtcttctgccccatctgctacccgtctctgaaccaattcgtccccgtcactaccccgtcttgggcatgccctgccgagctcttcctgcctgaatcttcataagatctgcatctgccgcctcatgtccgttggggccccaattccatacgtcctccctatcgtagg

SEQ ID NO: 415426 - DNA, 774 bp, Homo Sapiens
  misc_feature (17)..(17): n is a, c, g, or t
tggatctactggcaggntgctgtggaaaatacagagatggatgggaagtatctctgtgttgagaaagaagacggaaaccatgtaaaattttctacctatgacatgttggggctcaagagaggacagaatcatcatagactgcaatatttggggaaggatttgtggaagaggagacatgggagaacagagaggagaaggaagggcatttgaggtagaacaacccttggaaaggctcagagcaagaacaggtgtctgaatggatgcttttgtatgcgttggttattctaaagaaagaatagaaatcatccaaagtgattacatgcaaacacggacaaatttttgaagaaaccttatgaaaatattctagttgaaaattcagggtaagttccaatttttgttgtgacttttcctgtcttattcagcattcccatggtaacaacttccattaacatatattatgtaaaaggaaatattactttgggttatcactactaatcaagtatccagttaaattagaaataagtgaaataacaaactttcataacaataataataaagataaaatagataaaatgtattggatgtttctgtgggcattattcatttaatttgtattaatattccactttagataggtactttgatcaacttgcgctcttttggaccacggagttccggcgctggttacccagaacgggcatgcacagggtgcaacctcgcgtgacgccaacctccgtcctccaaggtcacagcgacaccccggcttcaggcccc

SEQ ID NO: 415427 - DNA, 119 bp, Homo Sapiens
gagcaggttgcttcagggtatagacatttggcacagtactgcagcataaacccatcaaggtaagccctgacatgttacacgaaagacaccctcacctttggaattataaagaggggaca

SEQ ID NO: 415428 - DNA, 480 bp, Homo Sapiens
  misc_feature (138)..(138): n is a, c, g, or t
  misc_feature (143)..(143): n is a, c, g, or t
acttttcttcttatttcacagggggtcagaccagtctgaagtagtaaaaaagttcaagtaactcagtaaaatatccacatgtttaggatttgtagacagtaagggtagtagcaagtcccaatcctctttttgtaattntacanggcgacttaatatgtgctgagttacatgctttgtacgtatttttttgctcatcattacaaaattcctatgagtggggctattgtgcccatgttaatgagccttgggaggtgtccaagtgagtatcagagatgggatttcaacccaggcaatttgataccaaagcccaggctttgaacatgattgcaacatgaggtgcccgggacgcttccctgtgttgtcccagacagcaagtagacatgcctggaagcactaattttaaacaagctttaatgttgacatcagtctgattgactgttggaatgcccatggcttgtataattataagtgcccaaggat

SEQ ID NO: 415429 - DNA, 738 bp, Homo Sapiens
ttacgggatcttgcttccatgtgcacacgctgatttcacaacctggaatcatttccctacacctttcctcaaaggactgttaatgagttttcagagcaggtacttcactgaaatgtaactaccacaatgcatcctttccatgtgactaacttcgctcatggaccagaatcactgtggctctgccctggagtggtgcaaagagctcgcattctgtttggaaagcaaattatttaaatccagtagaggactctcaaatgtggttggaaaatctaagaagacttcccagaggcagcagcactagtgttagggaaagagctcacaaattccattgctgtagaacccatgtgttgaagaccgctacactggaatctagttttctatcctaaaatctacctcctgagtttgagtaagacttgaactagtttgcaaatatctgtgatcttcaccttgcctgcctgcaaagcccataagcaagttcagaagagacttctacttgtccaaagcaacatggagtaaagtgggtcaactagaattaaaatatgctccagccaaaggtgaccatggaaacctattgataaggctctggggtcagattcatctctgttcagacaactctagcggtgtgactctgagcaagtgttttttaacctaagttcctgcttcctcaactgcaaatgtaggaatggtaacatcttcctcaaagttgtatgctggggataacacatgaaggagatgcca

SEQ ID NO: 415430 - DNA, 1239 bp, Homo Sapiens
agcagctggtacgagccggaattttgggcatgttgcaagtcttttgctggtggagggtcttaccttgatgctgatggctgctgactgatcaggatggtggttgtcgaaggtgggagtggctgtgatgacttacccactgaagtcttgaatccctcaaagtcattgatgagagttggactcagcttcttccagactcctgtgaatcaacattttgaaggatatttgaccttctcccatgaatcacaagtgttcttaatgacataaatggtgaatcctttccaaaaggttttcaatttgcccacatccatcagaggaatcactatctatggcagctatcgtcttatgagatgtatttcttaaataagatttgaaagtcagaattactccttaatccatgggctgcaaaacagatgttgtattacgacaggcatgaacaataacattcactctgctgtgcatgtctatcagagctcttgcggtgaccaggactaaatcactttcgctacttgtacatatcacaatctgcgacagtacatcatagaagtctggcgacgcaacgggatctcggcaccacaatggactgccattatcggcattcctatgcagctaaaaccagcaacgacgagtatctctgtcaccgaaggtacccttcttcgattcccctctgcttccatcgctcttgcgcttgccctctgctgcttgctgcttcccctcatcgagcttgcctcttcggtcttaccctggacccctcctgactctctgcccttactttcccttgtatggcgccttccttgtccctcctcctcttccgccatccttcgccgtcgctataccgcgctctcccgtatccgtcactgatgaccgactccgcttaccacccgccggctctccgttctgctactgcttgagcctcccgcaccgacgtcgctcgtcaccgcgccttccctgccccctgctgctccttcgccgcctcgcactgcttcggtctgcgctggttcggtttgtgcgttgtctctgcgctcggtcggggtgcgcgtgcactcggggatcgtcactcgctccgcctcttggcttgcttcgctctggtgccgtgccgagctctggcctgagctcgctttgggctggctcctggctctgcgctcgccgccgtgacttcgttattcgctctccgtctgcctctgtctggctgtgccgtgtcgcacggcttcttgttggctcgtcttggcgcgttgccctacc

SEQ ID NO: 415431 - DNA, 292 bp, Homo Sapiens
ggacccagatggaaaggcagctcaacatctgagaagccagtcttactccctgcaggcaacagctgcttccagaaaacagccctgtaattgtcaccatcaaatccatatattttcaagggaagttggtcccacaccagaagtcatagctgaatcaccagcagtaatgcagggacatactggttgcttcttggcttttccaaccctctgccatgcttgaacatctttgtgaaagtccaggaacaacaaataagcttaaggataaaagccccccagccataccaccaaacccctg

SEQ ID NO: 415432 - DNA, 378 bp, Homo Sapiens
  misc_feature (115)..(115): n is a, c, g, or t
  misc_feature (189)..(189): n is a, c, g, or t
aagcaggctaacctggtaacgcgacggcgatccgacccgatacgctgcatctattctcacgcccagatcctgagggctgtgagggtccttagtcactctttttgttaattcacantgcagtacccttggactcagtgcccccagggaaggggtgcccacggcaagggactcaagtcagatggttccccncaaagggattcgagttccccttgagacacaaagttcagctctggccatgaacatcctcagtgacccagtgacccaggggcagaataaacaaccttctgggacaaacccactctaaggaaagagatatgactcctgagttcgagtgcagttttgctgttgaattgctgtgggacctagcaagttactgga

SEQ ID NO: 415433 - DNA, 616 bp, Homo Sapiens
taaataaaagcagctagttacttctcattcttttaacgaaacaaacaaaactgaactttgctgggtgacaggagtgaagcaaaggaaaaaacgatagtacaagttcgattcgagattcttccaggtcttatgattcgatcatcgcaggaatactgataaaaatctgcgttttttccaggttgacaacttttgcgaggccagactaaacgaattcagcgctccaaggagactcctctttcctctgctttctcacatttacctctcgccttttacctcccaaagtcgaaccctccaggatcgtacaggcggtattccctctaccaagcattctactcctctgcagatgctgcaatctttacactggaactaacacttagctgtggtgttccccgctttctttactcggagtagcccaggctcttcctctccaatccacaatttccctccaatccccagtttccctcttgggcgcctggacgcgtgcccagccgacagcctgggagacaccgcgcggactgcacgcaccatgcagatgtggtaccctttaccccttcttcttctccttcccaaaagaggtttagtgctgtgactggttgcaccaggtaactaaatccaa

SEQ ID NO: 415434 - DNA, 544 bp, Homo Sapiens
gatgtgaggaaatacaaagttccaggtgcacagatgggacctgtcaatgtgtcagacctcatggtagagggattgaaattaaaacatcaacatcaatatctgcagatcttctcccttgagataatcagtttccataaaaaggcatcttcctagttgctgctttggtggtgtggggtggagggtgggtacagcaacgaagtctgtctaccagcatttagtacactgagtgagggaagaccatcgcagggtgggaagtttcagcttcacttcgcaacccaggctctggaagtatgtcatcttccaattgcttcatcattgcctactctcctaaccacaggcatagcgcgtcagaagactgaaacccaactcagccaaccatctattcacatgccatcatccacgagtttgttgacatctctcatttgctgtgtctctcctcattctttctgtcctcataggtttataagttttcattttctttctttaaaaactcattttaaggacaccattatttttaaaaaaagcaatagaaaataacaagtat

SEQ ID NO: 415435 - DNA, 1207 bp, Homo Sapiens
  misc_feature (1089)..(1136): n is a, c, g, or t
tgatcactcagcccacggtccacttctttacatcaacacatgttactataacattctagtccacagagagagtgggcgttcttttagagttcatgtatttgaggcagcagatgagtaaccaactaaagcaaaggctgtacttgatagccaagaacaaaactggcattttccccctgttaatcaatgtcaaccctacaatctttcagcactgagaactaacataccttcatttgtgtaagcagcacatacagaaataaccaaagcagaactgaagcatgggtattgccaagaattggggaaaaagttagaaagcaaagatgggacgtgagtcttttgttttgcctaccaaacagaaaggagtcctacttcttgggtggcagttgctgtagcaaccaaaccactgctaaaggagattcagagcattaagacggaggtcgtggagaagggcagaagcctgggggcactgagctctgtagcgggacactaggagcagtggtggtcccccagaccccaactgatgatgttgaacatctgctcaaattagagcttgcgtcttgactaacgtctggcaagaaccataaactcccaagccaagtatcagaaaagagctaagtggggtgtgagcaagccgtctcaccgcagagacctcaacatgcttcactgaacacgcgaacaactgcagaggccaacaggggaaagctgtgcccgtctcgaacagcaactctcgatccgggcccaacctgcaacaggcccaccctggacctgtcccccgggaaccaagggaacacagggcgtaccatcccaagcggaacccgcaaaacaaggggtaacccaccctggggacccgggcaataaacaaacgcgaccaacacggggacaactcgccacaaaaacagaaaccaaacatggcctgcaccattcgcgccacaccctccaggtcagcaccgcccccaaggaaacacgcaagaaaaaccctgcgcaacaggaccacgcactacaccacaaagccccaagtggtagcaaccgaccacaagggacaccaccaaccgaatcccacacgctagagccacacgccgtatacacagaacnnnnnnnnnnnnnnnnnnnnnnnnnnnnnnnnnnnnnnnnnnnnnnnnggggcgacaaaaacgccccccatcacgagcacgacgcaccgtcaacaccacccgcaacggactcagaacac

SEQ ID NO: 415436 - DNA, 675 bp, Homo Sapiens
ggtggcaagtgtatggactgtggagtaagaagtacctgcctctgcctctgacttgggttctggcctataggaacaagacattttcagtaatggaagaagcttcttccagtaatggaagaaggggaagatcatcgtttccagtggtagctgactgagatgatacgacaccacttctgggaagccaaatagacagaagagagagaacatactaagtgctagccctaaagtgaacgaatgggcaaagccagctgaaataacaggaaaaatgaaaatgcacgatgtaatgtctgtgaggagagagcaggcagttcttcagggaggggtctgtcatcgaaatgtggctgtgggcttcacagaggagtggcgtttggaccagtctcagaaggtctgtacaaggaagtaagtggagaactacatcaactagtatcatagggtatcgaggcacaagcagatcgctcttcaagtggagcaaggagaacccccaggatagcagaaggagcagccacagtcaatctgtcaggtatcatccaggagaggacctacagatggagggaaatgcaggaaagtagaaaatcacacctcatgcagatctgctaccgcggacacagcgctcagaacacagagcatgaaacatcaggcttctccgcacctgtacagagggaccatagctggaca

SEQ ID NO: 415437 - DNA, 1883 bp, Homo Sapiens
  misc_feature (49)..(49): n is a, c, g, or t
  misc_feature (412)..(435): n is a, c, g, or t
  misc_feature (1267)..(1267): n is a, c, g, or t
  misc_feature (1403)..(1403): n is a, c, g, or t
  misc_feature (1485)..(1485): n is a, c, g, or t
  misc_feature (1599)..(1599): n is a, c, g, or t
  misc_feature (1678)..(1678): n is a, c, g, or t
  misc_feature (1706)..(1706): n is a, c, g, or t
  misc_feature (1735)..(1735): n is a, c, g, or t
  misc_feature (1763)..(1763): n is a, c, g, or t
  misc_feature (1765)..(1766): n is a, c, g, or t
  misc_feature (1789)..(1789): n is a, c, g, or t
  misc_feature (1812)..(1812): n is a, c, g, or t
  misc_feature (1826)..(1826): n is a, c, g, or t
  misc_feature (1868)..(1868): n is a, c, g, or t
aaaaaaagcccctgtgtgagaccgcccgccatttcagaccggggggganacaatggtttccccatgaaggagaaaggggatgattattatattatactgttccatctcctccttttttgttgatgcttattataattctgcctcaccagccagggtgggttgtaatcactgaagtgcttggctttattctagtaaggaaagcatatttcaatttcacaattggacccttttccaattttttcttcaaagcatgctaaacatgggacagaaaactaagtgcaggatgccacacaggatgctcgggaaaattctcccctccttttctacatccatcttaaatcccccgcaccggtcagaccctaataacggcctgactgccaccccgcagcggcacgattcccacgcatgcggnnnnnnnnnnnnnnnnnnnnnnnntgcgggcggagacgtgacagaaataggcgcgcaaggcgctccgaagaggcgccaaaccctgactctacataatttcaccgttacacccccataacgcaaggccggccagcgcccgtgggggcgtctcctccggacgcggggcccagccttttcttctcaatttatataacccttcattctaccaatccaccataacctctcctaactgtacttaaaaaagccccacgcacactcccagccccccctcccctctgtacacgacccgcaccagggagccaccaggtacaacatgagcaaaacaggggaccaggtgtcatgccgtctcacattcctacccaacacatacaccccctacaacgataccaccccgccaacttcattttctcttgtccgatgtcccgccacacccctgcatatttccctaaccgctctccctctctgcatcttcgcccctcaaaaccaacctcagcctcgcaacactccagtccgcatcaacgctcacacccactcctcacccttcgtccgatgacttcctcatacgacaggcagtacagcgtcctaatactattcgccagttagatgagcacacaccctccactttatctttgtgtaatacatacgtcatatgtaagctggatgagtgtccgggtgcgcaggactcaccctgcgcatcctagactatccaatctaccctcgacgcacctatcacagcaaccagacaccacaaccccatacccacacactcacaacgtctctagtggcacatcatccacccgcaaagaaaaagacacacccgtaccccaactaccactcacccaacaagcgccgcccntcgccccgattactcatctcgcccccctttcccctaaaaaacccacccaacaccactcttaaccccgatttatcatttaattcgcctgccaaattccatcctttcggatctgtgccctcctacccccaaccgactncacgttccccaatgccgcacggacgttcgtttcccgacacatcacgtataaaccacaaatccaactcgtcctttgtaccgcngcctccggtccgatagtagggtgaacaaccaatacggagaggtccccacgaatccgccaaccctcccctgattaactaatttcctccgccgaccacccgccgcgcctccaccgnggccacatgaacacgaggaaaaaccccggaccccaccttaaaacagacaccgcccactacgggcacgctagcgtcgctncaacccttgccccaccttacttggttcnttcttcctaataataggcctttcttaatncctcgggcgcagaccgacaaggtatggntnnttctctgctttcatcaggagccnctgacaactaagaaaggattgcncgaatgggtgggcncctccacctaccatccccgcagcgcgtcctatgatcacaggnacgcaccaaacaccc

SEQ ID NO: 415438 - DNA, 1053 bp, Homo Sapiens
  misc_feature (883)..(883): n is a, c, g, or t
aatttccgggatgaagcctgttagcaggacatttctttttttctccgagagctttcttttaataaattctgctcccctcacctttctatgtgtctgcggacctcatctttcctggtcatgtgacaagaaccccgttttagctgaactaaggggcaaaaacttctgcatcaccttaactgtcgtgttcaccgtggcgtccctgacatgtgctaggaactcaataatatacatttaaacctcaaaaaataaatagtgattgggcagccccggaagaggcctgaggagggaatggccacggcaggacagaggagctgtggttttattcttccctggctttcaccacagactccttggtaaccgctctcaccaaggtcaccaaataatcttgtaattggccctgaggagtgtttggaaacatgggagggcattttcggttgtcacaaatataagcgggggcggggggttctaaaggctgtttccggggggcagatatgctaactacttgtaatcctggaacgctgagggcaccccgatacacacggcttacctggtcaccagcagcaggggaccctctgttggtcttgctttcctaaccccacctcttctggccctccttagcctcctccaggcctcctcctcctctgtctatgcttcatgtctgggtgtcctcctgagctcactcagggtcctcttctctcgctagacacttcccaagtgtgagatgccacccctgtcccatggactgacccctgccccgcatgttccccagtccaggggactctcccatccataactgcttgcctgatccctccccctccacattcaacatttctctcagctcctttctcaaaccctcctgaagccctctcccttgtatgatacntgactctggcacccggcctgtgttccgaaaagaacctgggggacatccctggccttatttctctccctcacctccctatctaacgaagccttcccattgtctaatccacctctggtaacatcttttaaatgcacctgcgcttcctctggcctttcttttgcataccccgg

SEQ ID NO: 415439 - DNA, 305 bp, Homo Sapiens
gggtccggaattcccgggatcccggcctaaggccgttgacctcgggttctccccggcacagtcgaatccacgccagggccctcaggccggtagctgtcctgcagtccgagcggagctgcgacctcgggcagctggaagcctgtgggctgctgcttctccaggcaggcggcggagggatgcaggcaggatgagcggcggtcccttcgccgccacccggagaaccgcggctggtgcccttgaaggccctgggatgcctgggttgggtgggtgggtgaacgagaaccctgagtgagtgaggggagggc

SEQ ID NO: 415440 - DNA, 1162 bp, Homo Sapiens
  misc_feature (1096)..(1096): n is a, c, g, or t
cggtccggaattcccgggatcccggtggaatcccgcctggttcggaagctccgccccctggcgggagggccaagcgggtttcaccccggcctcgcggaaggggcgcgaccaccgtatgtcctgttcctgcgcttcccaagctgggtagaaacggcgagaggctgggggttagaaacgacaggttcccggcgggctgtgccggggcttcgctgtgtgaccttgggctggcgtctgggctctctgggcccttgtttccgcgagttaaacgtaggggcgggggagtttctctggccctgccgcctgtgacctaaggagccccgtgacctctccgacccgagcccacccccggcccagtctgcgagcagctccgggacaagcactcccggcgaagacatgtaggctctcagagcctgcgtttccctctgtagagcaggcctagttactgtcttcagggtgcacgcgtctccgtccccgacccgcaccctcaccgccggggtaagctgagccaggcccaagcgacagctggggttgtccgtggggctgcaacccaggaggaggccccaacaatagagccccagaggacggagacaatgggcctctctgtcggcccagccgtccccgccatccaaacagaagcagctgacggaggactgccgggctgggatccctgggctccgcgcgggcggctgtgtgccagggcggggcacaagggaagcgcacagaccttttgagaggggcccccgtgtgcctgccctgaattgcctgaagggaatcttgagccctccaacctaatcctgaaaaaagggggccctagtccccccccacttttttccgggaggaactggagggtcctgaccctggagttgcgcccccaggtcgcgcatccgatcggggttcggggcgttttgcgccgcaggcgcacgaccgtctcgcggtccctcttcgaccgcgctgagcacgccacgaccccggcgcacggcccgcagtggcgcgcgcctccactccccccgcgccttcgggagcgcgcctccccggctgacgatgcgtagtgcgcgggcgcacgccgatcgccgcctcgcgctcccctacaaccacncctccacccgtgagaaccagccccgctgatcacctgggcgaaccgtaacgccccgcccagacaccc

SEQ ID NO: 415441 - DNA, 1112 bp, Homo Sapiens
  misc_feature (142)..(202): n is a, c, g, or t
tcccgggatggggaagtggtaattaaatgcaatgatcaactatgtggaggagatatgtgagaaatgccttagcagatgatgaagaaagagatcaaaaggctccgagaagcaggaatgctatggtggatatgcagtcagctcnnnnnnnnnnnnnnnnnnnnnnnnnnnnnnnnnnnnnnnnnnnnnnnnnnnnnnnnnnnnngcatcccatactcaacatgatgtgaattgtccctttgtccagtggatacacactgtcaacacttccctccagttagccacttcaccatctcggtgatcagatggactgtcgaggtatcgcagtgcttgtgttcaaggcaccctcattttacctaataatggccccaaagcacaagagtggtgatgctggtgattcaaatatgccaaagggaagccgtaaagtgcttcctttaagtgaaaagaaccaggggtcctgataattgacagtggatctccatgaagtcaagtaattacttaatatatctattaccactaccaaatgtccaacctgccagcaacagaaaccaacactgagctcttcaacaaacacagtccccagaggagactaaccagccacttgctagcaacttgatcacatcagattcctttcaatctggaaatggcagtaattgattttgactggaattgacacatattccagagatggctttacctttcctacccacagggactcaggcagcatgaccacctgtaagcttatagattatatgataaactgacatgggatcccctgcataacgtgactggggaccactggccccattttatagcaaaagaagggacaccatggacatatgatgataggatacacccatccaaaaactgcctatctactaaaggtttttgacagcacagcttaagtggccgccctgcaggtgaaaactgtgtccgggaaatgggtggggttcttgggtctccctgacttccaggaatgaaccccgcggacccctcccagcctttcgggtaacttgggaaaaaaaccggcaaaggcaaacaaaagggcccctgggaaattgaaaaacacctgtgggattcaaaccttaacaatttctggaattgtggaagaccct

SEQ ID NO: 415442 - DNA, 1184 bp, Homo Sapiens
  misc_feature (257)..(310): n is a, c, g, or t
  misc_feature (632)..(633): n is a, c, g, or t
  misc_feature (654)..(654): n is a, c, g, or t
gggtccggaattcccgggatggaaaactctaccaacttccccaggggaagggaagacaacagtgtcccagcttcccgagcttagaccgcctcaccccgtagggggtggggcagtgggggtctgccaccttcaccctccccgcccgagttacgtacgccccacaaacctgaggccgccaggggtagggtggagggggcgggggtaagcagcctgtagtgttagcggtggctgggaccgaatgcgcgcgcgcggtgctnnnnnnnnnnnnnnnnnnnnnnnnnnnnnnnnnnnnnnnnnnnnnnnnnnnnnnttcgatctccgtacgcaccaggtggagagcgcgcgcctggggaaggaggcgtgtcgagtagcgggagggaagttgtagtacgggtggggagaaccacactaaagggagatgggggtgagcagttaaggaaccgcgagagcgccaggtagagaggtgcccttaatgggggaacctggagaagagtgtgagcgtagtggggaagaagggagaagacaaataggttcgggaatgtgtctccgagggcgcgagcgggcgctaggacccggcgtcgaaaagatgaggctttggggctgtcggggcgcgcgctcccgttggtgacgcnnggggtggcggaggtctccggncgggacgaagccccgcagggagtggatactcgacagccttcggcctccgctcgcttctccctgggcgctttcctgctcccctttcggctacagccctggggtcgagctcttgtcgaaacgcattccgcctctcctttgggccctggggttcctttgcaacccgccgcccacccttggttctcgggggtttaccccctggggtccggggctggggggtatcggcacctgcccgcgaattgggttgttgccggaccccgggcgggggccaggtgggaaaaaagttcctctcttcgggggtgtctcgctctggttttccccccatggtcccttccctcaaaagctgggagggggatttgctttctggcggggccccaagttcctcgcaaccccgggggccccgttcggctcggcccaccccgtcttccctccttatactcagggggacacaacttggtggtgtcaaacggaaactcccccgatcaacatcatgagcgcaggcccacctaccggcgtctcccatatatctggtc

SEQ ID NO: 415443 - DNA, 1149 bp, Homo Sapiens
atttttccttttgcattgtgatgatgtgtcctgacaaacaacaggattccattattaaatagtgatgctacccaaatccaggcttgtcctgtgcttgatggctgctgctattgctccacagagatgcctcttcccaaccagaaactgtgttaaccgactctcacactgacttccaatcctcaccacaaccttgcgaggtcggtattatgaccactactttacaggcccttctggtatgcacagctaacagtctagtgtgccaagactgtgccagcctggagaaacttcgtgggctatctcaggctccatctagccttcgacactcaggcttataagggtgaaggagaaactgaggcacaatatcatgagttcacatggaaaaatcatgagtacacatggaaaaaaggtagaatttttgacgtgaattatctcagtttatatataccttttaaaactttttcctatgttttctcctatttacacaccgtctgccctgtgggctgtggtgcacattgacatgtgttattgcattgtcgctatcctatttttccaggtaaggatggtgaaactcggaaaggttaagtcactcagacccagcatgcagtgtcgtttccctctgcccgctgcctgtgctacacattctgggcgctgttgctgagctccgctcaatggctttacgcctccctttcagggaaaagcagctgcactgaagttctgtaaatgctgtaatagaagttgttaaccactttcacaatgatttttaagtaaatgtcacactgcattgtaacagtgaggctacaaccacgttagcggggttctcaatcctcattttaattcacttttcccataacggaaagttactgtgatgccctgcaaggaacggccaccgttcagtgaatttacttggccacctgggcccatttaatttctttcacttcctcccctgccggcgctcccctcggggggggtttttgaagaggtacacctaatggcgcagggctctctccccacgagcggtctaagccagggcgaaaatctggaacactttatgtcgtaccctggactggcgtgcacggatctccctcccgattcacggcgcgtgtctctcgcacacaccggctccccatacgtatagccattttgtgcacc

SEQ ID NO: 415444 - DNA, 1155 bp, Homo Sapiens
  misc_feature (775)..(775): n is a, c, g, or t
  misc_feature (809)..(809): n is a, c, g, or t
cggtccggaattcccgggatggctgtacttagctgacagccactcatggaaggagcatatggactggctctagccagatgggaatcacccatctgagcagtcaaaatctgagttccagcaagccttgccactgcaggatggagtgctctgggcacctaaataaacttgaaaggcaatctaggccataaggactctaagtcgtaggtgagtccttgtgctgggctggtgtcagagccagtggactggggggacatgtaacttactgagacaccagacacaatggttaatacagtgcttgcaccaccctcctccagctccaggctgcaaaagagaccccttgtggctccaaaagggaccccttgcttctgcttgaggagaggaaagggaagagtaaagaggattttaacttgcatcttggataccagctcagccacagtaggatagggtaccagacaatgttgtgagacccccatttcaggccttagctcccagaaagtattttgagaaactccctcagccagaagggaacgcattgacttgaaaggaagtacccagtcatggcagatcccatcacctgtggactaaagaaccctttggccctgaataaccaatgcaatactcatggagtatgccatgggttttgggtgagactctgagacatgttggcttcaggtgagacacagcactttcccagctgtggtagctatgatgacagactccatctactcgaagaaagcagaggaaaaagtaaacaggactttgtcttgcatcttangtaccagctaggccacagggagatagagcatgangcaggttcttggggtccccgattccaggccttggcttttagatggcatttctgagtctgccatgggccagaggggagcccaccacccctgaaggttgagtccctaggtcaaggcacatttcaccataagctgactaaagagcacttgggcctttaatggacaataatgggaagcctggcagtactccccatgggccctggtgtggtgatggccctgggccctgaagcttcctcctgcttggggaaaggaggaagggaagaaacaagaaaaaaccgtggactcgcgggcgttaaggcttcaggcaccctaaaaatgggaaacctcccgggtgaaattttaaaagggg

SEQ ID NO: 415445 - DNA, 747 bp, Homo Sapiens
  misc_feature (652)..(652): n is a, c, g, or t
aattctcgggataagccccgtatgtttaggaacagtgccatgctttgctgactggcgaagctctgtatctttaggggcggtgtcatgctttgctgactgtcaaagccctgtatctttagggacagtgccatgctttgctgaccatggtgctggctgtctaccgctggtccagacccacctccatcctcgccacgctctgtgttgcaggaggctgactgcatgggccagaccccagcggcttctctgctctttggcttctggtcaggttggcagccagggagagagagtagaagggggcaggagctgggcaaggccgcctggctcccaccctgtctgttgctgtcatttgccttctacttctgcctacactcaaacgtctcaacttctgcccttctgctgatctctcggctcctctcggcctgtgtgacagacttggagatgtgccacccagatgccccttccaggaaggacttgctcccagctttggggagtggtcagaacatggcttccacctgttagctcttcaggatcttcccagtgatgagccccaaccggcctgggccaagtttttcatgcccagctaacacccggagactgggagagggtcttgggagacccgaggtgggatgctggatgggtactgtgcacttgngagcttccagacaggcctgtaccacagttgaacgtctccctcacccgcttctccctctgtccagtgctggaccctcataaacatcttgtatcctg

SEQ ID NO: 415446 - DNA, 1155 bp, Homo Sapiens
  misc_feature (419)..(459): n is a, c, g, or t
  misc_feature (910)..(910): n is a, c, g, or t
ggtaccggtccggaattctccggattgcagatcaagatgccctgagggcaaagagcagaggggtgctctctggtggcccagcagttctgccccaggggagaggtttctcttttactaccgcgaaaacccacaggacgctgcttcatcccagagccaaggataccaggaaggaaggtcagagtgaggaggtgtctgagtgtttcagatcacacagtgacatactgcttgatggcttcagaaatccttcatgagctgggagacagccccagaggtgacagccccacccatctcgaggacaacacatcagcagcagcagccacgtagatgtttgtttctgtacctggattctaagtgcctgaaggactggacatatctggtttctaagttccaggaggactggacacatccatcacccacgnnnnnnnnnnnnnnnnnnnnnnnnnnnnnnnnnnnnnnnnngtttaagacgcatgggaggaatctaatcatcagactaccaaagggctgctagaactcagaaagggatccccatcatttgggggatgggataaaggtcttcatttctgttctttccagcaccaacctccatggctccactcatccctgctccttcctcctattaagattggctggtcaggagaggggtaggggcaggagcagctatacctggtctcctccaccatccacggtggggtgcactcttggtgggacctggtgagcatgacagcacctgggcctaggggacctggagccttcacagacccacagagagcaagaggagctgttcagccacttgcagagacagccagagagtgcttcaaggactgccgtggagctctgggagaagcagggaaattcaggcccctctttttgggaggcatgagaaatttttaggcaggatcatgtctancaaaagaggctggcccttttggcttatcaatatttttcaccttcgttacccccttcccaaatcacaaatggggtgcttttatttgggtttttatgggatttattgggtcaacccaaaaaccaaagttccgaaatctccctctaaagattttgaaacttccttttcaaaattttaataaaattgcgcctttttgataggcccccttcaaatttttataaaaagctgtggggctggaaaataaagcc

SEQ ID NO: 415447 - DNA, 807 bp, Homo Sapiens
ggaattcccgggatctgaaatgtgtagaaagtcctcttaggattatttttcaatagttttcattgatatgctttgtacagtgatttggacctttactggttatcatgaggatcaagaccaaaggggacatgaaaaacaaattgaagagcaaacctcaaaggcataatacaaaactgaagttcctgagattagatgtcaatgcaggtaccatcccttagattggtcctagaagttctaaggaaaggcaaaagaattaaaaaatgatcaggagatcacctgaaagaacatcaacctacattgagctgtaatgataaattgaaatataaaagctaaattgagaatgtcagagccaaattatctaagacatgataataacccagaccattgactctaaagcaaggaattatagatggaatatagaagtagcaaatttaagaaaatgaaaatggcaacattagcatgtgttattgtaatttagtgcattaaaagattaatataattatcaggtttggattactttttagtagcaaatgatggaatgacaaatgacaaagatgtattacaggtcttgctcgacctccaagtctgaacagttgttccactacaacagtcatcaggataaatcagcgtggaccatacgaggctgggatctctgtggcaaaatttagttcagataattttgaagttttgattaaaaataagatgttgaaacaatggatacgacatcacatatgagttaaaaatctatggagatggagagtacaaccttaatttctgcacagttttcagtgcaataagacctttggc

SEQ ID NO: 415448 - DNA, 1158 bp, Homo Sapiens
  misc_feature (132)..(260): n is a, c, g, or t
  misc_feature (262)..(283): n is a, c, g, or t
  misc_feature (704)..(704): n is a, c, g, or t
  misc_feature (897)..(898): n is a, c, g, or t
  misc_feature (930)..(930): n is a, c, g, or t
  misc_feature (956)..(956): n is a, c, g, or t
  misc_feature (966)..(966): n is a, c, g, or t
  misc_feature (971)..(971): n is a, c, g, or t
  misc_feature (997)..(997): n is a, c, g, or t
  misc_feature (1019)..(1019): n is a, c, g, or t
  misc_feature (1042)..(1042): n is a, c, g, or t
  misc_feature (1048)..(1048): n is a, c, g, or t
aattcccgggatgagaacatttaaaatcgtcttttagctattttgaaatatacgatacattattgtccaccatagtcaccatactgtgcaatagaacaccacaaaaaagttacaggtgcattagactatatnnnnnnnnnnnnnnnnnnnnnnnnnnnnnnnnnnnnnnnnnnnnnnnnnnnnnnnnnnnnnnnnnnnnnnnnnnnnnnnnnnnnnnnnnnnnnnnnnnnnnnnnnnnnnnnnnnnnnnnnnnnnnnnnntnnnnnnnnnnnnnnnnnnnnnntgtacactagaatttattcctcccatctaagtgaaactttgtatatttgacagatggctttcctttccccattcaccccctaatcccagcctctggtaatcactcttctactctctactttggagttcaacgtttttagattccacatataagtgcaatactgtgatatttgtctctctgtacctggcttatttcacttaacataatatcctttaggttcatgcatgttgtcttgaatgacagaattttcctcttttttagggctatatagtatcccattgtgtataagtaccacattttcttattcatccatctgttgatggacagttaggcagactccatatcttggctattgtgaatagtgctacagttaacatgggagtacagcctctttgtctttttacaaactgttggaaaaganaaaaattcaattcaagcacttctaactttaggagtgagcaagcatttttgtggagttttgcaagtatttttaacatcttttttaaaaagtagaaatgaaaacatgggtacacccacccagtttattgtccctagaggcttgttttacttgtctcagcatcttttcaaacttttttcaagaaatgcaaaaaacnnatagctaactttttcacatgaggcactagcanccagaaaattcgaggcactccattgntgaccccagnagccntgcatttttgcatccccaagtagggnaaatagaaatcctagaatcacnaagcctttgtgatagcaaggggnctgganaagaatccctagggcccactcctcatggaacccattaacaaaattggcaagctggtttcctaaaaccaaacccccccagccaaaaggggttatcctggcttttttcaggg

SEQ ID NO: 415449 - DNA, 2009 bp, Homo Sapiens
  misc_feature (232)..(258): n is a, c, g, or t
  misc_feature (1268)..(1268): n is a, c, g, or t
  misc_feature (1314)..(1314): n is a, c, g, or t
  misc_feature (1697)..(1697): n is a, c, g, or t
  misc_feature (1745)..(1745): n is a, c, g, or t
  misc_feature (1864)..(1872): n is a, c, g, or t
  misc_feature (1966)..(1966): n is a, c, g, or t
  misc_feature (1986)..(1986): n is a, c, g, or t
  misc_feature (1993)..(1993): n is a, c, g, or t
ttatatcgtggggggacgcgagatgggaccggtccggaattctcgggatagaagcaaaaccatgggacaaggggaggtcccagagcacaggtggaaggaaaaggcacaagaatgaccaacagacactccagtttagacagtgccctagaagctggatctttccttagaatgaggaccctgctcagttgccccctcccagtcatgtggtgagtactgggaggaggcaacacgnnnnnnnnnnnnnnnnnnnnnnnnnnnacgccgccgcacacggtcgccgtacagcctcgcgggggggagtagcagcgggcgtacccgccgaggatccgggcggatgacgtacacggcgccgcccggcggcgggcctgcgctccacccgaggggcagagaggcccccacttacagcgggcccgtccgcattggccggcgtgcgggggccgcgcgccggcgccccataacagggaagctaatggggacctcctaccacgcccccccacgcaacgccgctgccggggtctccctactcgtgaagcggcagaggcacagagacaacgcccggaggcgcccaaaacccagactcgaaatgcccgccgaactatctattaaacccacaatacaccaccccaacgcacacccccaccccgcgccctaccaccgcgatcccccgatttgctgatgctctcgtccgccccgtcgctgtcctcgcctcggccggcgtctagttcatcgccgtgcgttggtggcgatcatgtcgcgacgtaccctcgacgacaccgccgacgggcgtcgccctatctgtcacccaaaccgccgcccacctcgcccccaactacggcgccgccgaaccgcggcgcgcgcaccgccacgcgggacgacggtagccactctgcaacgtagcgctctcgctggtacgccgcacgccggcggtccgaacaccgaccccgaacgcgcacacggtgcccgccgcgatcgctacgccgctgctacggccgcgcacctaaccactcgaccactacgcgttagcgcactgacgggagacacgttccgctccgcgcatctgatacctccgccgcgaacgccccggatgcagtgtatacctcgccgatggacgtagctctcaacaccatagcacccactaacgtcccgatccctgccctttcgctcctactcctcttccacaatacacaccatcgcacgtacacccctcccatactgctcgcctagtctcccaccctctactcacggcgcaccaccaccccggcacggcnccgcccaatcgcatgctcgacacagcggcgactcgcagttgcagcntactatctcagctgggggctgaccgcataagtagccaccccatgccgcgccccgcgtattccgctgattgacacgttccccacgccctggcccccgcatccggtgtgcaccgcagcccaagtggcggacgcgcacgccacgaggggacggaaaccaagctgcaagggccgccccccactccatactccggcgcctcagccaggtgcccattatccggacccacctctcacgtcgccgagtctcctgtcgggggactgcgaggccaccgggccgggggccccgggcgggaggagatttgggagcgcggcacttcggcgggttacgtttggacggcgtgtaggtgacggagatcgccgaacccttcgtaaacttttccttcaacnctcggcaacccgaccattccttggcgacgtactccctttatccgtctncacgcccttatcccatccccgcctgtcgcgggcgcggcctttgtgctggcagtaggagcccccacgggggcgctactccggacccccacgagccgcccgattgccgtcccgatcctcgnnnnnnnnngccggccttaaataatcacttggcgagtggaagggcgatgacagccaacgcattccctgctggcccattatcgtacatttaagtacgatactcncccccacccgttgcccggtnttccacntctgcgtggtggtgga

SEQ ID NO: 415450 - DNA, 1214 bp, Homo Sapiens
  misc_feature (722)..(734): n is a, c, g, or t
  misc_feature (750)..(767): n is a, c, g, or t
  misc_feature (772)..(777): n is a, c, g, or t
  misc_feature (779)..(783): n is a, c, g, or t
  misc_feature (785)..(785): n is a, c, g, or t
  misc_feature (787)..(788): n is a, c, g, or t
  misc_feature (790)..(796): n is a, c, g, or t
  misc_feature (798)..(876): n is a, c, g, or t
  misc_feature (898)..(898): n is a, c, g, or t
  misc_feature (952)..(952): n is a, c, g, or t
  misc_feature (1003)..(1003): n is a, c, g, or t
  misc_feature (1038)..(1038): n is a, c, g, or t
aaatgcagactccgtccataagacctactcttgactccactgggctgctgactactcaccctcccctcaggtcatctcctgacccgtacacagttatgtccacccagggtctgcttggacacctgtgcctgatgttcaccaggggccagatgtcgtcctcaggcctgatgtccacctagggcctgatgactgccttggcctatgtccctctgggggccttgtgttcacctggggactgtatccagctggggcctgatggcctactgggtcttgttgttcacctaaggtcttgtgtccacctggggactggtgatcacctggggcctgggtgtccacctgaggccagaggtgcacctaaggcctgagttttcacctgggcctgatgatcacctggggactgggtgtgtgccttgggtcttttcccttttcctgaacagggcttgcagtttcccaaccagacacaatctcccagttggagagacgaacaggcatcctacatgtcagtgacgcccgattcaggcgactcccctcccggtacgaaactgcgacgaggcccggcttcctttaatgcccgcgatgccgccgcccgcccggcttcgtgctctctccatcgcgcgcggcctttctgggttggcccgtgcccacgcccggtcccctgtcgtcgcccggctgggtcgcctgcgcgtggcctgcggccccgcacctcacgaggggctgcccannnnnnnnnnnnngcgtcacacgcgcgannnnnnnnnnnnnnnnnntcggnnnnnnannnnnancnncnnnnnnngnnnnnnnnnnnnnnnnnnnnnnnnnnnnnnnnnnnnnnnnnnnnnnnnnnnnnnnnnnnnnnnnnnnnnnnnnnnnnnnacaaagcacgccccgcgcaccnccacggcggagacagagccgaccgacccgcagctgccggcacgggcaccccgcnccgcacgaccgacaccacgcggtacgccaccgacccgcgccgcgcgtcggnacaccgccgcccaggcccaggcaccgcggcaccgncgccccctccgatcgccgctctcggcaccccacccacgactaccgctcctacacgcgacgccgttacacgcgcacctgtcccccaatcgctgtgtggcgagactctacccgaaactagcgcccgccgcacctgcatccgagatgagcgtatgaagcaaatagaacaagagaacgcc

SEQ ID NO: 415451 - DNA, 1059 bp, Homo Sapiens
  misc_feature (968)..(968): n is a, c, g, or t
gggtccggaattcccgggatggcttccgctaggaatgtgtggacggagtctggctggctttcctttagaattcaagcctgagatgtgtggggaatggagcaaatgtaactgtccttctaccatttgaaacctgagattggagtcaaaactaaggaattgcagcagaaaggaagaaattgggtcctctggtgactattgagtcatgaatcaaaatatgcctaaagtgagaacccacaacctttccactcacgtgagccaggaaattctgtttgggatgagttttctagtatttgcagcagaagaatccctacctgatgcagaaatgacccacattttccagctgaggcaaatagaggcctcaggagattagctaacttgcccaagttcacacaaataactaagacaaaatttgaagccactttgtttcaccttgaaaagctggtgaggaagacaaactggatttttaactgactgcaatatgacaaacatatgtgaaaaaagaaagacacaataggaaaatggagtgaaagaagggcagagagtgaaggacagtgtaattgaggtacaagtttcaatgacatctgaagattatgaaaatctggggttttcctggtgccccatctctcccagtgactcagtaagataggaaatgaaggctaactctgattacctagttgactattttaaactccagccatttatagagcactaattagaaatcatttcaagcaaaacatctgttcattgatttgctgaaacatcaatattggctgtctatgagaataatttgcatttcattgctaaggaaaaaacattagtacctggaaaccaaagaaagcaaatctagacccacgaagatcctcagtttttttcagaaagcaaaccaccatgaaattattctaattaatttgacctttttcactcccggaataaatcaaagcgaggcacctggcaaagggaagtggggntgaaagtatccaggttcataggaagcccttcaacaggggatcctaatttttggaggctcccataattttcaaatttataaccaatttttgc

SEQ ID NO: 415452 - DNA, 1288 bp, Homo Sapiens
  misc_feature (483)..(595): n is a, c, g, or t
ccccttaaaccttacgttatttaagggaccacgggtgggggaggcgggccggtccggaatttcgggatgcgacccaccgcttcccttggcccaggtctgcgaccttccggagcgcgcgccttgtgtgtaaacaccgggacctctgggctccggggaggtttcgtcagtaagcgagcaccttcctactcctcctcgttctgctgctgagccgggtataaactaagcacggaaggcgcccgctgcgctttgctcggaggacccgcttccccagtcttccaactgcagctccgccatctgcctcccggagtctctcttggcgctctcggaccctccgaccctctcaaagccagactcgtcccaccctggaaatcatcgcaaggggttttttggggaggggaggtcccgcagacccggggcgctccgggtcaaagcgggtccggaacattcatccccgagtcaaatagggggcgtcccccgggaacnnnnnnnnnnnnnnnnnnnnnnnnnnnnnnnnnnnnnnnnnnnnnnnnnnnnnnnnnnnnnnnnnnnnnnnnnnnnnnnnnnnnnnnnnnnnnnnnnnnnnnnnnnnnnnnnntctcgagtcctcctttgcgcctccttttctgttccactgccaggccggtggtcgcctgcagcggttagcatggcgttgacaccgacgctcactggggaccacgctcgaactcgcggccggcgagcgttcaccatcggctgtggaggacggcccgactggcgaggccgcgcgaacgaggtgtaaacgtggagcaattgcgtctcggcgttaggtgttagtggaccgggacgactgccccgactcacggcgccgagtggtgcgttactgtctgcacgtgcagctcggtgggtcagacggacaccggtgtgtcgtaggctcgtgccggtagcggagacagcatgcgcgtccactcgctctgcgcgcgcgcgataggtgcggacgcagcgcggcgcgagcgcgggtgtacgcctgcgctggaaggcggagcgggcgccgcgacgacagaggggcgggagcaggagaagaggctgcgtcagtcagtcaagtgtggacatcgtccgggtaatcgtctccgcgtggcttcggatcattagcgtctccgcgatgcttgtacggacggcgctcgtgcgcaccgaggtactaaagatgacgtgacgccctactcgttgtagataactcgagtccatatacttacgatagcggcactacagcaacggggtgtgtaagctgtgagcgccgcgagtgaggtccggt

SEQ ID NO: 415453 - DNA, 744 bp, Homo Sapiens
  misc_feature (540)..(548): n is a, c, g, or t
gggtccggaattcccgggatagtcactgtcaggaagctgagctaggatgtctttagctttgatgactggggtgacttggctcattccacatgtttctcatcctctagtgggctatactgggaatgttctcacagtaatggcacagagaaaggaaatctccggcataaaagacattggaactaagaaatgtgttgattaaaaaaatataggaagtgacagcaggaacacaatactaccttaattaccaaagccatttctaactttgggtgtcagctaatacttattctgcctaggtggtgttctgatttatatgagtgtctgaaagatataatgtctttcccagaggactttattagaatctaatgattcaacttgaatgcagaaaacataaaaatgtgtgtgttcaggaaaggcagaagctggaggtaagttgtggggagacacacttagtgagacagatgagtccaggcctgaggcacctcaacccatccacattcttcttccactattagttttatattttcttcataaaagcaagannnnnnnnnctcagaaagatatatgtgcttttcatgtctgcattctgataaggaaaatagtcaagagaaatcatgaaagtattaaagaatggccactaattgaattactttagacaataaaaatgcagctgttctttgcacccaaatgagtgttaccattcaatttttcaaataaagttaaaaaaggagtaatttttgctcaaaa

SEQ ID NO: 415454 - DNA, 1062 bp, Homo Sapiens
tggaccggtccggaattctcgggatgggacgtcccggaagcgactggctctttttttctggtcgctgcagagtgagggtgtgacgggccagcaaggacagcaacagtcgaggagaaaggagagaatgccagagagatggagcccaaacctgaacccaggatcaaagggcaactgagtagcactcgctctggagttctcggtcggctgcgccgctgacttgccaaatttgcctaagcccgtttgttggtgtttgcaggtcctaactgatgcggtgccatttttcaagtacagaattggataagcgttggagacagggagcagccagcaggtgcaagcacttctgtggatccagtccctttccttctgattctgtctccgtgtacacttcgtatcacaaatcagggtcttgccctggaaaacatctcccgacccctcttgctggcctggcacctgcacataagtgctccagtgcatgcaagattcatcccacaccacagtccttgcgggcatcattactggtgtaatcatggtcaggtgcaggagtcacctgagttcccaagacacttgctccagttggcattgcaccaaaatccattacaggcgttctcagctcctgcgctcccgctgactcaggccaccctcacggtgagaatgcagcagactaggatgatcaggcagtgtttcaagccggccctggacctggagaggctgttgatggtgaggcacagtggagatgagcccagctagggcagggttgggagagcagcctggctgagggttgagagcagcctcaagcagctggtgtggtgcaagcatagactggctgttgtttgcatgagcaccggctttggagtcagtcccaagttctagtccagagactgaatcttttctagctgtgacattgagagctctgccctcatttctctgagcttcagctttcttgcctgctaaatgggctgggtgatacccacctctcaggaagctgggggagataagaacagtctgttattagggacatgcacaccaatccctattggtgacaccgggaccagcccagggtgg

SEQ ID NO: 415455 - DNA, 167 bp, Homo Sapiens
ttgagaccttgccaggcttgaagtaggaaactccccttgaaacccaggaaaatacagggctacaggggaacccatgattcttgccacctgctttttccacccctggggtgggaaaaaacaaaacactgttctccaaaaaaagggaacaagccatcaccccacccaaa

SEQ ID NO: 415456 - DNA, 1113 bp, Homo Sapiens
  misc_feature (848)..(848): n is a, c, g, or t
  misc_feature (1054)..(1063): n is a, c, g, or t
gcgtccggaattcccgggatccggttttagaccgggaggtgagtgagagaagagaaagagggaggaggcaagtaaaaagggagggggcaagtaaagagggaggaggcaagtagagacggagagatccctggaggccacgcccgagctgccccagggcggatcgccggcccctttcgaccgctccctgccctgaacccctctatgctcaggtcgcatcgttcctccgcctgggcaaaggcatcgagggtaccgcaagtgcgcccacccggcactggggcaaccctcgtcgttggcctgcgccctgcaccccgcgcctcgctcccagacggtcgccccgcccctaatccctggcagtccttttagggtcctggtttcccgctcccacgggcccccagagtgcacctccagtggctactgcccagtggatttgcgttccccgaggctactcgcgtttcttctttggttattcttcctcatttccaacacaatgatgagggtctcacgcaggcgtccagaagactgaaataactaaaagccagctggggcccctagaccaatgcttgaaggtgtccctgatgtgtggcatgggagaattgccaggtatcctcctttacccggtgctctgttctcttccaatggccaatccccagctggcctcccactggatttctaaaacgattcacctttcatcaacacatggggctgtaaagatgccaaacaactcagggaagaccccccaagaaaaagtatcatctttgagaccgtgggaaaatgctgcctttcagtgaccaggggatattttcagcttattaatcaacatatggggatccttaactgagggccacagncctccagggggtgatagcccaaggaagctcccccgcattcagcaagctattggtcacccttaggggagagaaccaccagccccagggggggcatggaccacccaaaagggtggcctaactgtcccaccggacttggttttttctcacctcatagaggtccaaccccctggctttttggggaccctaggggaaccttccgaaaaaannnnnnnnnnaagtttgggaaccctggcccgggggggcccctctggccctgaaggggagt

SEQ ID NO: 415457 - DNA, 1224 bp, Homo Sapiens
  misc_feature (230)..(239): n is a, c, g, or t
ccctcctctccctcgcgcccgccggggcctcgcgcccgccccgttggtacggtccggaattccctgcatcgcccctgtctcccagccctggtgcatccccagccccatgctccagtcttctcacggtccttgggcatatcaaaacgtctctgagcctccatttcttctctgtgagacaggggtgaggattacttgagaaaatgttcagcatttctgtgtgtaactgtcgnnnnnnnnnnccagagcttagttttcctctgtactctgtctttcaacacttttaatctggactctagctttgccgaggcaaaggttctcagaaaatctataaccgaaacccctaactttatactcgagcaaactgggtccagaaagctgaatgatttacacacggagctactgcgagaggagaattggcatgtaggtgtcccgatgtccaaccttctgccctttcttccgtatcacaatcacgcagtcctggggcctctccggtggagcctcttactatcattattctgagtacttctgatgctaactggtgtcttccccttcctcctttcctttcaacaacatttagtgagcacctgttttatcctgtgccctatactctggcttctgttagagaaccttgccttacctactgtacagtattaaatacatctttgacggtggctcaattaatcccatttattcatatatttactgataagcaccttgcctttgtgctaaatcctttttaaggaggccgccaggaaaacaagggggacccccataatgacctggtcccaccccacccctttaagggagttcggccgaatcttggggatccgggggattccttcgcccctggggtgcggaataaaccaaccctttccggaaaaaaggtggtacgtggcccacctcatcaaactttctgggagaaccccttacctggggccggtttggggcctccggccattaaagggcaatggggaaattcaaaaacggagggggttttaaatccccggggtccccctggggcccctcgaagggaaggttcccccgccccttaattgggtgccataaactgaaaaccccctttccccggtggatatactcccccccaacggggggttgggcaaacacaaattggcctctaaaagtcggggcgaaaacaatgggcggcctttgggaaaaattcccccccttggggttttaacaaacccaaccccccctctttttacg

SEQ ID NO: 415458 - DNA, 1278 bp, Homo Sapiens
  misc_feature (341)..(341): n is a, c, g, or t
  misc_feature (481)..(636): n is a, c, g, or t
  misc_feature (646)..(703): n is a, c, g, or t
  misc_feature (1229)..(1229): n is a, c, g, or t
cggaattccctgcatgccagagaattaagaagcctgtgccgtgtcacagagctccctaggggactagcctttgctctgtaagctctcagccctgctcatagtatgcctccaacaaggctctcacaatttaggaaagtctgctttggaacatgtgttatcttctctatacttacattctttcttaatctgccatgactttctctcctcatcaaaaaacagcctttaatctcctacccaaatccacctcgtacctgtgagtcttcaggtgtgttacactctgaacatggtcccgtgagagaatttcttattaaaaattgagcttgcacaaacacacaacaccnaccccccccgcctaccctccttcgttcccccacaccatcgtctcctcctccctcttccgccttcgcctttcccctttttcccctctcgtttaacctcccatcctccctcatcatatccctccacccattacgcgtctccnnnnnnnnnnnnnnnnnnnnnnnnnnnnnnnnnnnnnnnnnnnnnnnnnnnnnnnnnnnnnnnnnnnnnnnnnnnnnnnnnnnnnnnnnnnnnnnnnnnnnnnnnnnnnnnnnnnnnnnnnnnnnnnnnnnnnnnnnnnnnnnnnnnnnnnnnnnnattccacctnnnnnnnnnnnnnnnnnnnnnnnnnnnnnnnnnnnnnnnnnnnnnnnnnnnnnnnnnngtaccccttcaccaccttctccggccatggctaatccgcccactccccctgcggggatacctgtctctccccttccctattcgcttgcctgtgcatagacccctcccccctttcttgccatacaccgcctgttactcgcaccttacctcccatttggcccgcccgtttatccacgtcccgtcattcccctattcgccctcccaccctgtttgctccccccgttaccctctaaattaaaaatcgccccccgatacaatttcctgccccgtccgcgatgtcccacccgtattccatcgcctcgtccgcataattcccccaccgcgtatccaccgcacacgttacgccacttgccgcgtatactcgctcgccgcctgttgtcgcaccaccaatgtgcggtgtagtgactacttagtccacccgcccatcttgtttttgttttgtctcccgcaccaccccgctacacgcccccccgcgtgaagtcgcccgtcattttcgttcacgcgatagaaacaggcactggcgtgcnctgggggcttgtgacccctgtaactatctcccgctcgctactggtggtg

SEQ ID NO: 415459 - DNA, 1097 bp, Homo Sapiens
  misc_feature (240)..(263): n is a, c, g, or t
  misc_feature (287)..(556): n is a, c, g, or t
  misc_feature (825)..(825): n is a, c, g, or t
ctggaccggtccggaattcccgggatgcgccttcctttgcatggggcagcccgccatgttgtggcgatgggagctatgtgtgggtgggagagtgaattggatcctaggagttgattgggtcgccaggatgaccctgggcctgtctgctgccctcccagctcggctgtgtcacggggccacctgtgcggggctcatttcccaggaaactccaaatgtgttagtttagacaacattgtacgnnnnnnnnnnnnnnnnnnnnnnnngagacggagttttgctcttctttnnnnnnnnnnnnnnnnnnnnnnnnnnnnnnnnnnnnnnnnnnnnnnnnnnnnnnnnnnnnnnnnnnnnnnnnnnnnnnnnnnnnnnnnnnnnnnnnnnnnnnnnnnnnnnnnnnnnnnnnnnnnnnnnnnnnnnnnnnnnnnnnnnnnnnnnnnnnnnnnnnnnnnnnnnnnnnnnnnnnnnnnnnnnnnnnnnnnnnnnnnnnnnnnnnnnnnnnnnnnnnnnnnnnnnnnnnnnnnnnnnnnnnnnnnnnnnnnnnnnnnnnnnnnnntaaaacaatcacgtagaggggaatgtagaaggcaaattgtagacacatccctctttatcagtaaaagctagctttgaatgaatatttatggaaaaagtcacaaaggacaaggaactgaatctgactatgagatggaatcacttcctgagttgaaaatttacttttgaacatttaatctcatctaattcttcattccttgtggcaagactatttttgccccctcagctttcaggtgaccaccctgcccaggcctgtcccccccatctggngggtcagtgtgagacacaccgtcatttctgctggcctccccttctaaacccagcttcaactaattttacctcccggggggtcttcccccttgctttgaacacccaggtcccggttttcaggcccttttcccctgggctccttttaaggcaaaaggctacccctccttgccttcttttgacaggaacccttttttattgcttgtaaaaaaatggttactctggctttttccaaagggaaaggatggtccccccttgtaaccgaaaccgttcag

SEQ ID NO: 415460 - DNA, 1004 bp, Homo Sapiens
ggaattcccgggatcccacctttacttcagcgcccccttcgggaagtagcaggaactgaagaagactgagaccgtatctggaccctaactcaggcacatgctgatacaattcatcaccaggctcctgcgcagcctactggtgcagaggcagtccccaaacaggaccccctctagaattatcaagacggggcttctggacgccgccatcgagaccacatgattgtgtgtctccttgcaggactcaaaaagggtgcccataaagcagtcaactatgaaaaactttcagaaatcacccaaggtcccgacgaaaacccagccctttttctctgtcgtttaactgaagccatgagaaagtataccaacctagacccagccagcccagaaggaaccactattttaaaccttcgattcatctcccaatccaccccgatacctggcacaagcttcataaggttgacaacggccctcaaaccccacaactagactttcttaatttagccttcaaagtctttaacagtcatgataaggaaagtaaaaggcaaaaacagggagagtttcaaatgcttgcctttgccatcaggggccctgcaggctcacggggctgtggctccacacggaagcctcctggtaatccacctccacctggcacctgtttcaagtgtggcaatgtaggccactggtccagacaatgcccaaacccggctaagcccaccaggctgtgccccctctgcagaaaaccccactgggagttggactgtaagcggcccctgtaaggaccgcccccatcccttcctgagccagccaaaaacctcctactctcattggccttgctgctgaagactgacggtgccctggaatggatgccccaggcactaacatcgcttcatccgagccaaggttaacccctgatgggggcagttaaccgccagaacatccagacgatgcttcctgctacaacgaccggatgggataaccaacccgtcttttcaagaatacgcccaaaa

SEQ ID NO: 415461 - DNA, 983 bp, Homo Sapiens
  misc_feature (138)..(243): n is a, c, g, or t
  misc_feature (692)..(703): n is a, c, g, or t
ggagctgttatttccattcacagataagcaaagtgaggctcggagggcggggacttgcccaaagccacaaggatgaaaggacttttccagttgctaccagactacgcactgtcgcctgatggttaagaactgaagctnnnnnnnnnnnnnnnnnnnnnnnnnnnnnnnnnnnnnnnnnnnnnnnnnnnnnnnnnnnnnnnnnnnnnnnnnnnnnnnnnnnnnnnnnnnnnnnnnnnnnnnnnngcgtatccgaatgggctgagctaccggattaagagggacaccccaaagcccccattgctgggttattgctccagagccaatgttcttggggaaaggaagatatgccctttgtcaacattgccactgctggtctgtaaactcctagacggccagctggtggttcacaaaccaggactccttgctctggccctacccctacctaccagaatgaccgtgaacccttccccactcactcctacaaccaggtttccatctcctctctcagcttaggtttccctaactgtaaaataaaagggttggactaggttaaggacttcctgctatttctctctcccacactctaaggttccttaggaatggttcagaaaacaccaggggttggggcaaggatggcacttgagtcccagagccactcccatttctaggtacataaatttatggtgaagtannnnnnnnnnnnaccaaattataaaaaaagggcggccgcttctagagtattcctccgaggggccccaagctttacccggtaccccggcttttctggcacccaaggggtccccataagggggcccgtacttttacgctttggccccggggccccccgttttaccaacttcgtggtctgggaaaaccggctaattttggggatcctcctcgaaaggacccttaattcctgtggggggcgcccatattgtggacgaccttcctctaccggaaacttcaagccttctcagaggcac

SEQ ID NO: 415462 - DNA, 1190 bp, Homo Sapiens
  misc_feature (223)..(801): n is a, c, g, or t
  misc_feature (805)..(862): n is a, c, g, or t
  misc_feature (1019)..(1027): n is a, c, g, or t
  misc_feature (1072)..(1081): n is a, c, g, or t
ggtccggaattctcgggatggactacagatgagcagactgagacttagcagagggttaaataacttctcaaagtccacagctaagaagtagtggagcttggatatagtgccgttatctgagtgcagagcgtatcctcctaaccacatagtatgatgccttccagactatgccacagggctaatgagacggttggtaggaccagtagtggagaaagggttttgnnnnnnnnnnnnnnnnnnnnnnnnnnnnnnnnnnnnnnnnnnnnnnnnnnnnnnnnnnnnnnnnnnnnnnnnnnnnnnnnnnnnnnnnnnnnnnnnnnnnnnnnnnnnnnnnnnnnnnnnnnnnnnnnnnnnnnnnnnnnnnnnnnnnnnnnnnnnnnnnnnnnnnnnnnnnnnnnnnnnnnnnnnnnnnnnnnnnnnnnnnnnnnnnnnnnnnnnnnnnnnnnnnnnnnnnnnnnnnnnnnnnnnnnnnnnnnnnnnnnnnnnnnnnnnnnnnnnnnnnnnnnnnnnnnnnnnnnnnnnnnnnnnnnnnnnnnnnnnnnnnnnnnnnnnnnnnnnnnnnnnnnnnnnnnnnnnnnnnnnnnnnnnnnnnnnnnnnnnnnnnnnnnnnnnnnnnnnnnnnnnnnnnnnnnnnnnnnnnnnnnnnnnnnnnnnnnnnnnnnnnnnnnnnnnnnnnnnnnnnnnnnnnnnnnnnnnnnnnnnnnnnnnnnnnnnnnnnnnnnnnnnnnnnnnnnnnnnnnnnnnnnnnnnnnnnnnnnnnnnnnnnnnnnnnnnnnnnnnnnnnnnnnnnnnnnnnnnnnncttnnnnnnnnnnnnnnnnnnnnnnnnnnnnnnnnnnnnnnnnnnnnnnnnnnnnnnnnnncactttttacacttgtttggtggggcaatgtaaaaattagttccaccttattggtgggaaaaaaaggtgtggggggattcccctcccaagacccccagagaacggaaatattttggtgtggaccccacacaattcctatatgaactgggggtataannnnnnnnnagggaaaattataaataatcttctatttttaaacaaaccatgttnnnnnnnnnnttggtttccccctggcgagaactattttccccaaaccgggacaaatattttggggaattccctactctcaaagggcgccccctccaatagcgaagagcgcgtgggacat

SEQ ID NO: 415463 - DNA, 1217 bp, Homo Sapiens
  misc_feature (264)..(345): n is a, c, g, or t
  misc_feature (521)..(529): n is a, c, g, or t
  misc_feature (573)..(582): n is a, c, g, or t
  misc_feature (739)..(747): n is a, c, g, or t
  misc_feature (817)..(859): n is a, c, g, or t
  misc_feature (1023)..(1031): n is a, c, g, or t
ggtccggaattcccgggatctggaagcataggtaggttcctccccaagaccatttgcctctctactatcctggaagaagcctactaaagaactgcagaaagagacactcccttctgcccagctacagggctctgtactccatagcatcaacactgctgaggaaaaagcagctcccaaaactgtccgtgttgcaaatgtgtttggtgcggtaaaaagtctgtggcactgacgcactgtgccatattaaagcctgaagccaaaggnnnnnnnnnnnnnnnnnnnnnnnnnnnnnnnnnnnnnnnnnnnnnnnnnnnnnnnnnnnnnnnnnnnnnnnnnnnnnnnnnnggggcggcccctttaaaaaatcccccagggggcccaattttaccctaccccactttttttgaaaaaaggggcccctatagggaccccatttaaaactaaggaccgggccgcctttttacaaccccggaacgggaaaaactgttatttgggaatttttgtaaagaaacttaacttcnnnnnnnnnaaatattgggacaaattacccccgaaatttaaaagccccagggnnnnnnnnnnttttttaagggaaaaaggggtaaaaacaaccccaatagctttgctcctttgaaattttcccctcccgcaccctgttttttaaaattttttatcccccggcgagcaagggtttccaaatgggttggggaatttttaaaaacccacaagccccaagggnnnnnnnnnatggggccccccccaggcctctacaaagatctggttttcatgaaccacaaaaccggcccctacccccccnnnnnnnnnnnnnnnnnnnnnnnnnnnnnnnnnnnnnnnnnnncaacaaatcttccccccggggacacgtgggaaacctctaaaagtgaccccccacttggtgggtggaaaaaacctggtgttaattgggcacccttttaatagggggctcaccaaacaagaggaatattcgccttcccaacaattcctccacaaaataaaaaacannnnnnnnnccccccggcatttctcacggggggggtgtttgcccccacaccccctccagaggtgttctttaaatcatgggtcgggagataaaataccggcgctatataaaaatgaacaccccccactcaccttctcgcggtgaaacatacgtatctttctctcctcatatatgcgccggcgagacaaatacacac

SEQ ID NO: 415464 - DNA, 1109 bp, Homo Sapiens
  misc_feature (1077)..(1077): n is a, c, g, or t
ggtccggaattcctgggatggcctgggggcagtggacagcggagggcaagtcaaggaaccacactgacagtaatcaccctggcttcagtgtttccatgaagtgctcttagatgcaatgattgtgaagtgggaaaatcatgagtggccacctgggcgagcctcactggccgacatccctgcatctgagcatctctgcggttgctactgtccggtaatttcggtctgttccgggcacctggatcaaagtcagaggccctccctcagggctcctcttcaactggcctccgcactagggtcctatcttgggcaggatcctggaggctcacccgcttcttcccaggatggaaaagtcgtctgggctgctagtgtctgatgaggaacttgtttgacaggtgagaggcacagagcggatgagtggattcacgtggaaccaagagttcccaaactgcctgagcctgagactcaccagttcccaaaccgcctgcgcctgagactcaccggttcccaaaccgcctgcacttgagactcaggggttcccaaaccgcctgggcccgagactcaccggttcccaaaccgcctgcgcctgagactcacccggttcgcaaaccgcctgcatttgagactcaccggttcccaaaccgcctgggcctgagactcaccggctcccaaaccacctgcacctgaaactcaccagttgccaaaccacctgcgcccggaactttactggctcccagaccgctgcgcatgagactcgctgggggcgttactcacaacgcaggctcctggggcccctcaaagactccggtgtcagcgagctcatggcgcccacctcaagtaacacctggcctccggcactgattctcaacccctggctaaccacctaaaatttactcaagggacctttttaaaagtatcaatgccctaggaaacaaccacaggtaaattgaataaaaaccttcggaagggaaacttcaaggacttggattttccctaaaaatcttcctaaatggattccaattttttcagccaaattccagcaaaggctggctcaaaaatggaaaattaaatggatggggnttaaaaacccccgggctggggggaaccccccc

SEQ ID NO: 415465 - DNA, 1213 bp, Homo Sapiens
cgcccggtccgcgattcccgggatgcctggggtccgcccaaccccaggcccactgcgtcctcaggggtggtgcctccacagctgtttctccttagtcatttcacgaacttgtatgggccccccactatatctcaggcctgggggtttaggagatacagcggccaccaagacggaggcgggtcctaatcaaaggagaagacagacaagactcaaggaaacagctaatagacaaaataatgacaagttatggccgtaagtgttgggagggacatgattagaggacttagatggagaagaagggaagggagcccctgctccaaacgcagtggccgatgaagacctggaccccgacctgcggccagagctcctcctgcctgtcctgcattggggagacaaccctgcgatgaggcctgtgaagaagcccccggggccaccggggcaagacggtctggtccggcctgactggccaagacagcaaagggctgctgggcccataagctcagcaacacggcgcagccacgttggagagaagggcagagctaccttcagcacacaaaacgacccatgtaaagggctctggggcctggaggagctcccatcccatatgacactggtgctggtattgttcccccttcccccaggaaaggagcccgcggctgcattaggacgggatcatctccctaacacccttaggactaatctgctcttcccattcgtaccccttccgttccaaactacttttccccttccctggctaacccaacgcccctggttcccctttctggtgtggacaaattcaccagcgatgcttgggttttcaccttttttccacccaaaataagcctctgggcccttataaacttcacttcgggcctctcccgacttgccacggttgtgccaccttatactctcgaacgctgaaaactggttcatcactatgaattacttccccgcccgacttttccggcacgctcggcactccgagttcccgtaaagcctcccaggtcggagacggcttaaatacaaagaggagctagttggctgcgtttccaccgatgtcaaaatatactaattcaccaaaccgtccactacaccatgcttcctctatctccgtgcactgcccacatgtggttgctctttcgtccgtcttccgtcctctgctctctttcgtaccgccttgtaccgaccgcctcccaactgtctccacacataa

SEQ ID NO: 415466 - DNA, 1073 bp, Homo Sapiens
  misc_feature (795)..(795): n is a, c, g, or t
  misc_feature (893)..(893): n is a, c, g, or t
  misc_feature (1028)..(1028): n is a, c, g, or t
gggtccggaattcccgggatgaccagagaggcagttcatgtagcctcattagtaaagcccccaggggctgtgactgtcctgcgcgggcttccaagtccacctgagagttctgatgctgtgctgaccccatggcacatcaggggcagcgagcctgctgtccacactggctgggagaagcagcagccaggcaagagaacaacaaacaggggcaggcagccacccaccaagaggacatgtggaaccaggcagcacgccatttggaaagcaagtctatatgggagtggtcactatcatggaaaggaaaaagaatgggaaaacctgagatttaagaaagacccaatgctgttctagaagcatcttcagaaagagcaataaagcttctttggggaagtcacaggacacagactctccagggtggaagggatcttgaagagcacagaggccaagtcctcatccatctctcgacttccttcatgactcatctgaagacggctggattggtctatgtctgtaccctaccctcaccccacaatcccagtccaccctatctcagaacaatttcaaatgcaggggaggatcagagatgaagatgttactccaaaagtatacatgcaaagatgttctggaagtgctacttcttaacttgtctggtcttatagtctgtggttgaagtgagtttctccacttctagaacgctttaggtcttgtttcctgtcctctttgaaaagttttattaataattacgtgctgcccttctattactcctactttccacaccctggaaagtatacacgngttctagaatattccattaagagggccagtttctgtattactagtttccaccagagttcagcaacaagatttcaaggacttttctttttaacgatctngaaatgaaagatgactcatcatactataggtgccctgtatatgccttcaaaataatgtggtttttgctcagttcttgtgccttctcggacctcctgacaacataggaataaacctacgtagaaggctatctcacnaagaaatgattggggcaccgaaatggactcgactgactctatttc

SEQ ID NO: 415467 - DNA, 610 bp, Homo Sapiens
  misc_feature (509)..(509): n is a, c, g, or t
gctcagagacaagtggtggaaagtgaaaggaggatgctcgctttctaaactctccatcacaagctgagttttctctgaaagaaggaggggaatgagggacacctgtattccctgtctttcagaatgggcaaccagttctcttcaccacccccatcttttactcttcgggagtgtgtcctgaacagttgggactgtttgactttcagaatctggatgaaaaatggctcatagccctctgcacaaatgtttcgccaaattatgatttacaggaaggactggtttagcctcagaaagtgaccattcattttgataccatctggcaattggaacttttctgtagatgtgaggacggatggtctgaggcctcagctttctataccttgcaaggctatccagacctttgtccacaatgtaggaattgttcagtcctcctgtttcccatcttaggaagggcagtaaggggcaagccccagggatttaaaaatatgagtcccagaagcactcccagnaaagggaccaagctcccttccagccctgtctcctggtcccccaaccttccctatttaagcttcaacttcctcccttgcccccctcctagaaatcctcccgg

SEQ ID NO: 415468 - DNA, 1070 bp, Homo Sapiens
  misc_feature (1019)..(1019): n is a, c, g, or t
gggtccggaattctcgggatgcttgtcgggtgttagttccgggcccagcttgggctggtggtaggtcgggagagggcgcggtctcccagcctttgcgcagattgcggggcaccaggtggggccgaggcgacgccgaacgccggcaggccggaaaccgcgcagccccgctggacctcgctgattgccggcggcaccggtggtttcgcgaccttgaacaggacacctaacatgatgcagcagaatttcttctaggaatctaaagggaccatatggagcaagttatattcaagaaaaacaggactgtgaggcttagagtaccagagaggaggcaacaactgcaagtacaaaaagtcccatttggcaaaagaaatatgaagagcacagtgtcctgcaccaggctccattacagcctggagtaaggcgaagttgttggggaaatcagacagcagggagaatggggccactgcagcccctctgaccttctttccctggactttctcaacatactttcctgctctgctgtcattgcagctgcaggtactcactccagggtggcagccaggggctcaggtggagctgggccccacacctctgcacattcccgacctgaaaaccactccaggctcccagccttgactatcggttccctgagggtcttggacgctgccccagcacagggatgtcccttctgcctgggaaccaccagaggcaagctccaaggatgtagtttggcaccttcttacaattaattggttttggaccacttgggaaatttagaaactgctgaggtgaacctccaatagaggaagtctggcatggttctgtgcctgactgtgcccgattatgcctcaaatgcctcttaagccctgatgatgggtgttagtttcttacaagggtgacatgcttctcagagatgctcctggcaccttctgcatcattaagcgagtttggaggaccaagtacaggttacttttggaacataggatcctctctcccctggcggtttgaccgattttccnaaattaaaggggaaggacctagacctatcccaaccatgggactttccctta

SEQ ID NO: 415469 - DNA, 1069 bp, Homo Sapiens
  misc_feature (849)..(849): n is a, c, g, or t
  misc_feature (892)..(892): n is a, c, g, or t
cggtccggaattctcgggatgtgagctggcagtggcgtcagttgagtcccctgaacccccttgggcctggagctgctgacctcagctcacgtgccctaccctttgtgtgtgtcctcacccacccagtggagctcacccacccgctgcccctccccctgccgcgacactgcagcctccgcctgtcctcagagcatttgggaggcagccaccgggatggcctggttgtcggctgggatggcagggaccaggtgctggtctcctcctccctgtggctggggaagagtgagctggccgcccgcctggccctggctcacccattcaacctcccttggcggcaagccgaggccagtggccttgctgagagcaggggtggcaggcagagccggcaggtgcagctcacctggaacagaggacaacctgcgacgctgcagctcacctgggctgacgggtccttagcacacagcaccgcctgggacggctgcctggccgcctccccggggcagctccaggaaacctggggcctgaacagcctccaggcctgcggggccttcacgcagaccccagctgtgttcgttgaacagctcaacgtgtcctggggccagcaccgcatgcggcagaacttgacctacgagaggcattggccatctcagccagacaagatcatcatggaggccacgctggagcacgtcctcggggcctcttgtacccgtcagagcttctggggagaagtacagactgactatgcacgctggctgcggcactccctccacctggggctctgtgacctgcccagggcccctcttggtcgtccgggagcacaccctgggccagggtggactcctgctgcgnttccgctgcccactgggccttgtcacagacccagaccacgggnctgcatctcagcctgaccctccaaaccacagcaggcctcgttcagctgacttctcgggggcactgggagtcaatggccaagatggggctgacagtccctggggaaagatattccggcatccttgcgggtccttcctggccaggaggcccccaaaggcctgggggggcccgccatcta

SEQ ID NO: 415470 - DNA, 1084 bp, Homo Sapiens
  misc_feature (350)..(358): n is a, c, g, or t
  misc_feature (887)..(887): n is a, c, g, or t
  misc_feature (994)..(994): n is a, c, g, or t
  misc_feature (999)..(999): n is a, c, g, or t
  misc_feature (1011)..(1011): n is a, c, g, or t
  misc_feature (1017)..(1017): n is a, c, g, or t
  misc_feature (1020)..(1020): n is a, c, g, or t
  misc_feature (1039)..(1041): n is a, c, g, or t
  misc_feature (1043)..(1043): n is a, c, g, or t
ggtccggaattctcgggatcgggcaaggaaacacaagctggcttacaggtggaaacctgagagtctccagagaggacccatgacagagagctgagacatggatggacacgagccccagagagacttcaggtaattcttctcttcaagtaatgcctccccaactagtacattctataaggatgaggatcatatcccttcatgctcaccactctatccccaaagcccaacactctactgcttgactgagagcaggtattgcagaaagaacaaagagagaggaagttgggcactccataagtccattagccttcatcagaggtgaacctcccaactcaatgtttgacatgtgnnnnnnnnngcagatctggctggagcagattcagaaaacctcttatctcccccaggcggatgatgtgcccaccgaccacatcagccacgaaacccagctcatggcacctggagctgatgaatggccctggtgctgactgcccagaaaccaatccggaaaccaggcttcccacagaagacgcagctggagagccaagcactcttggactacagtcctaggctggagctgccaatacaggctctgcccagctaatcttctctgagcctgcaaatattaaacctgacatacagactcaagtgaatccagaaaacaggctcacagggcagctgaaaattccaagtgcctaagtgagatccagtgcgacagtggagcatgtgtgcgcagaggagacaggaacaacaaccgggatgtcatgcgggcccactggggctccttgtggccccagtgcacagaattctggtggacccaccatgtgtgggagctcagtgagactcaaagtaagtgcaagggccctcctcacacatcgtacgcttgaggngggagcacactgggaaaatgtgcatgcatcaagaaggaaaatgaaactgattttgtggcacatttccactgttcttggaagaatgaaataatgcatatgagctatgnaaaanacaaaaaacaanaacacncanaaacacacacaaaacaaannnanaaggggccggcgctctaaaagatccctcgaggggccaaatt

SEQ ID NO: 415471 - DNA, 1085 bp, Homo Sapiens
  misc_feature (909)..(909): n is a, c, g, or t
gggtccggaattcccgggatgtaaactggtcagttataaactttgctgcaggttcctgaaaaaaactggatgagcttctcctgctgtcttgttctatgtccttgggagcttgaccttgtaaccatgtggcagtattttctattggtctccaccataacaatggcagtctaggttcaggattccattcctggcttagggaatgagtccctcattttctgtctgtctgtgtatttacatgtgttgtgtgtgtgaaatgaaagagctttgattaattggtttaaaaacaataagagctaaaatcaaatatttttgtgagaaaagtaaaaagtgtaatgcctttcagttcatgagactttagtaatcttgaggaaatagaggcagttttaaagattatcggttaaataaagctatcttaaaaaatataaacatttggttgaaatgagacagatcagatattaagtttactaaacactttaaggtcacaaactgcttctttgacttttgaaaattattcaattggctgactttggagcattagattctagataaggcctagggacatgtggagagccttgccccttagctatgctggaaagagtcagcccttatctgtacttctgtctgatgtcctaggcttcacacctgggacataattaccatcacttactaaccaaattttcaccaaaagtaaaagttgctaagagttaacattgtaacatgtagttgagactactgaagaaacagttttacatgtaagacatgtaaggaaagtagaatatattttggcctagagtaaaaggttaaaggattgttttaagtcaaatagggtaaagctgaaagtttgagcaagttatgaaacattcgtaggaaagttaggaaaaattaaacttgtgaaaaagaaattctatngtgtgaatgtgttgggctaaagttaaaaggggtatttcagtttttcccataattgaatattggaatgaaagtacaacagggtttttcctaaagaactgatcttctctttaatgaagaaatttccaggggttatagaaaggttatgagcagccataaatgttggaaaggttccataa

SEQ ID NO: 415472 - DNA, 1085 bp, Homo Sapiens
  misc_feature (275)..(343): n is a, c, g, or t
  misc_feature (1033)..(1034): n is a, c, g, or t
ggaattcccgggataggacacccagagaggggcagcagagctgactgatgtttgaaggacagtccagagtgaagagaatagaacagagcttattatctgacattggacaagcgttaatcactttctaggcagttccaatcttgggcatagagagtgcaaagccacaaaatgtaaaccaactcataacaaccttcttgctccttgttggcacacagtgagggccagtccaccagtcccacctcttccgattctcaggtattttattattatatttnnnnnnnnnnnnnnnnnnnnnnnnnnnnnnnnnnnnnnnnnnnnnnnnnnnnnnnnnnnnnnnnnnnnntgctttatattcccaagcaattcatatcgactcaaactcgtgttcttaattcaaaagaaaatctctgcaaataagcagaccctccttgttagaagatggtttatttaatggtactggagaaagccctgatgactagcaaatgattcctcccattcacacacattcctctcctggtaagaagtcctattaatgactgttttccccatcttatgtttccagtgatttttaacatccactgtagactgatgtcccacaccttaacctagtggagggaggctccagtacacgagggattgtaactggcactgctagggtcacctgcagcctgcagataggtcttgcttgccttgcaatgttcataaaatttttaaaatggtattttgacatttgaaaatttggaggattttatattaaggtctagattttgctttaaaagtctcctgaaaaatcttctaatactgggcttataagtgagtagctgcttcctactttaacatgggcaaaatctgtccagttctcatctaggtttgcaacccggcattgttctgtcccatcttttgctcacaaaaatgtagctcatttactatttataataatccggcagaaaaaatattgggccctctgctttcatactatctctgccataaggagaaattacatttatccctatcctacctatggaaacttaannattgggaaaattttttttggcggattccttccggggaattttcctccttaa

SEQ ID NO: 415473 - DNA, 807 bp, Homo Sapiens
cggtccggaattttcgggatgggctgaaggcttttgaaatctaatcacagtagaattgcctgaaggaagtgagagtgtatagcctgatgccgagaagaaaaagcctgggggtaacatacagagaggcccagcaagcagatttgagagattgtgctctgtacttgtgcaatctaattgtgtcctgttagaaaggagatgtcctgggaaactcaaattaagaggacagaagcccaaaactaagctgtacagtcaaaaacgtctagctgtttcttgtagcagattgtgccagtaagcgtcactgaagagtaatttcaagggctggtgaaaatataagataaaacactgattacaggatgacaggttttctctgctcaacaatctttgaattattcagaaaactttgcttccagagtggtatattaataatacacctaagcaaatattttgttgcttaagctgaaaggcattttctccttgaagggaaagcttctgaagatggcagtagattaacatacccaaatatcttgatatcctcaataggaagaaagtcaagttaagtttcctgatctaaagagtccaggaaattaaattctctctatgttctgtttctgaagtactgcagaaactgctcaagatggaaggataccagagaagaaaaacattgctcaatgtttaaaacttattttattttttgaaaaaagaaacataataacttagtccaaaatcaaacaacataaaaagtatacattgaaaagtttatcctcaccctatctacttccagcaatttccttccaattctatctggag

SEQ ID NO: 415474 - DNA, 1351 bp, Homo Sapiens
  misc_feature (23)..(23): n is a, c, g, or t
  misc_feature (33)..(33): n is a, c, g, or t
  misc_feature (82)..(83): n is a, c, g, or t
  misc_feature (770)..(808): n is a, c, g, or t
  misc_feature (870)..(928): n is a, c, g, or t
  misc_feature (1118)..(1130): n is a, c, g, or t
  misc_feature (1194)..(1203): n is a, c, g, or t
cacccacactgccccccctcgcnctctcgacgncgtgtaattatggaaggaaaggattccctgcataaaggggcggggccgnntcgtcttcgcacccacaccccaggggcctcgccggccgccgcgccaggagggcgcgcggtggaggcgcgcagggcaagtgaggcggcgccccccgcccctgcggcctcgcgcgccccctcctgggcgaccgacctcgccctcgcgtccgcggcgtcccctgccggccgggcggcgatttgcaggtccagccggcgccggtttcgcgcggcggctcaacgtccacggagccccaggaatacccacccgctgcccagatcggcagccgctgctgcggggagaagcagtatcgtgcagggcgggcacgctggtcttgcttacagttgggctccgattccataggctcagaaagcgcgtctcagaggagtcagagaagaccgattaacagacgacagcgctaaagcccggatcccctgaatcctggatgaaagcgtcctaaactagacccctgggaagaaaattctgagacacatgctgcacgatgaatattagggcccaccatccgggctccacacccaccgaagggcgggggagcaagaaacccaccccgacgcacctaaggcgagaacgctccccaggccaggactctcggcctgaaaccccggcgaactccggcagctacccacgcccccttccatacccggccctggaaccaacccctcgaaacgcgccccgcaactcctatattnnnnnnnnnnnnnnnnnnnnnnnnnnnnnnnnnnnnnnntaggcaaagcggggggcgcgcaacatgccgggcgcctacgaagaggcgccggcccctgcggnnnnnnnnnnnnnnnnnnnnnnnnnnnnnnnnnnnnnnnnnnnnnnnnnnnnnnnnnnnggaatacggcggcagaccgccgtgcccaccgtcaccaccaaccattaacgagccggacggcacaacgaatacggcgcaatgaggccgtgcaacgccgcatgccccgccggctaaaacacgcccagcaccggtcccggacaccacacacaacacggcagaatagattgaccgtccagctcggcggtctatnnnnnnnnnnnnngccggtatcccacccctccgcgcgcgaataccatccgcccgcgctgttccccccttgaccgcannnnnnnnnnattcctatcccccctatcgacgcgaatatcgacgcgggtggcgcgcacagccggagggcttccccaatgtcggccgccccctttgataatttaggccgcaccaatgatgacgatgacaccgcccgtgtttttatgcccctctaacccg

SEQ ID NO: 415475 - DNA, 956 bp, Homo Sapiens
tgtacaagaataatctggaaacatcacactaaagaagaggaaagcagtataatctggaggactcaaatttagagtcacaccaaagggatccaaatccctgattcagcaattattttctgtgtgaactcagtaagtcatttggatcctcacatactccagccagtaattgaagacataagaatctccacagctttactgcaagaaggggagtctttgaacacatgttatacgcatgtcagcaaattgaagattattgaaacacctttagctgactgaggatgatatggctgaggttagctggaagtttagaatcccctgaaaaacttaccacaaagaatagattctggactacagagtcaggctgcagattacgcctgggttttcttaggcatggttttcttccatggaaaactttcctgaaccaaccaccttgacacagtgggtttgccacaaaaagaaaataaataagtaagctgtgtgagcacatatgtgttgagagtgtgtgtatgtatgtggctgcatgatattgggtccactgtctgctggcaaggggtaaccatggctgaggtgaccactgctcagaaggcttcgtctccctactcagacctacacctttggaatctcagcagggcacagtgagaaagcagcaccattttcaacagccaacacctacccagtgaagccagagactgcagacaaccaatcaactgatttcctcttgatggaatttggttataatctccattacccacgggaatctgagatagcctctggattattgagctctgctagaacagtggtatccctataatgctaagatggctggctccaggtcaagctgaaatgaatattttaaagagatatgtcccccatttgggttctggagttcataaatggctagtgaatcctatgcaaaatacatccttttacaatttattcccagccttactggatgc

SEQ ID NO: 415476 - DNA, 1396 bp, Homo Sapiens
tttcccccctaccttttatttcagcttctttcctctcccacgcgcacccacgccacccggccagcgaattcccttcgatagaacttgcaaagcgttgctggataagacgggagttctactgacactccagtccaaagctaggtgggaccgcctcctgtcgcacgtttccgcctggtcccgcgctttaggagctaggaaatgtgacagaggcggtgcctactgcctcgctaggaatggccgcggaggaggactggtcacgtggcgtggcttccggcctctggcgcgttcctattcgggaaggttttaaatgcggagtcatctcttgatttgccagcgaggctttgactgtgagcttcgcggcgttcgcgcctcaccgcctcaccgaggtgggtacgctgcgaagactaggcttatgttacccagaggttagtcctctactatgccacgtactttaaataatttatcacgctagtggaaatgcggggtggaagaaaaccccaccagcctttggattgtaacagcacagtaactttccctggtttttaaaaatattgccaaaatactggggactccttgtgggccaacgtatagtggactgatccactttgaaatgcatgccccttgacccaccagcctcgccatggccctctcgcctacaagaatatccagctcgtcctgcgcccccatggttcaattcaaataagcgcaaattcccataacgcttcttggatttggttctggcccaggcaaatccccgcccttttttatccgaacccttgtttagccagaacccgacagaactgcctgtttcgggaaagccaaaaattttctacgaaaccctaagtttccccctgcgcccctgggagaacccttgaaggggtactctgcaaaagggtcctccccggcctttcacttgtaggcgcagtcctcgttctttcctaggcaccacaaatcccgaaccaccggacaagaccgcgaaaactctccggggccgggggtgacctattcccaaattttgcaacaaattggttcataatggccgccggtcctcccccgacgtatgtggagaaaaataatcgcccattctttgcccctagcgactctttgcgcttaacaacggggatatttagattggaacactcgccatcgcgcccttctgggatatttcctctcgcgcaacacttgttcccccaaattacttttgacccgcgcgtgcgccctctacagtgctttcctccttattgcgacccccactgttgtgacaccccttttttctatctttcccccccactctctccaatattttcttttcctcccccctgtgagttttcataccacacttttttctttttacccccctagacacttcctcctcctgttgggtctaaatataccg

SEQ ID NO: 415477 - DNA, 822 bp, Homo Sapiens
tttcagtattctgtttattagaagcaagtcacttggtccaccccacactcaaggggaaggggctacacaagggtacaaatagcaggagttcatgaatcattggatggccatcttacaaatccacctatcacctacctactgaaagccttcagtaagctttaagagcatacaggagccctgacacccaaaaattagagaactgctgatctaaatgtatgttacattggtggaacatgtatgggagatataataccttccttaaaaagttcttctctaggataagatcttgggccttggaagcctgtatatggggagtgcaggtaaaatcaggaaagcctcccctttttgtcaacttcagtttctggagagagggatcttaatactacatagctgtcttctaacatcttttaggaagtaacacaactatgacaggaacagtagtgaatgttagaaaaaataaaaggtctgagagaggagaataggagcatattcttgcaaagcagaaataaaactttttaaaaaaatccgtgcccttcagtgaaacttttttttaaaggatctttgtatgttaccttatgggaaactctagaaatcaactctaaaaatgaaattttgagtaacaatttttagaatggttgttaaaatggctaaaagctattatgtgactcaaatttctttatataagaaatggtttgagacagggtctcaatcggtaccccagtgtggaatgcacgtggcatgatccgaggctacatgccagcctttacctcctggggccacagttgatcctcccaagttaagctccccaaatagctgggacca

SEQ ID NO: 415478 - DNA, 1050 bp, Homo Sapiens
  misc_feature (486)..(486): n is a, c, g, or t
gccgaggagaccccgcgccagtgctggcaacagtgcacggtggagaagctgaggtcatcatcaggatttcgaaatatttgcttgtggatacgaaactatttcagcaatgcagacaagtaagtgtgttgttgtgggcgatgagtgctgttgagtaaaacatagtcgtcctgtatatccgtagcaacaacttagacgagagatttccactcgcaactagtggtaccgagctgatttcttgaacatatgcgtatgtcagtatcacagattgtgaatagggtggagtaaccatagtagctcttgggactttgtcgatagcatgcaggggcaagaggcattatgacagagttacgagcagcgtgaggtgtatccagcaagacagaatgtagtctcgtagatcggtagttcaatttccaggtcgggtcctcctccgatcgttcactttgtatgaatcgtgaaagaacaagatgtggagttgccttgatggantaatcatcaccgacttgtccaatataggacgtccgtttccttgcgctttgatgcgggggactccagaatctggagtcctcagttagtactggaactccagatcatacgtatgtggagcgaagactttgtgccgataggaaagcattggacagtaaaggccatagtccactgtcccaggagacctgcgtgtaaaatggcatgggccccgtggaaccatgaaagggccgtgtcaagtgtcactgtgcgaagtggtttgctggcaccttttacaccacggaaggagggttcttggaccggaaatggtggtgacgtagtagaaagggccttaattccacttaagagcttgggcgcccttcctaagggccctgccacggggaaagactttcccaactcgcaataaagaatgccgcaaaggttggcttcggtacttaatatgcctttagagaccctgggtgatacacacttcccgttcttcccccttttcctttattgacattagcctttggcgttttacccttggttggcgccagctttacgttaggtaagacgaaacaaggaattcga

SEQ ID NO: 415479 - DNA, 609 bp, Homo Sapiens
  misc_feature (193)..(209): n is a, c, g, or t
  misc_feature (212)..(294): n is a, c, g, or t
gcccttgaccagtatctccccttacaccctggtccctgtcaaccactgttctgttctctggcttctgtgagttctacttttagattccatgtataattgagatcatacacttttgtctttctgtgtctggctgatttcacttagcataatgtccttcaggctcatctatgttgtcatgactagcaagatttcnnnnnnnnnnnnnnnnnggnnnnnnnnnnnnnnnnnnnnnnnnnnnnnnnnnnnnnnnnnnnnnnnnnnnnnnnnnnnnnnnnnnnnnnnnnnnnnnnnnnnaagcaattctccgactgggcaggatttcttatttatgggctgaataatatttcattggtgtgatatatcgccatattttctctaggacatttaagtggttcccatatttgggctatgggtgaataactgcaatgagtgtggaagtgcagatgatctcttggagatacggatttaattcccttgggattgatacccaatactaggcaacagagataatttaatataggaagttgatcaaatagatgtgggactaaaaaatcaaagaaggcacaatatgagaacacagagatactgctgcagaaacagtaaccacct

SEQ ID NO: 415480 - DNA, 732 bp, Homo Sapiens
gcgcgggactagcgaggcgagccgcgcgctcgggccctgaccatcccccggcggcgactgttctgcgcccccaggagctgggcatcaaatgctgtgctggtgggtgatggcgcgaggacgaatcagcctcatcgtcagctatacctgctatgggtaactccgctgctgactaccggcccagtgcgatgagaaccgttctctgtgcaagttggtggatggagctccggtgccattgactctgggacacagcgggacaggaggatttcgaccgacattcgttccctttgcgtacccggataccgatgtcttcctggcgtgcttcagcgtggtgcagcccagctcctttcacaacatcacagagaaatggctgccgagatccgacgcacaaccccaggcgcctgtgctgctggtgggcacccaggccgacctgagggacgatgtcaacgtactaattcagctggaccagtgtgggccgcgaccggccccgttgcccaagccccaggctcagggtctggccgatgacagatccgagctgctgctaccttgagtgctcaggcttgaccgcagaagaacttgaacggacagtatctcgactcggctattctcagctcgccattgaggcacataaggcccgggctggagaagaacactgaatgccaacaggtgtccgcaccctctcaccgcttgccggtggcaagccgtttcttcttgcttcgttttgagccagcttat

SEQ ID NO: 415481 - DNA, 1020 bp, Homo Sapiens
  misc_feature (193)..(193): n is a, c, g, or t
gctgtgcgcgggacgagaagtctgccctaacgaggttggactggacactgggcccgcggggacccatctgacaacgcccgtgtccccaggtaagcctgtgcgagccttcggtggaccatgccaaaatagacatcaggaacatgtgttgtttgggagggaagctgtggcgcactggacactgtctcgaactagntgactgcgccacccctccagcgtcaccattccgtgattccacagcaaggttggggtacggggaatggcgtagcatggagtagagagagagggaagtgggaagaaatttggtcatcggagagtaagctactttttatgcctttgctatcagtctgcgttgcgtttctctgatccaacttagtgctagcgtaacaatttatgaccgtgctcctggctgaggaactaggccctaaagcgttcacgtgggcgtttcggggagcgtagtggaggacacggcggcaggatcagtggaaaggagagggggaaatccccatggtatctgacaaaatcccagtgtcccggaagctgtccaatgcgcagtagaacaagctccccttgggcacttccccgacgtccagatgccgtcaaccttcagccttggattgtcagagggcaatcctttgcccctctgtgtgacatcttgggcatgacactagtcaacgactgagggttaagttcatcagtgtcttctgcttttaggcctcagaggacttatcctttctggcaggggaccagatctcctgggtggcctcatcatcgactaattcacttgtgcacctgtaggaaatggctaaaggtccatactggaaacccaagactgggaagtgagggcccctagaatttagaatctgtgggggtctatgaactgtcttaagtcaggcagtctcccaaagtgtggctccgaggatccctgtggtccctgacccctttcatactggccttgtcaactgcaaagcgtccttagcctgcatttcttcaccaaacaacgttcacacgccttggttgccc

SEQ ID NO: 415482 - DNA, 549 bp, Homo Sapiens
  misc_feature (189)..(212): n is a, c, g, or t
catttgtcgagataattatatatcttctctctttatgctgttattgtgttgaaattacattgatttttgaattcctgggataaatgccctcctcctgtctggcgcctgcacctgggcaactcttgctcctgtttgaatgccagtctcagacaccatctctctcagcaagtgtttgtctctctgttctgnnnnnnnnnnnnnnnnnnnnnnnnatgaaacaaactttgctctttcttgacccgagcggtgtgggattgctttgccttgatgatttgtcaatgctattggagtatcagctgtctacagtgtaaacagctctgccaaaactctccaagacacacaaaccaccccacagaaaagaagggaaaagaaataaggagggaacaaaaaccacaaaaacacgcggcagtgaaaacaaataaaatatattaatagggaagaagacaaaggggcgacactgaacaatactgtgtatccacagacgagaggagcgcaaaaccctccgtgtgagcctccaaagtccctaatttggacccgcgggatccccca

SEQ ID NO: 415483 - DNA, 576 bp, Homo Sapiens
  misc_feature (514)..(514): n is a, c, g, or t
caggagggaggcaaggaacagagccaagggcagaggtgggacagtgggctgggaggtggcgaggaggccctttattgaggggccagcttagatcccccagccccaaggtcctctgtcctccccctcgcccaaaagctttgtcccgcgccgtatcactctgggaccgtctggtatgtaggtccagagtttgtgatctatggactagcttccgttatgtcgatcaccgccacacgctccaagcgcttatgttctatgcgatggctaagactgaacagaacttgacaacgtactctcattgatttgtgtcccatttcccacaaccatatgagtgcttggatcaataggaggccacacgtcgtctcacttctggcgatagcgtaggtattaaccttttggtaaagctttccaacatatcgaggaccactattatcaccgcaaattcaagttcagcgagccaatctttggcaattagagcggctgtgttacacttcttttgccacgagagctttgtctnttcacagtgcccgctcttgcgagtaaggggttccccacatccgccgcgttcgagagcgcata

SEQ ID NO: 415484 - DNA, 541 bp, Homo Sapiens
  misc_feature (114)..(367): n is a, c, g, or t
  misc_feature (380)..(471): n is a, c, g, or t
tccttccttgctgaccaagaggaacagaacacagagcagcctggcggtgtcctaccaacaagcctccgtttctccttcctgtacgctagggctcctgaaactcacctgatgaannnnnnnnnnnnnnnnnnnnnnnnnnnnnnnnnnnnnnnnnnnnnnnnnnnnnnnnnnnnnnnnnnnnnnnnnnnnnnnnnnnnnnnnnnnnnnnnnnnnnnnnnnnnnnnnnnnnnnnnnnnnnnnnnnnnnnnnnnnnnnnnnnnnnnnnnnnnnnnnnnnnnnnnnnnnnnnnnnnnnnnnnnnnnnnnnnnnnnnnnnnnnnnnnnnnnnnnnnnnnnnnnnnnnnnnnnnnnnnnnnnnnnnnnnnnnntgagccactgtgnnnnnnnnnnnnnnnnnnnnnnnnnnnnnnnnnnnnnnnnnnnnnnnnnnnnnnnnnnnnnnnnnnnnnnnnnnnnnnnnnnnnnnnnnnnnacaaattgtgacgccagaacatgaagaaatatttcaaaaaggatggggcatgttgactgaacacagaaga

SEQ ID NO: 415485 - DNA, 232 bp, Homo Sapiens
cctagagacacacgtttcccgggctagtccacatagaccagatgagcgcttgggccgccgatgctgggcaagcaccgctaaggcatccgccttacctccatgcatattgagatagaccgggagcagcaaagacagaaaactgacgccagaacctcctcttcacgatcccaaaacatgggcaccatcatcccatgataagagacttgccccatcaatgccgccaatgctccgg

SEQ ID NO: 415486 - DNA, 535 bp, Homo Sapiens
cgcaggcagcggagcttgaacccggcgagccagcctctgcaacagtgctgggggcggaaggaggagccaggcgaagcggcgcctcagctgagagggacctggctggaccctgcatgaggcctgcctgagccagtcttgctgcgcgcgacccgtgttgctgtgtaatatatcaggcagtaggctaccaagccagcgctccagctgtcacaactgacgctcaggacacgtgtttgacctcaagactaggccgcagattgcctccccgatggactagaccgaggctacttcacgcgcgccagatcctgagggctctcgatcagcatacgacactcggaggatctcccagaaggtccaggaaactcggcacttgattactagaccgagatgagcaattcccccacagcgaaagaaccgcattcaccaggatgaacacagagtctgtaccccaatagtccagggacgctaagggcacggcacggcgacaggaaaagacgcgatggggtctgaggaggctcaattgccgtcctaagaggag

SEQ ID NO: 415487 - DNA, 387 bp, Homo Sapiens
ccgggctctagctgtttccctcaggcggcctgttccacgccaggattacttttgcttcgcagatgggccgtggtggtgagaggaagcaatcagtatggaaatggagaaatggcttaccatgcatgtccttctccccaggagggaggtcgtggtgcaggcgagcagacgccagactcctggacacttgccgcctgcgttatggaggcttagctaataaccttgcaggggtcttcaggcttttccactggctcacctttaggcttctgacacttttacctacgattgaaaaaagacgagattccatgagactagaaatgtaggagcatctcagaccttcacagaacgctctgttagaagatgagaaacataacgttgcttgtgagaggt

SEQ ID NO: 415488 - DNA, 1265 bp, Homo Sapiens
accaaaaacatagatgagaaaggcgaggggcggggagaagaaaacaaaatatttcttctacgaagatcccagcgaagaagcaccgcccccacccacgaaaacaaagactacaacgaccgaaagacagatgaacaagacacctcgccggcagcgtgaaagaacatgagcgtctcttgctcgagtgttagaaacacaaaaaaaagagaagcgtgagtgtgtgtgtgggtaggtgggtagcttagtgagagagagtgtcgtgtctctagagagagtacacgacagggcgaggctgagaacaaaaaagatgagatgtatcgtgtgtctgacgtaggtggtgcgggatgtctctctctgtgtaatagaaagagagagaagagtgtgtgtcatgcaaccaagccccactctcactcgcgcgggcgcgcgagagggagtggagcgtcgtcgcggcgcgcagagtgcgagggaggagtagtgtcgacgtcgaagagacgagagagagcagcagagtgtagtgggcaagagaagagcaaagagcagtagtactatcgacgggagggagaagagagtcagagtaggcgtagtgtcgtctctcgtagagagatgacgagagcacgcgtcccgacgacgcaaggggagacgccaaatattataagaagatgacacgggaagaacagctgggatacacaaaacacagcagcaccgcaagagagagaacagacgccgagacgctcgcgagaagagcagccgccgcagtcggggggcgccataaccacgaagaaagcgagacgaggagacaacacaactagaagccgagggcggccgccgccactgctgctcactctgatactgcttcctgcccgttcctggaggacgcagcacgaagaagaaggagacgcgacggctgactgctgcgacgaatcaggaagaacgaaggcgggcacctaccttccagcaagaagagagaggagcagcagtacccccgtagagacccaccggacggacgacatagtcaccgagcgggaaaccacgcaaacagacggactgacagaacgacggcggcggacgccaaccaacaccaacaacgaagacaacgacggacgtcgaacggtgaacggacgatcatccatggtcgcccacaacgtacggacagcagcatggagagtagaacgacgtcgcacgacgccggcggccgaccacacgcctgaagcgccagcacgacggacatcaggaacaaaccagcaacaggcgtcacgcgcgcacccacc

SEQ ID NO: 415489 - DNA, 778 bp, Homo Sapiens
  misc_feature (116)..(124): n is a, c, g, or t
cccccttagtataaattcccggttcacaacccctggaaaatttgtgtgcccgtgagcccctatttcccttttataaacccgggaaaaaataactcgagtgttttcttgttggtgtnnnnnnnnnaaaactctcttcaaatttccaaagcggcacttattgtaacacaatcccaccagaagagggattacagcaagtgtgataattttcccagtaactcaagttggagggtgatataagcgtggggggggtgggttatagtggtgagaacaaaatatccgctgtgtcaacatgccgcgtatctcgtgtccgagcggtgggggggaaacaccccgatattatggtgtttctcgagaagtgggattgtgtgtatgagagcagtagtgttctcatataaaactgtgacagccggtgtaaaaagaccgctgtgaaacatctgtgaaacccgccactctcgcgagcctatgtgttccagcgcggccgagagaaaacacgtgtgggtctcttgagcgagaggtcgtgtttgaaacaagagtctctgttgagggagcactctgctgtctaggaagaaggcgtggtgtatctctccccgcggggaaaattctcgcggacccgcgtgtctaacccacaggcgcgtggactattatgtgtgtatcaccaaacacttttgttttccttatataggtgtgtcccccccaagagaagtacgggccccatactgtgggtcccacatagcgttgtgttattccccgtgtgttgatgcaacaattgtggtatatt

SEQ ID NO: 415490 - DNA, 1207 bp, Homo Sapiens
  misc_feature (51)..(60): n is a, c, g, or t
  misc_feature (1063)..(1063): n is a, c, g, or t
atcaataaaattatggtgtgggagaaaaaaaacccttcccgcccacacacnnnnnnnnnngaagaagtatgttcatctcctctcttacccccagcaacacccacgcacagaaacaacaacacacgacgcgaggagcgaggcagcgggggcgaaggagcaacaccaccacagcggggtggaggcaccacagacaagataggagaggccgcgcggggccaccaagagagagtgggcgacacaaacagcagagagagacgagttacctcacagacagcaaaggcgccacggaacgaacactgcggggggagagtgacaaaaaacaacaaaaaccaaccgggcccttccaacgtgcggtgcgccggcggcggcaccgcgccgccaccaccaaccactcatcgaactgcgcgagagggcgcgtaaacaacaaaggcagcccgcccccacgaacacaaggagaggcaggccgcgcgagaggaggcgcacacacgccgcccaaccattcgtatcttcacccgcgcccccgcgccactcgcgtgaaaacgagagggagaggagaatcgagcgaagaagaaacactcaccaccgcagaacagaagcacactgtcctgatcatacaacgacaaaacaacaccgacagaagaagagagtgaggcggcgcacgcgcaagaccgacaaccatcacgccacacgaacagataactagcccacagcgagcgccggccaagatgtcccactcaccgtcacgagagacaacagccagacgagagtagtagtagcggccaaccacgcgcagccacagcgtgctgatgtgaagacaccagcgcagccggcgcagcgagggaaagagaacacatcaacatcgacgcgcgaggggacagatgatgtaacaatcacagaacaaaatggagaagttgcgcaccgacaaaacagacgatacagggcggcgggcagacggccaccccacacccgaagacggcagaccaccaggaccactccaccatgtccactcaatcacaccaacgacccgcacccatcgactggggccgcgattcaatgtgattgnagccatgcggccgcaaacgacacaaaccacacaccacctaagtatccgtaagcgcacgcgccctcagccgcgcgcacgaaacgagaagaacgaacacgagggccgctccagcggcggagcagccacccccgcacgcagcaccaa

SEQ ID NO: 415491 - DNA, 1353 bp, Homo Sapiens
ggggaaaccaggggggttattaggggggaaagaaaaatttaaagaagggcgggatccttatccacaaaaagacaggaggatcatcaatcacagagacaaaatcatccgcgggtagcatagccgttctatctccctccctcctccaacaggggggaagtgatgtctcaacagttgtatctctgacgaggtctgctccgaacatggccatctcgcggccaatatcttaacaacacctcccacaaataagctctgagtgagcgcggaggagttgcacagacctcacatacatcagcgcggtcggcgaaacacacaaaacatctcttgcagaacagatcacgatctatatttctctatacacacagacccattgtccctccagctgctgcgccgccgcgcgtgcttaatatgcaatatctccacccacccactcattaatatctgtcctcatcaatatcaaatatgtctaccacccagatcatgaagatatgacatgaggagttgtattattatatatgtgccgagatgtaatacgatttcttcgccctccatatcatgatattactttctgccttacatcaaatgagagtgtgagagcgtgaggagtgcgagtgtcgtagatcaacaatagatgtgaaacacaacaaatattcctccctctctcattaacacaaacatgagtgcggtggtggtggcgtccccccacacacaaagacatatatcatgatgatcacagagaacaatccttctttcgtttagagccagcccctccccgcgagggggcctaccactcacccaacgagacgaaacaccacacccatccggaagagacgtggccgcgcacgggaactcgcatccacgaccaactacactcatacaccacaaacaaagagcgccggtctggtgcgagcgtctaactattgctcgtgctcgcgcacacacacagacgcttgccgtccccacccccacccaacacatactggcgtgcgccgccaccaaactacaccaactgctcgcccccgacaaatccatcgcccgccccggcctctcagcacgagaacatgacaagttccatgtcggaaccgatctctccctcgtgtactcacacacgccactcgagcaggcgttacactgtcttctctctacgaaaaaatgcctcagttttctcctcataccatgatccttcctcacctcttcgttttccgtctcagccaccaccgagacggaccaggtcgcttctcatcaacctccttcacgtcttatcttctcgggttgggtatgtccgcgacgcgcacaaacacactcaaatacatgagtgtctcgggccaccaatgactacatcacatcatggtgaga

SEQ ID NO: 415492 - DNA, 1152 bp, Homo Sapiens
  misc_feature (46)..(55): n is a, c, g, or t
  misc_feature (199)..(255): n is a, c, g, or t
  misc_feature (368)..(458): n is a, c, g, or t
  misc_feature (467)..(522): n is a, c, g, or t
  misc_feature (624)..(632): n is a, c, g, or t
  misc_feature (753)..(793): n is a, c, g, or t
  misc_feature (801)..(1074): n is a, c, g, or t
ctaataattaaaacaacccccttattgagaggagaaacaacatatnnnnnnnnnntgttcctcccccacacacaccgacagcacactaccaccgcagccccccactcccccaggaagcgcgcacaacacacaccctcttgcagtcgtgcctcgcgccccgcgacacccaccagacacgagaacccaaaacgaaacgacnnnnnnnnnnnnnnnnnnnnnnnnnnnnnnnnnnnnnnnnnnnnnnnnnnnnnnnnngctctcgcacaagcacggggcgcgccaacactctccacccaaccacccgctgcgcgcggcggcgggcgggctcaacccccctgacacccagatgcgcctctccacaaaccctnnnnnnnnnnnnnnnnnnnnnnnnnnnnnnnnnnnnnnnnnnnnnnnnnnnnnnnnnnnnnnnnnnnnnnnnnnnnnnnnnnnnnnnnnnnactctacannnnnnnnnnnnnnnnnnnnnnnnnnnnnnnnnnnnnnnnnnnnnnnnnnnnnnnnacccctatctctcccccttccgcctcggctgcatctatcatcttccctactcggtctctcctacaccacttgtctcgtctatcgcccaccccctcgtcttcnnnnnnnnncgacttcgcccctcgactctcatacatttctcagcccccccctgcgctgtgctcctccattcacctacgctctcttccctccctcttcttccttctggtgtctcttgcttagtctgttcgnnnnnnnnnnnnnnnnnnnnnnnnnnnnnnnnnnnnnnnnntcgtcttnnnnnnnnnnnnnnnnnnnnnnnnnnnnnnnnnnnnnnnnnnnnnnnnnnnnnnnnnnnnnnnnnnnnnnnnnnnnnnnnnnnnnnnnnnnnnnnnnnnnnnnnnnnnnnnnnnnnnnnnnnnnnnnnnnnnnnnnnnnnnnnnnnnnnnnnnnnnnnnnnnnnnnnnnnnnnnnnnnnnnnnnnnnnnnnnnnnnnnnnnnnnnnnnnnnnnnnnnnnnnnnnnnnnnnnnnnnnnnnnnnnnnnnnnnnnnnnnnnnnnnnnnnnnnnnnnncacgcttcctccccccccttgcttttccttcaccaccccctctgtcttgctcctctccctacctgtctgtcgccgctg

SEQ ID NO: 415493 - DNA, 946 bp, Homo Sapiens
  misc_feature (571)..(684): n is a, c, g, or t
  misc_feature (695)..(771): n is a, c, g, or t
  misc_feature (849)..(883): n is a, c, g, or t
acgcggaaaacccccctgcggggggggtcatcgtcgtgggacacatctgcgggcacgaccgttcatgcctgtcgcttcaccccacctccaactcatcatcaacaccgacacaacattttctgtggtgcccccccctgcaaaacaaatcgctccctctgtgtgtgggtcccttctacaactgcatcccctcctcttgtaacgcctcctcccacaccgcggggggcgcacaccctgcttgtgtgcgcgccccagccgaacaacaagactacctacgggacggtctactatgttcctctcgcggcccacccacgacaggccccgcacagacagacactcacgcgcggggggggcgcgcggcccagaccacaactatcatcccccgcctgatgggaggggcggcgagaacaacatcaccccgcgcggggggtggcggagctcccctcatgcgcgccccccggacacaccccatcggggcagccctcacctcgcgggggggacaatcaccgacgcccacaacgccccacccgggggaccacctcacctcaacacacgcggcggcccgcgcgggggnnnnnnnnnnnnnnnnnnnnnnnnnnnnnnnnnnnnnnnnnnnnnnnnnnnnnnnnnnnnnnnnnnnnnnnnnnnnnnnnnnnnnnnnnnnnnnnnnnnnnnnnnnnnnnnnnnggccacaacannnnnnnnnnnnnnnnnnnnnnnnnnnnnnnnnnnnnnnnnnnnnnnnnnnnnnnnnnnnnnnnnnnnnnnnnnnnnaccagagaccaatctccgcgcccccccgccgtcggtgtagcaaactcccccccggggcgcacccaactgcgtccgcgnnnnnnnnnnnnnnnnnnnnnnnnnnnnnnnnnnnacaaggcggggaggggggcagtgaaccccgcacacacatcccaatgtgcgccgtgacacccgc

SEQ ID NO: 415494 - DNA, 1064 bp, Homo Sapiens
  misc_feature (198)..(206): n is a, c, g, or t
ctcacccaaagtggtatcatttaaagggttgtgacaaaaaaggggttaaaaccggggttgaccaagaggggccataccactttcaccttttcctccttgttgcggtggaggaaaggggcgcccgccccgggtaaaaccccgggttcctaaaaaaatcactgggggctcatgcgcccggaaagaacgagtggacacacnnnnnnnnnccaattacttaagccgctgtaccatataacagcgcaatagtggtggaccaaagttgggcaaaaccgtgggttccacgggtttaccgcgtagcaaaagaagggaaaacaacgggggatttctatcaacaccgccctcaaacaggtggccatcctcatctccccaaaagaaaggtgtcccaaccggggggtggtgtcccgggggagtcgaactaacgcttaagcgtcgcgccgctccgtccccccgacccagagctcatccaggggggaacaccccctgaggagggggctcccaagacccacgtggaagaggggggggtatcagcacaccgtgggccccccggacggagcagcgtcaaggtagtggcgggacaatattagaggggcgggggtgttcaaacgagaatcaacatcggaggggagaggtctggccactcagtttaccacggcccacaaccacgacggcgcgggtgataatttaccccggcggggcaccactgcgcgcggccacagagaaccccactgctaggacgaaacatcctcactagtgcgcccccaaagggaaagacggccagccgcccacaagtttggcaagggggagatggcgagactcgaggaatgaggaaggacgtacggggggatctacacggggccccgcctgtataccccctgaggacgcagcactgtggagaaagacccaacgcggagcagaccacctgtgtcactatccgcggagcaagaccccgaagagcacccaccgggacatccatcaagggggagcaacgcagacatcacaagggggggaccaacaacatgtgaaagaaagggggcctccgcggcacccggtgtgggggacaacag

SEQ ID NO: 415495 - DNA, 1412 bp, Homo Sapiens
  misc_feature (773)..(882): n is a, c, g, or t
  misc_feature (1339)..(1355): n is a, c, g, or t
aacaattacatctcataatttttaattcacacaataaaagaatcttccaacaataggggcgctcgggggtggaccacaaaactttgggaggagcggggtggggggagaaacttggtgtacaaaagtggaaacggcggcagagcgggccaaccacctccccggggcagcgatataacgcgccacgcaaggtgggggcaccagcggcactacggcccaacatccccgtggtcgccagcgtccacgccgactgcgactctcaccgggccgtggccaccgaggagcggacgagggccactgagggcgcgggggagcacaaattatccccacgaaagagaagcccgcccccatagggcgggcacccaccggcgacagacgagaagtgtgcacagcccctcacacccgccgggatgtggacccgccgcagacaaaccacgcgtgcacctgtgtggccgaccccacgcgtgttgaacccccacacaactcgggggcgaccccaactctcagaggagcagacagcgcacattgccataacgacgcagcccaccaagatacctaccaccttcctgtgcctgcgcctcctccgaaacccagcagccaactacctcgagcgaagttttcgccccacgcagagagccgcgcgccacaagcaacaacatgcgcaggcgagccacccaccacgcatgccccgcaaatcagagctgtccgaccccgcccttgcgctctctgacagcggacacagcgacctccgcaccacgcccgtcgacctcacgggnnnnnnnnnnnnnnnnnnnnnnnnnnnnnnnnnnnnnnnnnnnnnnnnnnnnnnnnnnnnnnnnnnnnnnnnnnnnnnnnnnnnnnnnnnnnnnnnnnnnnnnnnnnnnnggggcgcgacctcacaaaccccttccacccccaccaaggccgggctacctcactcaccccggagcgatccaccccacgtgcacaaaccacatgtcgtgccccacccggccaccaacctccctagcgtccgcaccaagcgagcacccctcaccaagatagcgccctgtcctgctcgcccccacctaagacagcaccacagcgcgcaacagagcgaactcacccagtggacaccgcatccaggtgtgacgcgacctgcggcaagaaacactcccacgcatggcagcaccagcacaaccaccgagacgacacgctggacatccaccgcccgaacgcttcgcggttctcgttgcgcaccctcaaggcgggcggcacaacacaccctcatcttcgctcacacaacagcacgacaacacgagccgcgacccccccaagtcggaggcaccaagtctggcgtctnnnnnnnnnnnnnnnnnacagcaggctcacccgatacttgactgtggtgaaccaccacgatcgactaacgacca

SEQ ID NO: 415496 - DNA, 971 bp, Homo Sapiens
  misc_feature (90)..(127): n is a, c, g, or t
cacgttgggaaaatttaaaggaaaaagtggttttcttgtttcccgggcgggaatggggggtggttgttgggttgtgtacccacacaggcnnnnnnnnnnnnnnnnnnnnnnnnnnnnnnnnnnnnnnatcgcggtggcgaggtgcacagaggaagggcgacgtccctacactcagagggtgcttgtgtgccccacaagatattcatgcactcccgacaagtggccgagcgagtgagacctaatcgcctcaaagagaggcctccaaggccctagtgtgacactcgacagaccaccatagcaggaagagagaacgggagggggtgtccaaccagctcttccagtccaggaggggaagagacaaaacccgcctccttgcagttagatatatacacagggatgttgcaatagagaaagaaacactgtctccactgcctcatgagcgacaaacaccaaatgggacacactattattgcgagccccagaaggggccatcactacaaacccgcggggaggagcgcaacatattgaaatacaacccctcaccttcccccagagaagaggagcgaggagcaacaagaaggagaaagcgtgtgcactagaagaaaagggtctgccccacacaagagaacctatccgtgggcgcgatgcccagccacccatgggagaagtaaagagacaaaaatccgagagaagcgtcgagaagagagagtacaatttccaccctctgaaggcatgcacacaatagatctggagacaccgggggcgggagcacaaacatccctcggagcagaagcaaagctggcaggagaacaagaacccaaccccttctgtaggaaacacggcgcgcagcgcactcatcaacgcgcttttcattagccaaggaaagaccagagaccaccaaatccgagaatgaagaggccaaaaaacgatgcgtgcgccaggcaacaacaccacccactgcccatccgttg

SEQ ID NO: 415497 - DNA, 413 bp, Homo Sapiens
aaatttttgtggccccaattaattctatctctgggtggtgggcccaaaaccggggttaaaacctcgccaatttgacaaacagctgctaaacaaaaacagttttgggggcgccaccctcttataccgcccacatcttgggggtttttcaccgcactccacctgtgttgagggcatgagaacccttttctaagaaccataggaaaaacgcccccactatgtgtgcgctaatatgggaacatgggggcacaaaggcgcgtactcaaggagcatcttcccgagtgactcccgtggtgtgtctactcctcacaacgagtgttgtgccccctcttctgtacataatccagtgtggtctactccccacaccacgagaagtctttttggcacaaattctctccctgttgggggcctcgccc

SEQ ID NO: 415498 - DNA, 448 bp, Homo Sapiens
tagttaccagcgacaagatcactgcgtgcgggggtcgcacgatccccggggtactatgataaaatagagggccccgtcgtgaaagcgagtactcagggtgtggttgtctatttttctctccccaccacgcgaggggggttctatcatctagaagaactacgtctcatccaaagcaaagagtctttataaaaatacaggtaggaaacaacatggcctaggcgataggattcgtaagactatgtgtgtctcccacaaaacaatggcggggactttatactctcccgccccccccaaatataagaatagtctttgttatataattaagagcaacatctttctaacatacgagtcatactacaagaacgagaaacttgtaatggtgcgggagtgagataatggggggggtaatttttggtgttcacccccccgccctttgttataccagctt

SEQ ID NO: 415499 - DNA, 1482 bp, Homo Sapiens
  misc_feature (257)..(257): n is a, c, g, or t
  misc_feature (903)..(911): n is a, c, g, or t
  misc_feature (1114)..(1114): n is a, c, g, or t
acagaaaattacccgggaaaacactcttacaagaaccgtggcccagggggggtcccccaatttcgcccgaaaatgagtgcaccagttggtgcaccactttgccgttattgagaggggtgaggcagggtgaacaaacgtggtggatggtgagtcacatcagacgttgtggtataacagctgtcttacaactgtcatcttcccatatacccgcgtgtggataactgaacacacattgttggtgaacagtttcttctccnccacactagtgaggacgtggttgtaccccccacaagcccacacaacctctccgagcggacaggccccctctcacaggctctgcgaggagagaaagagcgcactgtgtggggtagacctcacccaggtggtagtcctctcactacaaaacgtgtctcccgccgtgtgtcgtgtagatgaccgacacacaacacactgtgtctgcgccgcacagagggggaagagcggcaacaaacctctgtgcctcacccctcttattagatcttatatacgagttgtggccgccgagcagatgagaagagtgtaatattatctcctatgcgcgaaaaggagaaaactactctcactcttctctgttcgtcgccccccaagtagagggcaccgatgaaatatgagagtactacatgaataggtggcgcacgaagagggtgaatgctctcccaccaacaacccacaacaccacttcttctcctttccgcgacgtgctccccacacctagcttttggtcaccctcgtgagtggtgcgtcgacatctcacatcatactacgagatagatatcatcctccgccgcgcttttctcctcccaccaagaatgtggtgttgtcccctccacaatgctccacaccattacaactatttgtcgctgnnnnnnnnnaaaatgaagaagaacgacatccgagttggtggtagcaccccccactcagtaaatgtgggcccgcatccattgaatactcaaccccccctataagtatgtttcttcctctctgctggtgccaccacagatgttgcgttcttcactcccaaaacagagtgatgtgagacgagctactcacacaatcgtggagaggagaggacatnacaccccccatgttaatgtatttgatacaccgaagaagcgaatacgatccatcatgatcagacaccaccgcgttctaccatatatctatccagtggaaactaccccccctctgtgtttgatatggactccaccaacacccccctggcttgggtttggtgggtcggtccccccgctgtgtctgatcaacgcgagtactagcgaagtatcttgatgctcagtgaccgctcccaccgatgatgttgttggtgtcgcccatcaaacttccttgatctcactggtagcaggaatacaactgttcgtttgacatcacattaacccctgctgttatatgctacctactttgttggtgctattaaaataatgtact

SEQ ID NO: 415500 - DNA, 1592 bp, Homo Sapiens
  misc_feature (153)..(153): n is a, c, g, or t
  misc_feature (957)..(965): n is a, c, g, or t
gggggggcttaaaaattttttatttttgcccataacagtggaagctgtgtggggagccttgtgcagcccacccatcacgccacaaaagaccaaaatggcgcaacacacacctgaggagaaaaatcaaccacgagggcgtggggagcaagggcnccagtggtgtgagaggacgtagggtgaccaccgcggggaaatccgagagcgcaccctgttgacaaacacgcggtgtgggccgggaggcctcatgtggtgctcaccacaagtggagagcacaggacaccacacgacgacgggggataagttcccccagtgtgtggtgagaaccaccacacacaccgctgggcgccgggagacaaaaaacaagcaagttgcacccagcagggactcctgggagtcctcgcgacgacgcaggtacctacaacccccacagcgacaatgcgtgaaccagggaggtgtgaggacgcaccagcctcggtggttctcccccccaaagacaggaggggccgcacaaactcacccgcgtaggaaaaagtgggcacccatcaccctatagcccagcaacgacaaagcgtgtgcaccccccccaacgctggtttattggcggggctccccacaaacagagggggactgacaaacagcccgccctcgatggtcctgcaagaaaaaaaacctccatcgagcacaaagaggggggaggaccaccaccaagctcgcgagctagcgccccctcacgtagagcgagaaaaacaaatgttgtcccctcgagagaaatagcagaggcgcctcctttcccccaccgggcagaccccacacagcagagggggagtgccctcaccaacaagagggggagcagcatcagcgacaaaacccacggtgcgcgaagaaacccgccgtggctgtgactacccaccgaggaggggaagcccagtttgccccccacggtgatagcccgcccannnnnnnnncaccagcgggcgcaacacaacacgggcccagacggtagcaataaaaagcccccgtgtagcaggacgggtgcgagccgaccatatgctgtagcgacacaaacacaaacatagtgaggcaatccgagcccaacattgagcgctcgcaacctgagcaggccctacactgagcacacaggctagtcactaaccgtgcagagtcggtaaccacacacaaaccacaacaaagggggggagcacacacccccaccatcgcttatggacaccggctcggatgaagaaggaccacactctacggggcggcgaccgacgactactaccgaggcggcgctgtagaacaccaaccaccagctcacatgcaggcaaagaacgcagagagacagagatgtaaccagcgcgcaccactaacaagcaaaaaacgccgctcttgcctatcgacaactaggtccaccaacaccccgcatcgacaccggagctccccacaaggacgaagtagctaacagcaccagacctacgctgaacacggacgacacaactatgcttcgtgaggagaccacaccggaatacctctcctgggggagagacgcaaggggagggggacccgccccccccacccaagcaaacgagaag

SEQ ID NO: 415501 - DNA, 1685 bp, Homo Sapiens
  misc_feature (900)..(900): n is a, c, g, or t
gtggggttccccaaagtttttttggggttttgcgggttcccgggcccccaaggggggaacccgcccaaaatgaaggggggtccgcggtccccccaaggggctcttttaatttaacacccacccgtgggaggcactcaggggttccgccagacgccttcccgaaaccggaggtgagggggggctcagtgtgaggtgcaccatggcgaaaaaggaagcgcgccaacctgtgcaacaacctccggcgggtgcaacacacagggggggtggcctaccaagagaggctgcctggaaacctccgccccgacaacacagcggggtggggcgcccagcaaccgctgtgtgtcacacattgttctcgcgagggtcacacgaacaatcattgcgcggtgcagccaaccggtcgtgtgtgatgatctgacgccacctcgaggtgggtcacagtgccgcggaggtaaataacacgcgcgagcggggggaacaaccgggtgggtcttctcctacccacccgagaggggggagacaagaccaagacgacggcgtgcgatgcgccagcatccatcatagcagcgtgcggggggggcgcaccagcgaggataaacagaggacggggggaagatacatccagcgggcgtctccctacaaaacaggggggggaccacaacagagagacagcacacccccctctatcaccctgtgggggacgccccacttcgtcccccacacacccagcgggcgggggtagtccttctcctctcacaattatatcggcgcgggagggacaatcaatcccttcgctgggagaaacagcggggggcgcctaacgcacccctggggaagcgccgcgggggagtggcgcacacacacacgcgcggcgtggtgacagaccatccacccccgacnggtactctataaactgcagactccaacgaggcggcccccgagtgtcgtcttcgtgcgccgtacaaaaaccacacacacctgtgtggcgtccccagagagggcccccatacatagaggggggggccccacacccccagctttttgaggagctcattagtgcattattctcccgcggggaggagacgcctcgtcgcgcgcaaacaagaaacccccctacaggaacagaccactcagtggggtggtgggcgggcccccaacaatctgacttctcgcgaggggagttcgcgccgtaccccgcaagaagagggggagggaggcgcatcgacgcacaacaaactgaggtgtccgccaacagcaccgcggcgaaaaactcttatcctcgctcgctatggcggggcggggcgacatcccaccccccacacacgctgctgtcaacagcagccaacacacccacctcagattggggggggagaccgcactcggcgggagcaacgaaccacaatcacgagggagtgatcggggtgatgatccatctcactctagcagaagtgtgtgtcgcccgcagacgcgtggctcgcggggcggacatccaaggcagcgggccgccagcgaggggctcaccccaacatcacgttgtgatcgccacgcaggggtctttatagaagtgacggtgtatcagcgctccctcacgcaccccagaacgtcggtggcgtcggagccgcacaattgatggggaggagcacaccacggtatcactaaatcgccactcgatgcaaactgtctgc

SEQ ID NO: 415502 - DNA, 1160 bp, Homo Sapiens
  misc_feature (181)..(181): n is a, c, g, or t
cacatatataacttcattaaatcctcaaaaaaatcagtttcttcttttaacaccaaaaataatgggatttgggcaaaacccagggggcacctaggggtagttcaccggggaatagtgccgaggggcaaattcgtgcccaaaagaggcggggtgcagataattcacaatatccccatttcangagagtgcaaaaaccataggggtcccagccggggtcgtggtccaaccccaaagacattggggggctcagccaagccagacaggggaccccacagggggagagagctacagggaaagagttacttcagaggggctggggatctaacaatctttctttcactccttaagagaaatatttcccatctaacaagtgtggcgacacgggtctaggaacagggctcacgggggtgggacggaagcgtctaacctccttgggcacacgctgacaacggtcctggggggggcgaggggccccatcagtgcacacactcggatgtgggccggctaacaacgcggggggccacagtgcccaaaacacccacgcgggggaccctacagaagtgccgtgccccgtggtggtgccctcccccagggtgctcccgcggggtcctatactcgggggccctccgaagaggggggaccaccaacccccagaaaaggcgataacaccacgtcgtgaagggcgaagagggggtctcccacaagaggggaggcccctttacccggggggctgggtccttcctgaagagttccaacagcacaccactgcggttctacaacccagctcaggtctccaccgctgggcggctagaattccccccacaactctaatccacacgcaaatgttttatcttaaccccttttcccacaacatctcacgttcaaatctcccaccacaccctcgtgtatttacacccccgcggtgttcgccacagccacaagcgctcgcaccccactgtggtgtggccccgccttctcaacaaacgcgaggcgggcccaaaggggcgcgcgaacaaccggcacagcggccctctttataaaaaccaagcgccccctatttccacgttcacacaacgacatcaccctctgacccggcacattcacacctcgtcttcgacaccccagtgggccacaacacaggcacaaccaccctctcatgt

SEQ ID NO: 415503 - DNA, 1310 bp, Homo Sapiens
  misc_feature (232)..(270): n is a, c, g, or t
  misc_feature (857)..(958): n is a, c, g, or t
agaactttggggagaaacaagcacttccccagtcggggcgcctactttcccggggaggagcgggccccctccgaacgacccgggatgatacactccatccagaaacaacactcgctcggggacaccataaaacacgctcgttctccaccgaggcgcgctttaacaccgctgttctcatgaggtctcccgttgtgtccgcggggacacaaccacaagaccagctggcaacaannnnnnnnnnnnnnnnnnnnnnnnnnnnnnnnnnnnnnngtggtggtcccccccataaaacacacctctctgtcggggtggctcctcttatccactgccctccttctgccttggtggcgaacactacgaacaattattttgtcctgtgtcaacccccccgctgtgtgcgctcccctgctgaattatccccgcgcggggcgacaattggcgaggagggggtgttctcccctctttctcttacccgcctctatacgccactatacatccgacagctcgtttctccacaaacagtggtgtccaacctctcattgcgtggtctttaccacaccaataatacggagacccccgcggcgcgagacgtagcgcgcccgtcggcgtgggggcccccaccacttctttctcctctgcatctccaacagagagatctccgtgtgtgcccccgcgtgcaacctcatactggagggggggccaacacacactactcctgccgtggaaccctctctatcgtgggttccccaagcatctcactcactgcttctccgcaccctcgtctcccctcccacacgtacgttgttctcaccaatcgcctcccggcacccctctccctggccccccctcatcttcannnnnnnnnnnnnnnnnnnnnnnnnnnnnnnnnnnnnnnnnnnnnnnnnnnnnnnnnnnnnnnnnnnnnnnnnnnnnnnnnnnnnnnnnnnnnnnnnnnnnncgcgctggcacacgcggagtggcctccaccacacaaccccgcccgcaacccaccacgcgggcccgcccccacgactagcacaccccaccaccgccgggcaagggaagcacccaactcctggaggtcgtgctaccctcaccaacaacgacagggaacgaccgtcagcgttcttctccaaccaaacacccacccccggaggggagcagcgcgcccccaccaacaacacctcagggtcgggtacactccctgcggggagagaacccgcccacaaccacatctgcagatggtgcgggcagcggagagaaccaaccacaaccactcagacgcacaggtcaatcgattcaggcagacc

SEQ ID NO: 415504 - DNA, 1721 bp, Homo Sapiens
  misc_feature (157)..(166): n is a, c, g, or t
  misc_feature (1127)..(1127): n is a, c, g, or t
attaaaaataggtggttttttttcttaatacttccctcctctcttttcaaaagtggggtgtttattttttaaccgcgggaggggggggaaaaaaggggttataatatttctggagaacacatctggggggttacaagatatcgtttgccacatcatnnnnnnnnnncttctggccgccactcatatccctagggcgcgggagtgccacggcgcctctcaaaggaccaccttcgggggggagtgccctgcagctccattagtagacctctggtcccccaacaatgaccaaagtggtagtctgtgtgtggtccactcgtgggggaggggtggagaaactctctctcctatcagagaagagaatcaaacacacaggcggtgggggcgcacacaccgtgtttcttttctccctaagacaaacacacgtctttctttcatacaacacacaacagagggaagcggctgtgagtctcggccacctcacatctataccaacaacacactgcgctgtcttcctatctaaacagatgagacagacatcttacgagcggggcgtgcgtgcccgacacacacatatatgtttctcctctctctctatagagagcgcccacgatttgtgtcttctctctctccgggcgccaacccacaaccactcacatagtagtcctccctccctcacaagatatacaaacacgaaaatctctttgcaagggagcgtgctctacaacatcttcatgtccctctcttcactatactatgggggggctgcctccgccatatcatcctggcggggacagagcaaggtctcacaaaataacctggtctccgcctcagctccagactacccaatcctacaatcatctaactcaccacaccgagacgcgggcgaggggggggtggagacgtcccccccaccgtcctccgtgacgcggacgcccctcactacacaacacgcggggcgggggtggcacacgaccgactaacatacaaacgaaccgacgacacgacagccacacacacgctgtcggaaggacaccccctcctacataacataaactcaaccaaacacaccgtgggggtggggacgagcgagcccccccgcggcaggtggattttcaacacaccgagcngggtggcgctgatggagccgcgcatcacaacctctactcacacattctatcactaacgaccacgctccaatcaacaccgccgcgagcgagaccactctctgttgtctgtgggagccacgcgccgcctgatgtactgtatcaccccaacggacagcgggcggctacaactaacacactaccccagcctcaccaacagagagcgtgggttggcgtctatctcacttacgcgccagaagcgaaggagggcgagccctaactccactcatactgtagacagcacatcactgacagagccgagatcctaactccactacacgcgagcaccgggggtctctcacctcacataatatagatgacgcacccccgcccacttgagaacaactactcttcgtggtgggcacgccacgacgtgaatttaataaaagaacggactgcgacagaccaccaagacaatcttcgagctagcacgcccctgtgctgctgctcttcgacatgctaagaacaaacgaccctgttctccggacagagtctgagacgactaagatagctgctgcacaccagcaagccacctcactaccacgactaagatcaacg

SEQ ID NO: 415505 - DNA, 1253 bp, Homo Sapiens
  misc_feature (352)..(404): n is a, c, g, or t
  misc_feature (812)..(820): n is a, c, g, or t
aaggtgggtcaaaagctcgggttcccccaagaaaataatcgtgggggccccacccgctatggagggcggttgttggctgtggggaaaacatagagatgtagcgccccccccatctcccttctcacaaaccccgggtgggcaccctcgttgtcacgagggtgtggtctgccattgcggccgccgaggattcctgcgagtgtctctggacacgtccgcgtggacagagtgtgtgtgggagcgggaagtgtgtgtgggcctccgcgagaggtggagctgtctccctctcgcgggcctgagtggtggtggtgggaagtcttcccccccgcggtgtgttgtggacaggggtgcctgnnnnnnnnnnnnnnnnnnnnnnnnnnnnnnnnnnnnnnnnnnnnnnnnnnnnntctatatttctctcccccccagcgctggcgggggggtggagcccctacttgcgccgagatggacagaacaacttgtgtgggagagagaagagtgcccagacgagggggggcaaaatccactcctgtatgagagcatttccctcgcaagagagggtgcccacacaaatagtgtgtgccaccacatttgcctcgcgcggcgggggtaagaaagaacccaccccccgcgcggggggggcaacccgcaaaagagtgtgtcccctacgacgtcctctccactctcacgccacacgagcgcgcgctttggtttccccaaaaaaacactcgctcattttcgcgccccccccaccctcacaagagctgtaaatatgatcgctccactattggtgccacgctggcgcgaaacaggannnnnnnnnaactagaaacagcgatgtgccgcacactctcttcctacgccgcgtgttggtttctgccctcccaacaccacccctcgccgttgctgctgtgtgcgtccccccctcgagacactggcgcgcgtgggatgttcactcctcgggcggcgtgtctggtgtgccgcgttggggctccctcctttcccccccgctcttgtttcgctccgcttgtgtttcaccacgcaccctcgcggcgtgtttatagctattatatcctgtgcggggggctgccacaacattttgtggtgtgggggggccgctctagtgtccaactcgtgtgtggtcatgctcttggttggggcctgcctctgatcggtcgatgtccaggcgtggttgtgttgctgatttgttcgtgcatatgttgaatccccctccgtcttgtgtgagtactactctt

SEQ ID NO: 415506 - DNA, 1257 bp, Homo Sapiens
  misc_feature (89)..(89): n is a, c, g, or t
  misc_feature (174)..(234): n is a, c, g, or t
  misc_feature (664)..(675): n is a, c, g, or t
  misc_feature (1134)..(1155): n is a, c, g, or t
tcatctatgggccggggtttccctggttggcacgctgtggcgagtatgggggcggcgcagtgttcttcggagtgtgccccgcagccccnttgtttggggatttccccgtggtggtgcgcgcagtggtgcccgcggtgcagctggacatcggtcccaaggaggtgcgttgcgagnnnnnnnnnnnnnnnnnnnnnnnnnnnnnnnnnnnnnnnnnnnnnnnnnnnnnnnnnnnnncgtaggtcgctcgctcccgtccaaagagccgtgtctctcttgaacctcctcccgcgtgtgttgtctggggtctattatctggcgcgcgtgttgttataatcaccctcgcggtgtgtggtgcgggtgtgcgtctccaacgcatgctgtgtgaggcggcgaccctctctatatgggcgggcgggtcacggggggggaggcgcccacacccggtgtttgtgtgaggggcgcgccctctctctaatattctcctctgtgagtctccccccgcggcggcggggtgtttgtgcgggtcccctcccctgtgttgggccccccacactgcttgtgtgcgcgagagagggtagaccctctctttgtttgaggcagcacccccctctcttctatagagcgaggggtggcgtgtctatggggggcccctgccgttggtggnnnnnnnnnnnnatgccttgtctggctttgtgagcgtcggagtgcgtgtgtggcggcgcagggtcgcgcacttttagggcgcgctcttccttgcctaggtgcgcgtggttgtgtgttgccgccccccgcgcgagggttggttttcctcccccccgggttgtgtgttcttcccccccgtcgtggtgaagtgccccccgcgtggggtggtgtctccctccccacgtgctgcgcgccaggcatcctgtgtgtggcctccgtgtgtgtgcgtacacccctcctggcgtgccgccccctttgttattggggctcccccccgtggtaggggtgtgctcgggccgcaccacggggcgcccacacacctccttgtgcgtgggtgcgccctgccccggcagggtggttgtcttctctggtaatccctcgtccctcgtgggcgtgggcccccgtggtgtctaccccccctcgccggccgannnnnnnnnnnnnnnnnnnnnncgccacacccagatgcggggggcgccccctcacttccctctcttttgtgggcgcgtctccccccccggcgttgtgctgcccctctcccccgcccactttctg

SEQ ID NO: 415507 - DNA, 416 bp, Homo Sapiens
aggaggggtgggtgacgacgaggaaccacttcctcgccgtgcccccacagagggtctcgccccgcacacgggccaatcacgccgcccctatacacgcctctccttcctatatggatggtcagaaccccccgccggtcacccgcgcgcagagcgggctgcacttccgaacgaactacacgggggctcccatataccacgacgaaaggtttgtggtgcatgactcacaacaagcctcgctggctgtgtcgctttcagacacaccaacgtgctgggagcggcggcaccaacccacgaccaagaacaacccccgcggccctcccgacgacccgccgccaagtccgtgatgtgcagtggtgtcgtcaccgtcgtaaagatcatttcactaaccacccgctcaatgctatcacccctccctc

SEQ ID NO: 415508 - DNA, 1523 bp, Homo Sapiens
ctcccacaaactctcttaaaaatataaaactcacccgcctagagggtgtagggggatccgggggccctacacttttggacgtatcatatttacaaaaacaaccactgtatatatatcctctctctctccactaaaaaagaaccaactgcctgttatttcatcactcctctctcttcaaacgatctccctcattagagtgtgtatatctcaccaatattcacccctcttttaaacacaactagagcagaatcacaataaaacccctcttattgctcaactatctactttttcacacacaacactctttcagaggaatattatctccctcccagagaggctatactatttatatcaatctctctctccctacacaaacaacaatcctgtcgcgcacctcgttatatatcctctcttgcccctctctcataaccacatagcatatttgagatgctgaccacaccataaataccgagctcttatgtctgctccccctctcacccacctccgctcgacaaccatcaccttatctctattataatatttcactctctaattctcttcttaaaccccatctcctctgtcctatatccaaacaacatgatgtgttgtccctctccgacgcagggtgttcataccatactttcatcatcatactcatcctctcttctcctaaaacataatcttattatgatgtggtggtaccaccacacctcctcccccaccatatattatccttcctctacagagactgttatccccaccactaccacacgacacatcttatcttttatcactatatcatatatcataatatctattgtcctctctatctcctacaatcatcatattattctagtattaaaacgaccaccacaccagcccaccccctcataaaataacgaacacacacacacgatcttctataccaccccgcaccccagccaggacatatcttctctaccaacaacaccttcaccgtgacggcagaccccacatttatactttagaccaacacaacattacaatccagccgtgctcccccctaatatatttattcttcctgcggccacaagtcttctgcggcctacaatcattctcatgcagaccaccctgtgtcatcttactaaccaccaccagctggcggcgaagccgtcgatctacaccaccccctctctctccggtcgtcgcgccaccacatcaaaacaaacacaactcccgcccgcggatgggggagctggggatcattcacctctcgtcgtgcctcaccctcgagcatcaaacaatcactttttgcgttgcttctcacacacctcgttgctcttgctgctcatcccatacggcacacgacacacatacgaggggaggggcagcaacccaccggtcgtcgatcatctttagtcatcgctctcttctctcccccacaggaaaaactagactgcccagacaccactttattttgtacgacgcgcagtgcatcctctccaccgttagatcttcgtcggacaccaacagcaaacaatttc

SEQ ID NO: 415509 - DNA, 1023 bp, Homo Sapiens
  misc_feature (205)..(292): n is a, c, g, or t
  misc_feature (307)..(341): n is a, c, g, or t
ccacccccaaaacagaaacacccccccaccctcatacgagaggcgggcgggaacaaagctcgcgtgcttccagtcatacatacgacgttgataacaaaaaagactgactctcttgaaacaaagataacacgcaccgagtaataatatattacttgttgcccgctcatcccaacagcataaaaaatacacgaggggctctcacacnnnnnnnnnnnnnnnnnnnnnnnnnnnnnnnnnnnnnnnnnnnnnnnnnnnnnnnnnnnnnnnnnnnnnnnnnnnnnnnnnnnnnnnnaagcggcgcggcgcnnnnnnnnnnnnnnnnnnnnnnnnnnnnnnnnnnnaccacgatacgtggtgcgtgcgcaagagtgagacgaggagaggagtgggcccgctcgcgtccatgtcgagagcgcgacgggccggacgcacgcgcgggacggaggagagcacacgcgtcgcgcgtgcggagtgtgtgctgattcgtgcccactgcgggcagggcgagaggaatcaaatatatacagatgacacgtgcgcgtctcgcgtcacgtcatgagacgagagaatagtcgtgattcgtatcatcgtcgttgcagccaggacagccctactcttgtagcagctcatctcctctggccccaacctcgcgcagatgtgtgcagcgttcaaaccaacatcataatcattattctcatcgtctacatcctgctgccgctgcgctgcagatgacggcggggtcactcttgtgcaagaccatcacaaccaacaagtagaacaagggtcagaggcacccggccctacatgctctccacttcgagcgctgatggacaaagatgttcatctagaccgagagacgtgctgcatagcgctcgtgatcatgactgatacggacagccgctgacgcagccagacgaagaaggagccgtgcgcatatgccactacacccacatcaccacagctacccgctcgcggccagtcggccacttaccactaccgaggcacgacagcacgaacgcagag

SEQ ID NO: 415510 - DNA, 1083 bp, Homo Sapiens
  misc_feature (70)..(95): n is a, c, g, or t
  misc_feature (290)..(303): n is a, c, g, or t
  misc_feature (510)..(558): n is a, c, g, or t
  misc_feature (911)..(972): n is a, c, g, or t
cacgggcgcacctattttttccctcgtcacagaaaagatgccaccctcacccaccaccatcactcaacannnnnnnnnnnnnnnnnnnnnnnnnncttttcgtccaccacaaaatcactacatcacattttcttttaataacaatgataccaactaaaaaatagttatcacacttctatcctccacccctctctgctacaaaacaagagctctacccacacaatagatagctcccacaagaccccaccattgtgtgacgcaccatctgatggagggtggtaacaacctannnnnnnnnnnnnncacacaaaaacagtcggggtggcgtgtcttgacacagacccccgcccgctgttcataaatcttattcttcacccaccctctcatctgcaggcccgcccgcgcgcgatattcccagacacaacacacactctgtcgtgtcggagccgcggtttgttgtctcaaggaagacaaacacccgccggagggacggggacgatatgtgtcccnnnnnnnnnnnnnnnnnnnnnnnnnnnnnnnnnnnnnnnnnnnnnnnnnattaaaagagagcgagcgtttatacaaacgcttctgttatatagattgttggtgctcgtgtgtgtggtgcgcgtgtccacttctcttcacggccgccgtggctccttttatcacaccgtcggtctttttacacatctactacatcagacagcggagcgagggtgacacacaaaaccccacaacctccatctctgtgacagacggcacaaacaacccccttttttctctacttcactctccttcccctccccccacttatatccttcctacccaactcctacgttctcccataatcaacccccccctctcatatcaacgcacagcttcccatcaacctcttcccaaattaattnnnnnnnnnnnnnnnnnnnnnnnnnnnnnnnnnnnnnnnnnnnnnnnnnnnnnnnnnnnnnnatctatcccactcctccccgcatactcttttctcttctcatcttccctccacccaacaccccctcctcccccaacccaccaatcctcgtcacttcctactccatcaccaca

SEQ ID NO: 415511 - DNA, 1290 bp, Homo Sapiens
  misc_feature (491)..(499): n is a, c, g, or t
  misc_feature (574)..(591): n is a, c, g, or t
  misc_feature (593)..(601): n is a, c, g, or t
  misc_feature (906)..(961): n is a, c, g, or t
cacatcataagttgtctcatttcataatggtctgggaaaaaagcatttgggttcactctaccctctctccgttttctctggggggaaaaaccccgagctgcctatactacttcacttcttcttgttcttgttaccatactactctcttctcttggtgccatgaagaaaaacaacaataaacaaacacaccaatccctccgcggtggtgccccccacataagagggcggtcttctctatataagggctgcttcttcactaacgctcgttgtgcggacaacacacctcttaacaacaagagagtgtaatctgcgaacctcccccccgcggggccacacaagaggaggtggctgaccacacacactcttcacaaacacatatctctcgtcagtccagcgcgaacaaacaaagtggccgcctctctctgtcgtcctccctccgaagacagatctcctccctgcccgtcgagagagcgatattgagtgcacaccannnnnnnnngctctctctctgtccaccaaacattgcgcgtgcacaccatccccacatttcaagtccacccaatctatttctctnnnnnnnnnnnnnnnnnntnnnnnnnnntatactgtaggcgccgcccaacgtccccacacctccactttcacaaacatactgtgtggcatacactcttaccctccctcctatccatcacctattcctcacctcccccctcaacccctaccttatctctcccgtgcctctcacacacacacctctccctcaaacacgcgccgccccccctcataaaaattctctcctcactaccatacaccccgacctctctcctcatactcttaccaccaccccacctccacgctgctccctccccttacacccatacacacaccacctccaccgccccccannnnnnnnnnnnnnnnnnnnnnnnnnnnnnnnnnnnnnnnnnnnnnnnnnnnnnnnaccacacgcacctccccctctagctcaccacactccattctacccacttctgccgtagccggacattcaccactactctctcctcaacacaccagacactcggcgcacgccttcttgccccgcgcagctgctcgagcgctccgaaccccaccactgggcgagtggaccatcccccaaccaacccgagtatacttaaacatacacactcctctcgcctccattattcatcgtctctaccccgatgcgcgctctccccccctccctctccaagtatgctagtgccgctaccctacatataaatcccaactgatcaccacactcataccctc

SEQ ID NO: 415512 - DNA, 710 bp, Homo Sapiens
  misc_feature (43)..(106): n is a, c, g, or t
gagccaaaaagtgtgttatcgtaattataaaggggtgcccacnnnnnnnnnnnnnnnnnnnnnnnnnnnnnnnnnnnnnnnnnnnnnnnnnnnnnnnnnnnnnnnnaaaattgtgggggggttgttgtgccccccggagtcttcattccaccgcgagcgtgattggtcttacgatgacgatcatcgagcgaaatagaacttctggaaagaatacgcaccccgctgagggagagcgcgttgtctatttcgcgcgaggaggctggcggtggagggagcttctactgttcttgtcctacgaaacaacataaattgattgttgttcacaaacgattcctctgctgcgtaccttgcacggagtagcgcctcgggagtgagggggatcttccccacccctcggtcgcggcggtgtcgtccgtcgtgtccccccgcgaggagttgtgtggttgggagtggtgtctcccactcccctatcctgccgaggtgtgtggtgtttgtgccacccccagcggtgtgtttcgtgcggaaaggtctcttctctgtggtccctggtcggtgcttgctgctccatccatctgtcttttcgggtggcgccgcaccagataacaacgttcccccctccgggccatcacatcacgcctggtgtgtgtctccatcgcgatccttgttgatccaattgtctcctcttggatccctcccttgcacttccccgg

SEQ ID NO: 415513 - DNA, 768 bp, Homo Sapiens
  misc_feature (57)..(70): n is a, c, g, or t
  misc_feature (287)..(296): n is a, c, g, or t
agaaggggcgggcggagcaggagccgagacaagcaggggggggcgcaaacaaaacannnnnnnnnnnnnngagaatatttcaaccatcctcacactcaacaacaccaccagaaattataactctgcgccgccccccccacgaaaaacaagaaaacacgaaggcggcgggggagcagaaaaaaggggggcggcgcccctcgccgcggtggagtgcatgtatgggcggttgtcgccctcctcccctccctcctatagacagagagagtgcggttcgttctacacatagnnnnnnnnnngataactgactgactctcattcgctatcaacgcacctccgacgcagtagaagaaggaagagtctcttctctgtgtgtgcggccagcgcacagacacagttcgagtggggagagcgcagagagacatgcaccacctcgcctctgttatcaacacacagtagaccacacaacaccagcgacggtcggcggggagagagaaatatcatcaccacccccactaatatataatgtttgagtgggcggtggtgtgatcaacatatagacaacatgcagtagatccagcacggagtgaggcagacacccccacccacacacgacggtgggggggaggagcagttaatctaataacacccaccccccaccgaagagggggttggtcggccagccaacacaaaataatattgcctacaccgcacacagataggatgcggggtgatgtgtctccatctcgtccgtctcgccacctcccccct

SEQ ID NO: 415514 - DNA, 1043 bp, Homo Sapiens
atgaaacaacaacaatttcgcccaaaaaggaggaagtaaaactctccggagcccagcatttttactacggaccgaggcagagaagggcgaagcagagcgggggtatcctagtagtgtctgacgcgtgtgggaaacatgatgttgatctaacaacggaaaagaagagacgccgcgccgcgaatgacaacagtcaggcgtgggagcgaggtagttatactcagtgggcggcgttctgaacaccgcgccgcgcgtccacacacagagaagatagcctccgcgcgctgtgagacaccgagcagcggcggcgcgctggcggagcggctcctcgcaagaacagagagagtgtgagagacaatatgaccacgtgtctccccgcgcctcaccacgagagggtgcgggggatatatatatctctctcccagcaccaccctctgtggagggtgggcacgtgcgggcacgcgctgtgcgctgtgtgatgacacaacgccgcgatggagtgaggtgcgcgtcgtcccctctcctccaagcacagattagcatgatgtagtgaggtgcgcagggcagctgcggtggggtcgttacatctaccgccgtgctgtagtatcacaactatacgctgtgatgatgtgatagtggtcgtgggcagatagtatcatctacgacctggctattatcaattggacaggcagaacaagacagatgtgatgaagcgagaaagaacagacagacgtgtggtgaggcaataatcgcacgccgcgcctctctactactgtacacatacctaacagtcatacaacttaggacacgagacagcatactaactactttctctacaccagtccagctgccgagtctctccgtcccctcctcactcgacgacaccaagcgacaacaaactaactaccaaccaccaagctgctgcttgcgcgagcaccacaatacaaaaagctgcgtcacatcaccactgctctcctcctattgcgcaggtcctcattcacaaaccaccaaaactcacccgtgctgtcgcttctgttatatctcta

SEQ ID NO: 415515 - DNA, 791 bp, Homo Sapiens
atagaacaaaaaagcaggggtcacccccccgcctcactctctttctgacaaaaaaaatggacgacctcctgtgtagtggtgatatagaataaaagacattgcttggggggacccgctaatagcctgtcgaggagcggctgcccgcactacgcagcaaagaagaatctctcctctagtcgtggcgcgctcggcgggggggtagggcgcatgtctagtcctgcacgcttttctgctcggccggcatgagcgtgatgctctcactcctcagtactcggccgaggaggcgaggcggggtcagggtcttgtcgctcgataccgtcgccccgccggcgcgctacacacgacaaacatagtctcgaagcctgcgctggcatgacatatggtctcgatgtttgtgtggcgtctgcgtgttcgacaagctctatcttctcgctttcatggttatactgtatactacattgattcttgtccgcgagcgatcgatgagagaaagtgttcatctcgtatcgtcgtgtgtgggtgttcaccaacacacatatggcgtgacggcgcgatgtgcgatccacgtgtagtcagtagtacagcattgcgcggtccgcctcgcctcacatactagacgggtgtgtggggcgccaacttctctccattccactcatcatcgtcgccgtagcgcggttgtatctatccaactctgcgtctcctcctagtattagtacagcgcttcaatcctatttctagtgtcggtctcgtgcgcgccccttctcactcacctaaactagcgggcgctgcga

SEQ ID NO: 415516 - DNA, 1534 bp, Homo Sapiens
  misc_feature (91)..(104): n is a, c, g, or t
  misc_feature (159)..(159): n is a, c, g, or t
  misc_feature (1386)..(1439): n is a, c, g, or t
attataaaggggggaaaaaaattctatgggagagatggttcccccccctttatgcgcccactcgttgcaggaaaaaaagctgcgcgagaannnnnnnnnnnnnnctatttccgctagacacacactttgtgtggggggcggcgagcggcgcatccagcnccgtgggtgtgtcgctcccccatcaatgcgtcgcgtgttgtattatatataatagaagaagagcagggattgtgtgattctaacagaaacaacaaatccatacatcgtcgcgaccaccgataagtggtgcccccgtgtgggtggtgcgcactgtgtgagagaacaacaaaatagatagcgtgttgtgtctctccggtctctatttatcgttctgtgtgtggtccccccccggatcctatctctctctctgtcagctgtgtctacacatcgctcgtgtatattgtcgtgcgtctcactcacaccctgaaggtgatattgtgtctcgcaagaaatatctctctgtgctgtgatccaaccgattatgagtaattacatataagttggggtgcgccaccacctcatctcattttatgtcccgcgcgtcatgcaaaaggcaacacactcgacccaccaccatcatcatattgtttcatcactagtacagttgtgttctctcgtgcgttttctcatttatcctaacgcaggaggcggtgtaatcccacactcgcgtcgtggggatgaatgtcctgcacctcatcgagaagaatatactattctccctccctacagtacacataaaccgcacgcgtcttctctatcagccgcgtagcgctagacgttcgtcgtgcgtagtgcgcgcacacctcctatccaccccctaaatcgctcttcgttttcacaccaacccctactcttgcttcttatttgtcgtgtcgccgacagagatctgagtctctcccctctccttattaactacgctgggtacagaacttactataacacaccaacacacccaacaacaagaacataactcattctcttcttcttctaatatacttagtagtgtgactacagactactgcgttgtctgcccctcacgcgaggtagttgtctgcacctccactctcctctttctcactgtactcaaccaatcgtactacctcctgctcgtcctgcaaatctacccaatatatatacgttcttttgtccagctcacctccacttctaatcttccacatcattccctcacgtctcttcgtcctaaagatcattcacattcatcttatcatttcttgtctcccttcaatattggagcttaccccctcactcctaaattttatgtttgtcttaatcatccatcttgtttatctatcttctcttcgtctcatcacattaaacatcagtccnnnnnnnnnnnnnnnnnnnnnnnnnnnnnnnnnnnnnnnnnnnnnnnnnnnnnnatcgaattattggtctttcaaccctctccgatccgcatcttctttcttctcctccgtccgtcccctttctcattctcattataatttcacaatcg

SEQ ID NO: 415517 - DNA, 1641 bp, Homo Sapiens
  misc_feature (42)..(53): n is a, c, g, or t
gtggtgggccccgggggggttttctccccccaaaaattgacnnnnnnnnnnnntagacccccaaatctgtgtgggggggaatatcagccaccagatcgccagaaaatgtgtgtgtctctatgggtccccagaagattctctctggtgagaaagccccctgtctcgcgcaaacatctcttcttcgatcgagctccaccaatttgcctccctctcaacaacatcttgcgttaggtgtgtgcccgcgcgcggaagtcatctctcgtgggtgcgccccacctgcgggagaatgaggtaatctggggagagagctcccgtggcgagacgtaggggcgttttgtggagagaggaggggcgccctcacatatatatctccccgcatcgcgtgggctccgagcatcagccacccacaagctgtgtgcgagtgggagaaacatccctcgcacagggtgtgtgtgcgaggcgaccaacaatacgcacatatatcagtgtgtagtgggagaaatcctctctgctgtgggaccacgccttgtgggtggtgaaacacaccacgccgcggcgtcgtcgtagtacaacatactatgcggcgcgtcgcggcgcgcctacccacacaccgagtcgatgcgatgtcgagattacctcgtgtgcggcggcggcgtcctccttctcccccactatgtgatgttgtgttgtgttgtcgtcgtccaacaaaccgtcgtcgtgccgcacctcaccacgacgtcatgatctcgctagatgaagatcattagtattccccaccatgtcttattcatcgatcacccgttgtggtggtgtcggcccttttctgctgcgcgcaaagaacaaccagcagtactctgacgagcgggcgcctcttctctacgcctgcgtgcgctgcggcgaccgacataatatatcacatgtgttgctgtgtcgtcagaccactctcttatttgtgtcgtgtgcacgctggcggaggtgggccgcgaagacgactgcatgaggactggggcggcgccggtgtagtactctctcactcctctcctgtgttcgtgcgcgcacccaccttagttgtggtgggcgcggcgcctacccgtctcgttctgcgtttgcgtgtcgtcccccacttctcgttcgcatcgctctctttctgtacaacgacgatggtcgttgttgtcgccgcctccccgtctctcttttcttcgccgcgcgcgtccgttgtgcttctgggctccctcacgccctcgcgtcgggtccttgctgttccttcgtcagcagtataaaccaggtctcttccttgtttccatcacaccatcgcggagtgggtggcgggtcgtcgtccccccccgtgtggtgtatcatcatctctcgtccggggctgcatctcctcccatctctgatcacgagcgcggtgtgggtgggtctcggtgtttgatcgtaccgttccatcccccgccagggcgatagagatgtctgtcgtccgtctggtttcgtgtgtgtgtggtgtgatcggcgagacctcccttcactccacagcaactggcgtgttcggatcgatcgatctctctagccgggcgagctcccctccctttgctgggttctccgctcggcgacacagcacaattccgctcgttgtgcctcgcc

SEQ ID NO: 415518 - DNA, 1507 bp, Homo Sapiens
  misc_feature (996)..(1006): n is a, c, g, or t
aaaaaaattaacctttatattttccgttgtttttggcacaaataaaaccggggcaaagtggggggctttggggggattagccaaaaaaaccaattcccatatcttccgtcggattcctcccgaacttcttcccgttggtttcccacactcttagatcgggggtctgacagacaccgacagggaacccacttcgttgtgtggcgcacaacccccctaggggcgctagcacgccacaaagagtgcccattggtcttcccgcccaagaagaggtccttgcactctttccacgcaaggtggggacggggttgttcaccccggttctctccacaacgaaaagaggccgcgatgtgcactctcgtctgttgtatcccccctgtttttgtatgtatctaataaccacagtggcgggtcatcctgtgtttttctccacaccgagttgtgtgggtgtatacgccccaacattctttttggccagacaacacagagaccctgcgttgcggctacaccttcttgtggcggtgggaaaccaccccctcttcgtcgaggagagtagagtcagcgccacaaatagttgtcggcgagagtatgttccccctcctgctgtggggtggacacatcttctacacaagacgacacttcttcagacgagggtggttctggtataacaaattgtcgcttggcctccatgtggtgtgttctcacaacccacacctcctgtcgtgcggtcgggggtcaatgaactcaccacggccaccaaagaggggcaacacaaaaagggcgggcccaaacacattcttgtcttcacaccccccttgtgttgttaccacggcaagcgcctgtgttgagtctcttctaccagtgtgggaggtgtcacccgcccccacttttggtgtggtctccctcaccaccgctgctgatggtcatctacctacgtgtctttgtgcaccatcataccacttctacacgagagaaattttaccacagtgttgttgcgtnnnnnnnnnnntgttgtgtaaaaccaattcatccacacagcgggggcggagtaacacaccccctaataaacagcggcctgctgtggcaacacaacgtgggggagggcggcgtctcctttctaggggcgcggccgcccttgaaaaacaccactgactgttgtctcctctagcgctgggcgctggtcgtcccccccggcgctggctccctatccccacactctggttggcggcccaatctggctgcgacccccataccactccgggtggccaccacaaccctcattttgggtgcggccccccctttaattactttggttgcgcccccagcacaaaaacgattgtttttcccctcgtagaaatatcctcacacatgaggagagggacccctctcccttgtgtgtgtgtcataaacccacaacaacgcgcgcacaccaaatatatttccccccccgcgagaaaaatacagacggccgcacccaaagttcctttcccccacaacacactgatgtggt

SEQ ID NO: 415519 - DNA, 466 bp, Homo Sapiens
cttggcaaaaacgtttcttcctatgaaaatggtggtttccgctagaaactctccaacattttcttttacgtcgtttacggttgtttaacaaggaaaattactgatgcttacacacaggggcacctcaaccctcactggcacacatgtgactgggagatctctctgacagatcaacattttcatcacacttggtcggacaaacactgtggagaaactcgctttcaatgcctggtatccctctgttacattattccccagagagacagagttgctgcacttgcacagcagggtttccacaaaaaggtctggaagcgcgcgtagaggttaaggtactccctaaatagtgggtgaacacaacgctcacaaatccgtgagttactttgagccagggcgctcatctctacgcgtccgtggtggcacaacatcggtgtgggccgtggcaaacacaccgctttcctcccaaata

SEQ ID NO: 415520 - DNA, 1156 bp, Homo Sapiens
aaaaaaccaaaaactttttaactcttgggccctctggaaagggccaggcaaagtgtcgtcagggtttccacaggagggtatataccaaaaaggatctacagggggcgtgcatcccatagcccccttggtgtgggagctgagacctagatggagatggtcgacttcttggtgtctctccgggagagggtgctctccaggctccttgggtcgcccatgtctctgagacccgcttgccccctctcctggctatctcccactttggcgactctactcttgtgcacgtccgttagaactcccaagaatgggcctggccttagacacccctgggtgtgactcaggagaagaaaaacacacccatgtgtgcggtcagatgggcaacacagcgacagtgggctgcttggggctcacacccaattgagacggcttctcttagaagtatctcctctcagcgggggcgctgagggagttcatatctcctttgtgtgcccaagaaagatggcgtccctccgcccaagtggccaaagggagaagggtgtccgtcaaacaagggtctttgcgcgtggggcgacccactaacccgcgcggcccgtcgtccaaatgatagcaccattgttggtcccccgctatgaaatctccttcctagaggttttccaaaaacaactcgccggggggttctccctgaggaacacacgagaaggaacattcttgtcgcgcggttgacggccctcacaaaacgtcttctactacctcaagggggggcgcgccactgtctgcttgttataaaccagagggcggaggtgctgccccatttgcgtggagagtttcgccccccctagactactctcttcctcctctagggtggtcacttggtgggtgtttcttcctccccctcttaaaagggggggcgccaccccacatgctgcttctcttctccacattatagtcggtgtagccggcgtgtagcgtcggcgatgcaaaccttctcctcgatgtgcgcccgctcttcctttgtcctatcgccttcttttgttggcgccccccttgttggtgatgtgatctctccttatctatcttctttgtggggcgacccttttctttctccctccttctcccacgaaggggtcgcaacctctatgtgagtattgtcacctccccc

SEQ ID NO: 415521 - DNA, 361 bp, Homo Sapiens
  misc_feature (192)..(258): n is a, c, g, or t
  misc_feature (277)..(311): n is a, c, g, or t
ctttcaaaacgaaacacactcttactcccacccccaaccaaccaacaacagcctgccttccctctctccaacagcatacacctgcttctccccacctcccacaccaaaaagcaacatccccaccaccatccacctccacggcaacgcgcccgcatagtctcacaagcagtacaccatatcttccctccgtgnnnnnnnnnnnnnnnnnnnnnnnnnnnnnnnnnnnnnnnnnnnnnnnnnnnnnnnnnnnnnnnnnnncaaaaaacaacaacaccannnnnnnnnnnnnnnnnnnnnnnnnnnnnnnnnnntccgagcacaccacacacatataccacctcactatataaccacaaaaaca

SEQ ID NO: 415522 - DNA, 1061 bp, Homo Sapiens
  misc_feature (264)..(264): n is a, c, g, or t
  misc_feature (509)..(509): n is a, c, g, or t
  misc_feature (898)..(898): n is a, c, g, or t
  misc_feature (945)..(981): n is a, c, g, or t
ggtggtttcccacaggggggaagaggaagaaggggcaaatttgggtcacatagaaaccccccgcccccgcgggttaaagaaatcctcctctgccgcactactctttagaaaatcggtgggattataacgggcgatgtgaccacagaggccgggcgtaaatattgtggtgcgtgttattttataatgaaaagcggatattattcccccggtgtgcggacgcacgagggaggctctcacaagatcgccccgaacctctccgtgttnaaacaccacggcgtctcaattgtggcctcactcaacaaaggcgctgtggggataatatagcgggcggtttaactcaccgcgcgtcgccgctcgtatctaataacaaccaatgccttgtggttgtgtttatctttcttcctccccacatattcacaacaatatgtacaaaacataaacctccagcgatgtgggggtgagtgcagaaaacaactgtgggcgtgtgaaatacaaactcgacacaaatnattttctctcgcccgcacaccatgacaaactacgatgagacgagatgatgatgagcgagcacacgatcgtgtgggccacccaacacacatacgtcgtctgtcctatcccttctaaccatctgatgttgtgcgtcctgctctcccgcgtaaagacacaccaccatgacagatatgagagcgagccccctcatacgaaatagaaaaagcgcgcccatataaccacacacacccgcgctgtgtgggcgcacaaaataaaataaaccccgcagatgcgttacgggcgtctactcatctccgggcggtacaccaacaagaatctgtgtgtgcgtggggccccccctcttgtgtataaccgccacacgttgcgttgactatcataagtgtggggngacccactatacaacaacgggcacaggtcagacaacaagcgttggtnnnnnnnnnnnnnnnnnnnnnnnnnnnnnnnnnnnnnacagagagggagggagaagcataaatcttattaatcgcccgccatgtttatatatattacgaccaaaaatgaacacgagg

SEQ ID NO: 415523 - DNA, 846 bp, Homo Sapiens
  misc_feature (196)..(196): n is a, c, g, or t
gcggcaggaggggagcggagcaataattttagaaccccacttcattgctctctcttccacaacagcctcataaatgttggtgtattacgtgcccctccttggggcggcgctctctagaagagaaaactgtggtgcgcaaacatatccacggggtgactccgagagagcggactggagaggggggcgcccctcatanaaccccacagagatgtgtccaccccacacatattgtcgcttttgcgccctctttaaaagagtcggctctggggcagcagagagtgatagcgagagcgttggaaaacagtgtgatgaagcgggtgtgtgtttagagagacacacttgcggtgtggtcgcacacaatttgagaaaaacatctctcactgctgtctcaagtgaaaatacttcgcgaggtgggggaaacatgctttcctcacactgtgtgtgtgccaacccccgcgagagagtatatctaaacagcagacagagggaaaagtgcggtttttgtagacacacgttgtgttcgctccctcagaaaagaggggtgtccctgcccgtcgagaaacacccccctccgggggagtaagtagtgtgtgtggggcgcccgcggtctttcgtgtccgcgtgataagtttataacatatatatatacaacgtcgggggaggatcggcggcagcttccacaaaaagtggggaccacatatttgtcttcccggagggggggagatagatattaactcaccacagccccctctcttcacacctcgtgtgccaaccccgtgcgggagggggagccaaaacacccagtcaagtgcgggcccccccgccagtgttcacacagagaggcgc

SEQ ID NO: 415524 - DNA, 1393 bp, Homo Sapiens
  misc_feature (1069)..(1077): n is a, c, g, or t
aaaagtttggggtaaatttttataggacaatttcttaaaatttctttcctcctagtgtctctaataaaagcttgcaacccacgtaacctctcttgttctcacttcaccaaccgcaaataataacaaaacagggaaatttccaatatccgatctggatcatcttaagtcctctttgtggggacatcatggctttttgtctccccagcatgtttcaaccaagggtgggctgggctattaccccctgggacgctattattctggaatatggccctggtggtggagacacaagagtgtttgtgcgcccacgttggtacggcgtgggggggtcatgtgcctctcgcctctggacgtgtattcacaacacacatctatatgtttctctctgttaccgctcgtggacagcaaaatgtccttgttcaaatattcttccacaatgaggtctctgtgatccgccctcctcttatgtgtccaacccacgcacaaacagggttgggtgtctctcaacaaacctctctctaaaaaaatttctttcctccccaggttttcccaccctctctttctccattgggggctctcttgtgtgttgcgagacaacacaactctctttccggcgagcatgtcccaccctgtgtgcgcgagacttgcgaacccacctcacagttggtctctgactattctctcctttgtgaggaggggagacagcactcgtttctctttgtggtatctaccccccccgcgcgggcactatttatttcccccgacggtgtggtcgttcacccaacagcctctgtcgtccccccatagtgagcccccctctggtgcgtctccacccttctgtgcgcccatatgtgtatagcaccgccccgcacgacgtctctttgatcactctcgtcccgccccggccggtgcgctactattttatttccccccggaacacggcgctaacacattcttggtgcgccggccccctattttcttccattgccgaagaccagcgcacctctttttcccccacacagtcgttggtgtcgtcgtccctcctcagaaaccagggacgttgtggtatctnnnnnnnnnattctcttggtggccacaagaacggcttcttgccgggacgtacgccccctctttggttcggcggtggcgacaccaacccaacagcttcttttttacgcgaaacacggcgcacagcgaacacgtacgtacgcacatagaaattgtttctcccccccacattcatgccaacaacaattgtctcttcgcacaacatccctccatacgttatggcacaccctgggatcgatcaggctagatataatatcgagggcacaacagagcgcggatcccaacgcaatccaaccgcgagcaatagtcaaccagcgctcccccctag

SEQ ID NO: 415525 - DNA, 1056 bp, Homo Sapiens
cacctccgagggccccggggttgtggacaacccagtggagaaaagatattagagattatccgcccctaaccacaatttttgtgggtcccgctgtggtgcctctccccagatccccaaagaagatggggcctttttttcccacttctccagtttccacctcttataatagacgcctgtaaacagatctccggtgtgcgccttttctgtgtggtctcttgtttacccccgtcgcctcttattcttgtgttgtttccccgccctgtgtgtgtgtggcagcacacccagctgtcatcattcttgtgtgtgtcttcccccagggttgtttaccttctctccaatatggcggaactcacacaagtgtgcccgtcttcctctactctataatggtgctgctcctccaacccacgcgaggaatatctaccaagaaaaaaagggttcatgttgggggtgaaaacaactcggcccttcttcgagaaaagacccttcgtattatctcccctctctcagctatatgggtgtttctagaaaactctctcttttatgggggggaggagtctcccttcacgcggggcgtgttctctcacacgtgggtgggatctattaaaactctcttcccatctgtgttggcttgccccacatggtgagctatgtgtgtaaacaacatgtcgtcattggcggctaaataaacccctctctgttgggtgtgggggaggcgcaccagcgcggggcgacatatccacaacgaatggtggtatacatttccgcctgtgttatattcgcgcgcgggcgtattttcctctacttttgttcaccaccagtagatgattttctgctggccctctgtgtgtgaaaacaaaccagggcgccgtgtgtggtgcgccccaacccaattttttgtggtctgcctccagatatgaccgtgcgtcagaaacatgtttgggagctcacatcgacaacctctgttctaaccaaagaacggcgccaacaatctccctgttgaatatctctctcctcttgtggtggttagacccacctctcttcttcaaacttccgctt

SEQ ID NO: 415526 - DNA, 1581 bp, Homo Sapiens
  misc_feature (831)..(831): n is a, c, g, or t
tagtgggggtgtgtcccccccaaaaagaagggggagggatccagtcaatgggggactctcataagctgcgtgcgagaaataataaatccaccaataaagcacgtggtatctaaaaaaggggggctctctgattttccccccaccatctatgctcgggaacaacacctcattagtcatgcttcgtcaccttgttaacacaaaaagagtcgttccgcggagagaataactctagacacagagaaaaactctcccccgtgtgtgtgtgtatcttctcatcacaacaatacactctctcttatataccacacatacaacaaacattaatacacaacttatgtatcaaataaagaacagaatctctttttctagaccagaacccccctcactctttcagagagaaacagttgcagttcccgcttcaccatacatttatctcactcacaaacaagacctctctctctctactagatagcagagagagtagactacgcatagatagaaggacatccgatcacacacacacacgcgctgcctgcgaggatcgctgtacggacaaaacaaagaggagaaactgtcacgagtgatgtgtgtctcctaccagcagaagcagcgacggatgtgatgtaccaaatcaaactcattccaaccagacgaagacgacgaagcagaggagaagagaacacaccatcaccccgcggtgcgtggagtgtcgtgcgtgagaacaaaatcattctctcctccttacgcctcgcccaatccacctacttctcgtcgttgatgctgatgaacagaacatgagcctcttgtctctcgagacgacgagagtattantacctctgctgcgctgactctgatcagcagagatacaccattctctggatgtgagtgtccactctcagtcacgcagccgcgcagcaggcgccgtcgcgcctttttccaccacctactccactccgcaccaacatctagcgttgggtcgagtcggcaaacaccatcgaccaccgtggtcgtcgtctcatccatgccctccgcgtgcaccctaccatcacgcacgcctcccctcctctgattcattttcctacatcttccaccacaacaacacaacatcacagtcgtcggcgctaccaactgcctgccaccaacacacaaaccaatagacttctctctcttccatccatctttattctcatcacacactaaacccaccctctcctgacttgtacgattcaaatcttagccactctaccatcccttacaaatcattttctcacacctccccattactaacactactccgtcatccacacgtctcatatatcactcctcactgctactcctaccctcgagcataatacttcttctcccgtcatcatcatttcttcctcaacatctgattttctcctcttctctccccacccaccctactttaatcaatcatcaccctttctcagcctcgtaccgtaccaaacaaaaacaacaatcctctccccacaacaatcagacatttcgtttgtgagtgtttgcattctcgaccatccacaccaacaccattcctacttctctctattcaacaagcatagg

SEQ ID NO: 415527 - DNA, 745 bp, Homo Sapiens
  misc_feature (389)..(405): n is a, c, g, or t
ggggtttttctttcgcaggacggtcggtgtgtgtgcggtggcagacacaagaagaacagagacgccggggtgtgcgtgcagcatctctcttcttttctccttcttgtggggagaagaaacttttgcgtgcgccccagccatcttacaaaaaatagattcaatccccacacacaacaaagaaaagccgccgtctcacagctgcaccccatctctttcttacagatagagaggagctgagcgtgatcaacacactacaaaaacacaccccacctctcatcaacacaaccacaatcctatcaaagattgaattatctacacacacaaacaactatacatgccactcacacatatctattccaattacgcccagacccgtcgtgtcccatccnnnnnnnnnnnnnnnnnaccatacatacaacacagcattgctatacatattctcttacgcgcccccatcgcgtcgcgcgagcgagagcagatagagtgggagagatactctctccttctactctcgtacgcggaatatgctatatacggacgagcgtggagtatatctatcatttccacgcgacgcgcgagacgcgagaaacaaaaaacacatcgccgcttcttctacctacatcctattgcggcgagcgacgactgatgtccggctcccacctatatatatctttcttctctctctcgctacgcacgagacgacgggcgacgagagacggaagacaccgccccccgcgcgacgaga

SEQ ID NO: 415528 - DNA, 833 bp, Homo Sapiens
  misc_feature (84)..(92): n is a, c, g, or t
  misc_feature (372)..(382): n is a, c, g, or t
  misc_feature (395)..(425): n is a, c, g, or t
cactgagggccactatttgggggtggtataaaaatgttaaaacaattttatttattctctccgcgcgggtgcgcaccaaacccnnnnnnnnncccccccgcggatagattatctctctccccaggggtcgtgttggtccgtcctcttggtggtggtgggagtgtctgtctgctgtccctcaaaaaatctctcctcccgtctgttggccgcagtatagttctttcttggtggggtcctccattgctgggcgtgctagtgtgtcgtcgagagggcgtctacggcggctttgtgtgagcggctacttcgtgtcgcggaggatttgcgggagtgtgtgaggagtgcgtggctctctctgtgtgagagcacacccannnnnnnnnnncgacggttgatcnnnnnnnnnnnnnnnnnnnnnnnnnnnnnnngtgcgggggggagttctcctcacacaggaaggctctcgcactcgggcgtggtgtgcgcctcttatgtagggggtgtggcaagacatctcccctcacgcaacccgctctcgctgggtgtctgtttgtctcctttcctctgctcgagtgagagaccccgcagtcgttgtgttggtacgcccccgtgctcctcccataaaacaccacccttctgctgtgcccgttgatcggtcttgcttgcggcccgtgtgtgtagtgcgcgactgtggttggctggcgcgtcccccttctaagggggtcgcctcccaacaaaattttgtgtgtggcgtcttcctcatatcagatgcgcggtctctggcccgtagagcagaatcactcctgtgtcgttgagatgactctacctctagagga

SEQ ID NO: 415529 - DNA, 969 bp, Homo Sapiens
  misc_feature (516)..(528): n is a, c, g, or t
  misc_feature (747)..(756): n is a, c, g, or t
  misc_feature (850)..(858): n is a, c, g, or t
ttcttctcccgagggggtcttcgtgcccaagttgcccgtgtgtctccgcgaggaagaatgttcccaccgccgtcgctgggacctctccaacagccgtggtggaacacagacgcaggggaggtttctccgctgtcggggggagatctgttcgtacaccgctcaggcgtactcgcctgcgcggagtgctctgcggcacgcatggtgtgtcgccccccaagccccacagaacatgctccctggtgttggggagagacagggtgcgacacccacatgtgtgtctcatggggagacgcaacttcgtctcacatagaatcctccgtggttgagataagtgatgaaaaattctttctggtggccccaccctcaaaagagtgagtggggacgtgcgcccccctgggtgtgtgcgacggttcggagagctccctcccgtgtgttgtgtgtgggcgcccacgcggtgtgttgtgcgctcctctgtgttctctctgtgtgcgcgccccctcttgtgggcgcacacannnnnnnnnnnnnctcggaggcaagattttgtccgatctgtgcgtgcctctcttctttatatagatactcccgcccatgcggtttggtttatactcaatccccccgccctgcgactagatatctgtttcttctcgcccaccagcaggggtgtggcctccccctctctcgacaccgatcatgctctctctccccgtgagaaggcgcgggcccccactctctttctttgtgtgnnnnnnnnnngagagttagtcatccctctgtcctcctgtggtgcgcgtcgttagtgcgtcactctgccggtgctcttcttgcctcgctcctcgtctcgtggtgnnnnnnnnngacccacgcgcgggtcgtcctctcaccactccgtcgtgtcgtcccctacactcgtcttttgctgggggtggttcctccacctttctgcgtccgtcttccactatttgtggc

SEQ ID NO: 415530 - DNA, 971 bp, Homo Sapiens
  misc_feature (124)..(147): n is a, c, g, or t
  misc_feature (190)..(199): n is a, c, g, or t
  misc_feature (299)..(308): n is a, c, g, or t
aaccttaaattagattccataaaaaaaacaaacccccaccaaacccacaaacccctttttaaaattaaccttcttataaaaactcagggggcgggttcctttcccaccaggtaggggtgcaaannnnnnnnnnnnnnnnnnnnnnnnctcccctctccacagatgtccccgggggctgtatgagtcccannnnnnnnnnccacttccgcggggatggcccctttttcgccctccgcgtgttagattacacccacttttttcttttcaactatgaacatcgagtttctgcttcccagccnnnnnnnnnntctctttcacaacaaaaacggtggcagaggggggggctttgttaaccccttccaaggttggcacgagacgtgggcccaggggtatagggaggggcgcggaatcccccggtgttggctttgcgccggggcccccctaagggctccctgggtgtgtgtggcccccccgcgcgctgtggtcccgtggaacccccccggttgggggacagggcgtgtgttgtgcccaggctcgctcccaaaggcggagggggtctgtctccgtacgggggggccgcgggcgcttccgcagaaggtggtgtgtctccctgttgaccccccagagccagctgcgcttgcagccgccgtttgtcttgactgcgggggcgcctcctgtggcacctctctcgtgggtgtggcagccgtggggccccctctgtcccccccgggagggagggcgcggggggtgctctccgaagagcccccccgggatctcgcgcgcccgtgtgggggcgctttctcccctttggtgcctccggagggggccggcaatggggcggccccgaggactcgccggcgtccccggccctcgggtgtgggcgcgcccagccggttctccgcaccgcggtttgccgcccccatttggttgcggccacctgggggttctccccctgtctgcgttgggggcac

SEQ ID NO: 415531 - DNA, 1543 bp, Homo Sapiens
  misc_feature (87)..(139): n is a, c, g, or t
  misc_feature (626)..(642): n is a, c, g, or t
  misc_feature (826)..(886): n is a, c, g, or t
  misc_feature (917)..(1014): n is a, c, g, or t
  misc_feature (1111)..(1174): n is a, c, g, or t
  misc_feature (1301)..(1301): n is a, c, g, or t
ctgttttccacaaaaaccacaaacgggggggaggaggagggacgctggccacacgcaaagcaaaagacgaacaaacacaacacacannnnnnnnnnnnnnnnnnnnnnnnnnnnnnnnnnnnnnnnnnnnnnnnnnnnngaaagccggccacggagaacgccacacccgactagaaacacaagaccgccgacgcgcaaggaagagaacccagacacaaaacagaaaataaaatattatatgccgaagcgtgcagcaacgcaaaacacacccactccgcacacacacacaaacaacaaaggatggattgagtgtcactctccatctcaacgcccgaccaatcaatctcaccgcgcgcggcgagcgcccacgacgcaaccgagtcaagtagggtcagagaagcaaaacagacgagactggagcacgtccgccagcgtgcgcgagacgcacacacacaaaaaagagatcaagcgcagcgagagagaagcagacgccatcgacgcgtcgcaagcagacgccggagaggaagaaaatagtcactcactcgcccaccccgccgcgcacgccagcgacacaccacaggaaaaccccagcgagcgagccatgctggaagcggagagactgcatnnnnnnnnnnnnnnnnnacgacagcaaccggacgagacgacacacacacccaacacgtgccgcggcgctggcgcgtcacccaacgacaggcggcggagagcgaagccgcgcgcgcactacgaaacaacaacgcagccactggtgcgacagtacatcgatctgcaaaaccatcgcgcgagccgcgtggcgcgggtgcggagnnnnnnnnnnnnnnnnnnnnnnnnnnnnnnnnnnnnnnnnnnnnnnnnnnnnnnnnnnnnncagacgaagcagaagaaagcacaccacaacnnnnnnnnnnnnnnnnnnnnnnnnnnnnnnnnnnnnnnnnnnnnnnnnnnnnnnnnnnnnnnnnnnnnnnnnnnnnnnnnnnnnnnnnnnnnnnnnnnaacacaaaagcacaacgtcacggcgacagaacacgagagatccaaccgcagcaccgacaaacaaaccataacagagcaacgcgagagacatcaaagnnnnnnnnnnnnnnnnnnnnnnnnnnnnnnnnnnnnnnnnnnnnnnnnnnnnnnnnnnnnnnnngaaccagcgagcagcaccaacgctcaagcaggaagacaacaccatgacgacacaagaacaacgctgctgacaaacgaggcagactaggacgacgcagaagcagtcaagcaacgcacgagacgaccanacaacagcaacacaacagacagccaagagaacacccaaacaagacgacgaacagccgaaccagacacgctagcggacgagacgaaccagcagacatacgggtgagacagcacgaagacaccagcatcacagcaaggacacactatagacgacctaaaccgcaacaaatgacacgacaggaaggaagcgacgcacacacaccaccagaccagtcacggacataaacgcagaagcaacgcaacg

SEQ ID NO: 415532 - DNA, 344 bp, Homo Sapiens
cgcagccagagaagaagagcgggctccactcgcgaggggtgggcgcatcggctcgcctcatgatgctcccccgtgggaggaaataagaagccacactccggcagggggtggaagcgacaagaaaatcagtgtagggagacaaagtcaccgaagaacgggcgtggaccaagcaagaagacactccgggggggagtgggacacaaaaacaggaggtgacggaccgacaggaggaggcgtgcggaggagggaccccgcgagcggggcgggcggagaccgagacgccccacagcacgcacgcgtgcgggaggggaccgcatccacccgcgcgtgaccggaccagacac

SEQ ID NO: 415533 - DNA, 932 bp, Homo Sapiens
aaaaaaggccaaaaattttattttacaaatataagctaattggtcttaaacatattgcaacggaaccccatctccaacccagagggccccaaaaacctctccctcctctaaaggctctggggcggcctggcagctcccagaagaagggcatctagaggaacaggtggggtcggcacggaaaagaggcccccagctctaaaggaaccgcaggaacctgtgcacttccgcagccaccctgtccaggaagatcagtcctataacgtgcaacagggtctcctcagagaggtgctaggctccaccacgcccgggtgtgtaccggacttaccatcattctgacacctccctcttgaaaagccactcggtgtatacaagctggggccctctatagtagcccccatcttcacaccagtgtcttgcgaggtgtccggtgttagtaccttcggaggaacctcgaatatggcttacctggggacacacctcttaagaggttgccatgtatcccccagatattgtgtggcgggccccccctccccgagaaaggggcctctctccgggacaaccccccccatattaaggcgggcacacaaggtgaacaaaggggtgctaccgtgacacccctatggggaccatgacaacacaaagacaatgtgcgtgctccccatgaacacaacatacactcgtgccgtgggtatagaccccttgtgccctactgatacgaccaacaaacgccttgtgtcccaccacacaaaaggcggttgtgcgagaccctgcgagcctagctgcttacttagacaccgggcaaacattgtctcccaaggaacgacctcagtggcctataacaagaggaaacatttgggttttagtagacaagatcaaaataaaacacccccctataagacaactattgttacccacccctcccggcggttgtc

SEQ ID NO: 415534 - DNA, 475 bp, Homo Sapiens
  misc_feature (145)..(154): n is a, c, g, or t
gggaggacggcggggatgaaaattttgtcgtgaaaactctctctgtaagaaacacacgccgacaatcccctgcgcgaggaggagatgtggaccccccgcagcgcggtggggcgggcggtggactgtcgaccacaaaatgtcacgnnnnnnnnnnaaaagggggcgcaaccggcgggggaacacggctcgccaaaagaaaaagaagcgggagaagaggcgcccacaataaacggcggcgccccagacagcgcgtgagaagagagggcatcatattagagccgccgggacatatataaaaacaaagtactaatagagtggggcacaggttgcggatcgacaagcatgatccggtaaacagtagggtggtagagagtctcccagtatttgttgggcaccccaacttatcacccaccgcattgtttgttgattggaggtgttccttcgcccacaaaaaaaccatcagggcgcaaaatgc

SEQ ID NO: 415535 - DNA, 502 bp, Homo Sapiens
  misc_feature (79)..(89): n is a, c, g, or t
  misc_feature (292)..(292): n is a, c, g, or t
gtggaccaaaaaaatgttggcttcttgtggtggcaattttaaaaaaaccaaagggctctttaaaaaaccctggaaattnnnnnnnnnnntgttcaaacctctcgaggggggaccgagtgggggcaccaattaattttccaaatccgcggccctttctcttccgaagaaaagtcttttatgaacaactctcctcgatgtcccaaccctcctatccgcatatatccaccccggggaatctcgcgggcataacaggtggggccagagctctcctgggctcttagaccgcgggggnggggatctctccggcaaggtggttttctcccctccggcctgcaccagagaaaaacgcagatgcgctacgaattcttccccccccaaccgaccgaacagcaccgcctcaaacaagacatcaccatcccatcgtgccataacctcaattcggaccatagacagcttcacaccataccttcctcctaggcatacaacctgacgtgcagaagtc

SEQ ID NO: 415536 - DNA, 1263 bp, Homo Sapiens
  misc_feature (54)..(67): n is a, c, g, or t
aacacacaccaacacaacggggtgtgggcgggcccccccttgtgggtttttttnnnnnnnnnnnnnntatttttgtgggggggagaacttcttttatgaaggaaacaccgtcgccgcacaaaatatgttgtctctctctttttgttggtgcaccacccaaaaagagtaggagggcgacagagggggtcttattcatcacaccacttcaacatctatctttttgttgtctgtcgccgccgacatacatctctttgttcaccatccgcacccactctgaaaattttatttgtgcccgcacggaggggaggggacagccaccattcttttattcggcgccagcggaggtaatagaacccccacccctcaattgttgtgagtggtgccttcctctacacaatagaaatccgtcgtataaatattatttaagaagggggtgttttgcctcacccacatctatcaacaagaaacagacctcagtgatagacacctctactttcttgtggtttcttccctccgtgttggtagcacaccaccactatatattttcattacgcgcgctggatagacctctcaacaaaataatgtttataacacaacgcgcgcctttatatatagaagacaaaaatagttttgtgaagcccaccccctctttttctgtttaccccacgccgctgctggtggtaataaataattgctggtgggccacactacgctgggccctcctataataaagatagagtggctcttcctccctgctctcccctccgaatcacagatatatgatgttccctctttaaaaagaggagggctgcttctcggactacctatctctgcctgcggacaaaacttcttttaacaactgatctgcctttctactcttcctacgagccactctttcagacggagctctactcctactttatttactctggttgctgtgtgagttattcggaggagagcttctcccccattttttccactattattatggcgggagcaaactttgattgtgatacttttctcgtgggggaatatcaagcgcggccctcttgagcagagaaaatatttctttggtgcgatttctcctcggagacaaaatttacattctgcatggtgggtgtgtggagctgccctttcaaccccccgttgttcgtcgtcctgtatcgtacatcatccgcggagtaattcgcgcagagcgcacccccccctttctttcttgggcggtacacacgacttgtttctctcgttgttgttccccacaaa

SEQ ID NO: 415537 - DNA, 1000 bp, Homo Sapiens
tcccccctccctgaaaatatgtgggagcagagcgcccgcaccgatctcgtggcaccaccctcgacaaacgaagggacgggcgctcactcgatggggcgaaaaagaatgcactccagagcgccggcgggggggctccgcagagctgtttcctggggcgaccccgaaaacaccatctgtcgctaccgcggcgggatctaaaccaaagacgtgggatcacctcgtcttccgcgacagaaagcgcgcgtggatgcgcgagggtgccccccgcatccgaacacagcagcgagcggaggagacaacaaaagatagacacgccctgcgtgctgcgaggaatgcctcgcacgacggcccggaccatgcctgcgacaggtcgaaactcgagcgcgcgcgcgagcgcttcacatccgcgcactgagcgatgtgaacgcagtgtgtatagcgtctattgctgaacgcagtgtggacacaccccagacattctatctctgctcatgctgttcactaacagctgggggtgtcgtgcctcacatcagcgaatgtgtgtagcgatgcacaatacgatggtcttctctgcttgggcccctaacccaaagcatgagtcttgttgtaccgctctttgtctgccttgtggtggacaactaactaagctctctgcgtaccacaaccaagaaagcatattcctctcttctttctaatgaaaaataacacacgcgagggtccatgtactcaccactccgcgcgcacccagcagaccagagattaccaacaaacgtcaacttgtcaaggcaaaagaaacacaccacacccgccctggcgagaggagagggtcgcgacaccctacacgcgacgagatgacgtggcccggtcaacaatcgattccatcagtctgggcggcagtggatcacatgaatcaacggacactccttcttgagacaagaaaagacaaacagcacaacagacctgtcttcccaaccagcaaaaacatcaggtggggggcgtg

SEQ ID NO: 415538 - DNA, 604 bp, Homo Sapiens
gagcgggatacgtaccaacggagacagagcgggacgacaaaaaccaggtactacaaccaacgctaccacgcttaactccgcacttcgtcagtaggagcgggcccaaacaaaaagggacacagcccctttacatacccacaccggaagagaaacgagcaacagagacacagccaccgcacacaaaagaaaacacagaagaggcgggaggcccgacaaccacccacccaagcagcgcgagcgcgagcgagtgaccacgaaagcctcacattgtctcaacacaccaccgcacaccccacgtaataataacgaagggcagaacacaacagaaagagcgagcgcggcaccacagacagcgacaaagaacagcacagacaacgaaaacagaagagagcgacgccgcgcctcgtgtcagtccgaagaggggcggcgcccaccagcggagccaagagacagcagcaaaagcacaacacggggcccgcccaaccgcgaccgccgcaacacgagaaacgacgcgcgcccctcccccacagaaaccgaagcggcgccgcccggctggccgcgccccacaccacccgcccgaacaaacacaccacagcagggcgga

SEQ ID NO: 415539 - DNA, 1171 bp, Homo Sapiens
  misc_feature (67)..(77): n is a, c, g, or t
  misc_feature (387)..(414): n is a, c, g, or t
gtgaaaaaaaggctcttttgtgtgtgttataaagtgatctccacggggggggtcccttccccggcgnnnnnnnnnnnaatctccctccccaggagtggccccatgtgtgggtgggaagtagaagagctcctcaaaagcagcatcagctacaaaaaatgatcatgattggtaaggatgattgtacatgttgattgtactgtgggtagcacacctgttaatagagaaacacccactgtttcctcacctacacagtgtttcgtcttgttgtgtgagacacactccacaaaggtaccgcgggtggggggcaagcaccgaatcatatatctcccttccgcaggaatgtagagcgaggggcggcaggggaagaggcggcaccaccctcacacnnnnnnnnnnnnnnnnnnnnnnnnnnnntcacactataatatagacacccccacaaacactccgccgaggagagagaaaaaaacggagtgggaggcagcggagacgaaacaccaccaaaaaaataagtcatcgaaaaaaaggggggcggggaaacaattattcatctctcgacagcgctcacacaactagtgggtgtgggtcttttaattcaacacaatcctaagtgttcgtcacacacccccctgttttggtgagtaaaaaatcaccatcatcctccaactgcgtccgacagactgatctcctggacgaaccgcgactgcaaaccatcccgtgggtttgtttgtattggtttagcgcacacaccatctcgttgtggtatctcaattatatgtgtgcgtctccataacaaaactatgtcgtgactattactagataggatttacaaccatctgctgcgctctctcctgtgtggtgaagaaaatacacaactgagttcattctatgccggcaccacctcgatgacatgtatcgatgaataaaatcaatctcgcggacgataggagtgttattgactgatatggccgcgactggtgagtgtgtcttatctattagaaggtcggaggagaaacacaaacaaacacggtgagtgttgagatgatagagtagatattaccgatcgaacaggacggacattcgtgctgatgtatattacacaaacaaaaacaaaaggcggtcgcagtgatgttattaaaaaacacacgtcccgaccgagcggggaggggcg

SEQ ID NO: 415540 - DNA, 594 bp, Homo Sapiens
ctttctactgcccccccatcatcccccgtgggggactactttacatcgacacaccacaatgtcgcccccacgctcacaaggcgggagggggggccgctaccacatcatcagcagtagcactgacataataacctgacacaacaacaaccgacaccgcggcgacatgcttcatcggccctactcaccacctgcctccccgcagagggagaggcggggcgccctccacaactcccgggcgagccaccgcgcgcgccaccacaccgaccaggacaagacagcacgcaagtgcaacgaacacaacagctggacccgccactccaccccagctccgaggcgggctcattcggacgcgacagcacccacccgccgcccgacgcacaaaccaacgctgagcaccagagaaccaacttcgaccatcgcccctcgccgacgcctccacacaacaaaaaaactaggcgccggcactgccttccttccgcgcgcgaaacagaaacaccacgccagatgcactatcccatcacggttgtggcggccccccacaacccacccgcccccgaatcacgcggtcccgggccgccgcaagcccgtcccgca

SEQ ID NO: 415541 - DNA, 597 bp, Homo Sapiens
aaacaaccaccaccaacggtgtttacgggccacttttgtgctcaccaaaaattggggcacacccctctgggccatgggagtgtgcaggggtctctccacgagaagaaaaatgttccccgggaccaatctccccggggtgtggttgccccttatggcacccacagtgttttgactccggggcggccagttgaaactctcttctccacacacagggattattaccagcgtcaccaaaaagacgttttggtgcgcatccttgtggcgcctcgttacgtagtataatcaaaaactcgtctgtctatggtgagaaggaaaaaactttccgaagtggtgtcactcattttgttgcgcctcaaaaaagccgcggtcatggaatacccaaaacagtataccccgtttgtgataaaccaggagcggggtcaaatcttggcgcgcccaacacgagcggacgcaacacacccgggggagaacacaacgtgtgttcacggcgagcaatcattgacacgaagaagcagcggtatgcgtggagaggacaccaccgcgtgtctgttaatgaggcctccagcgacccaaaacaggcaaggagtagacccgcaa

SEQ ID NO: 415542 - DNA, 763 bp, Homo Sapiens
attggggggaaaaaaacacccgcgcggggagagttggggagattggggagagggcaatcaaccgcaggcggtgcgccgacaaaaaaagttagggataatcaggatgacccttttgcgcgaacccgcagcggcggcaaaacaagcaggcgaggcagctcacggcggaggacgcgccccacccatgtggtcggcccccaagaaaaaacgacaaggcacagctgcggcagctgccggaccagaggggagcggaggaccgcacaacattgacgcacggaggacttacagctaatacaacaccacgccgagcgcacgcgtagtagtgagagcgtgaactctataacacacacacccaccacaccaataccacgccgttatgagcacggagggggcgagcacccaatttagaaaacacccacacaacagaagtagtgacggcgcataccctcaacaagaatgcagccccaacacaaacgagagagacgacacaacaactaaacttaaggagcgaggaatatctccccctcaccgccgagagggagtgacgtgatgtcaacaaaaaaagaacaaccagcactcggggtgccacccataactaagtaacataacaacagatcgagaagagtgacaatgactgcagggagaccgcaatccgctccgtgtgtgcatagccacatcaggcaggccggcaccgcaagagaaaagcaccccacaaactcaactgaagcgggacgggcagagagtgatgctgacgccctacccacac

SEQ ID NO: 415543 - DNA, 839 bp, Homo Sapiens
  misc_feature (100)..(108): n is a, c, g, or t
  misc_feature (384)..(384): n is a, c, g, or t
aaaaatcgaaggcccctctccccctcttttcctaccacgcactctgtgtataaagggggaaaaaagggtgttcccccaaaaaaactccccttttattcannnnnnnnnccaaaaaagttggacaccaccgagaggacgctcacgatatattccgcacgcacacccagcagtgtgtcgccacagaagaaagccgaccgggggggaccccccacagaaaatagctctctaatagaacaaagaggtggcgccacagagaggagctcctcgcagggggcgggggtgccaacacaaggtcgtctgcacgacggagaagaaggtgtggcccgacaacaaacccccgccgcaccaatgtggtcgcgaagaagtcgtcttgggtcgcccatnagaggggaacctcttgtctctctcttggaaaacaggagtgttaacatatctgtaatagcttgctcttcaacaacaaagaagggagcgagcgagggcgcagcaagttgagtcttccctctcacacagaacagagagggtgtgtgtgacaaccagggatgcgaagcatgagtgggtgtcaaccccacgcggtggggtgctccctcaagaaagagagaggggtcgcttcactctcttttttcgtcacacacaagaagaggggcggggctactactactcctcttctgtgatacgcgcgcggccgcaccagaacgggtggacgcaagtgtgtgcttgcatacacagaacagagagtgtattcctctctcgcccccaatttatagtcccaccacgctcgctgcgggatagatgtgcctatcatacccaaaagagctggtcggcattctcgcgctggatta

SEQ ID NO: 415544 - DNA, 544 bp, Homo Sapiens
tccttcatggaaaggagttttgtgtgtttgggccccacaaaaaaccgggggagaagagcgcgcgcgggggggagtagtacaccccgtggtgtgttgtcgcagtggtgttgttgtgtgtccaccgcccctcgctgggctgatgtgcgcggtctgtgtgtgtcgcggcgaccccttgcgttggtgccttggggaggatgtattattcctcctctttcacgaagcatccttgcgtgtgatagcagctcttcgtgcagtgtgtgtgtacattgtgaatctcgcctggagagcctgctgcacgacaggttgtttgttgccagagaaaaagagttcatctatccagtttgtgtgcgcgcgacaaaagagaggtcgctaacaaagaaccgatgatgtgctcccgccgtggagaaacaatgcgtcgaggtaggtagggcccccctgcgcccactaatataaaagaacttcttctctcgcaccagaccgagagagtggagagagaacctcctctccaaccaaagttgtgtgagtaagtggaaaaatgtgcgcg

SEQ ID NO: 415545 - DNA, 573 bp, Homo Sapiens
  misc_feature (97)..(105): n is a, c, g, or t
  misc_feature (218)..(228): n is a, c, g, or t
caagggagggagggtagctcacgacgcatcgcggcatgatcgcccctcgttacagccaccaacaaaacaaatgatgcgtcgcgcacctactacgacnnnnnnnnnaaaaaacaaagattctattatttccagcccgcgatggacaccacggagaaaccagctctgtagtcatcatggtgtgtgagacgtagtcacgcctcgcgtgatggcccctggcnnnnnnnnnnnacgaccactaactgtggtttgtgtgctgacaagaaaaatctcccctgctctccaattaagtatcaaaaaacaacgtggtgtgaagaataaaacgagattactttctttgccatctgtctaacaagaataatatttcccagtattgtagtgactccaacaacaaactacgctcatttctttcactcctttctgttggaacatcacctgcaccccccgttttgataaaggggacgcctatctcacccgctgctggaataattacttctctttctctttcggagaggacgactaacaaacctggcgagggtgaacgaggagaccccatctctatcttcctaatatgta

SEQ ID NO: 415546 - DNA, 1044 bp, Homo Sapiens
taaaccccgggggggaacggaggtaaaagaacgtccaaacgctgggtttgggaaaagggaccatcaaatctaaaaaaccgaaaccccgagaaaggggtcatacacagagtgcccaaaaaaacgaaacccatcggtgggcgcgacccagaataaacaccaagctctccaagaaaatatacagagaggtaacagtgcccacacagcgagggaaagatcaaccccacaattccttctgaccatcccacgaccaactgtacctctacactcgccagccacgaagaaaacaccagggcgcccctcggggagaccatcaaagaggagaagcaacctctgcctcctctcaacaccccgtcggcacacaacccgcagagagcgcggggaacagaagaacaacacagcgcggcggcaccctcaagtgggcacacccaactctctcagagaacacaacagtctctgtgaggcgcacaaaaactccccgcaaaaacaacccgcgaacacacgagcggtgctgcgcacaaacagagagagcgtcctacatcatcacaatgtattcgtcttacataccgcaccaaataagccactccaccaaagagagctgcggatacaaacaagcagcaaaccaggacacacctctcgatcatatccaaaaacctccccgcccgcgagaagagagcgctagctcacaaaacaagagttccaaaaccagggacaggggccataaaaaaacagagggagttggtgtcaaaaatcccatatatgggaaagacacctcccatcgtactgttatagaccaacctcctagcattacatcctatgtcgccacaagatggctccacggcaagggcttactcaaactaccatctaactgtgtgctaccactacaacaaacatcttagtaggcggggaaggagagacacctccctctacttcataactccacacgactgacctactattagaaacgcacaactagcgtagtcgggtgggggcgaccacacacttcttgctgggaaaaccactcactagaacggtgggaacacccat

SEQ ID NO: 415547 - DNA, 1249 bp, Homo Sapiens
  misc_feature (50)..(62): n is a, c, g, or t
  misc_feature (1070)..(1070): n is a, c, g, or t
attaaatatataaaagtttgttcccacaaaaatatagggggttttttttnnnnnnnnnnnnntttttatcccataaaaacccgcggtttctcaaaaaaatcacacaagggggttgttccaccatgccatgtctgctgacagaatatttgttgtgttcaccagcatccatattagcgtgtcttgctccaccacaggtgtgctgccactcgcgtggtgtgttatacacacacaaatgctcgcccgtagtggtgtcgtacatcatcatgtacaacaaataatactttttctcgtgcgtgggcgtgacatacctacactttgtgtgatgaataaacaccactatatgtactttctagagcgagggggggccgaaccagaccaacagctgtgtgtcctgacacaacctctacactcgcagcgcactcacgcacgatgctagaagatatctatttcgtgggcgcgtccgtttgtgtcgtctgccacaacagaaaacatcatctccctttattatctctcacaagcgcgctggcacatctctcccaccaaaaaagaagatataatgctgatcttcctctctcttgttgtgagcacaccaaatatatttgcgtgtgccgccgatggtgtttatcacagcacgcccacggatgtggtgacatacctagaatagagagacgcagttcctttatatttcatattatctctgctgctgctatataaaccacagcgttgctgcgacccatcttattatgatcagctcagcgccctactttattatactgccccaactctcacactagagacaagaagtcggtgtgtttctaaaggacacgacattccttctgagactataatctaatctagttctgtccgccctccctcctcccaaaacaacagccgtgtgcgtcgcggcgtgggctgttctaccagaacacacacatcaacgacgactgagcgtgtcgtgtcctcacacacacacgaaagctcgctctccctcctgtcttggcgctcaatcctcctcttccagcagaggtgtctcctgccgatccaaacaacaacacaccgcgcgcggcggngggggaggcaacaaacaacctatagtcagccacgcgcagtggacacagactcaattctgtgaccccccctcgtgggtgtacaaatctgctcccagcagcaaagaattccgcaccccaccatgacttcatccttcttatatgccacacacgcactatccttcttctctcgtctttcttaa

SEQ ID NO: 415548 - DNA, 1500 bp, Homo Sapiens
  misc_feature (72)..(83): n is a, c, g, or t
  misc_feature (460)..(472): n is a, c, g, or t
  misc_feature (762)..(762): n is a, c, g, or t
tgtaacaccccaaaaaaaccgggtaattaaaacacttttgtaaggagataacaaacattattatcgggcgannnnnnnnnnnntgcatataccagcaaaatcagctaaagacgccccgtggtgatattcttcttcccaattgattgatctatgtctcgcagcaaggaacaactgcagcatccaactaacgagccacgccatggccatctgttgatcgcccttacttctcctgtgtggaagaatggtgcggaccagaatgaatcttcttccataacaatttgtgggaacgggaggattactatttctctgtgtgtgcgtgagcatagtgtgtgtgtcgtatacacacggtctcgacgtggcctctatatacaccttctcctaccacgaccgaggagggtctgtgcggtttctctttgcctgcacaaagagccgagtcttctactctaataaaccctaccannnnnnnnnnnnncaacaccccccatgtgtgtgtagaagaaaaacccccctctctggtgggggaaacaacctctgtcctgtttcctctactaacagagaggatgtggagagcgggctcttctattctggtggagaagcgacgacaactgttgttgttctaacgcggtgagctaaagagggaggagctcctatccatgtggtgctgccacgcgctgagtagagaagcaaccctgtgtgccctcgtgagacatccctctcatcctataactcgtgcgccgtgtgaggacaatataattaccgccnccctattgtgcttacgcttcatcttctcttgtctaaaaaaaacagtggctaagaacccccctcacctttcttgtggggggcgacatgatccgcggtggttcgcatccctcacgccaggaaacacccctcgttgggtgtgggacacaacatgtatggtcggcgcggtcattcatccatcaatactgagcggtacacaacccgctcgtgtggcggccacctctctccctggtggccgtgcgttcaatgattagccgcgccaagcatgcgtaatctcctcgcgttggtgtcgacaacaaccacctcgtccagctgacgacctaaccaccagtgtattgtcatcacacgaacgagaggagagtgaagggcggcctcctagatgatggtactcaccccacaatgctggctgggccgctaaggaaactagggctgtctacatgtagagcggggtccagccacatgtgtggcgcccctgacacctattgttgctttgggcagtaaaccacacagtattactattgagccgctcgctggtggtcaaaacactggtgctggcagatcccgccacagcaggcgctcctatctaacaggcttctatgagtggctcacctctcgccggccgtagttatcacagtgccgcggtaatcgagacgtggagcttggcctgtcactaccagaagacgtggtttctgtactacactctgtgttgtggctgctaccccccccacctagagtagaggc

SEQ ID NO: 415549 - DNA, 937 bp, Homo Sapiens
  misc_feature (193)..(202): n is a, c, g, or t
  misc_feature (617)..(630): n is a, c, g, or t
  misc_feature (637)..(698): n is a, c, g, or t
  misc_feature (833)..(891): n is a, c, g, or t
aagaggacaacaccctcgttcgatccactcagcgagcggcgggcggcagcacccacccaccaagaagaaacagccaccagagcagacaagaggacacacattgtacgcaccccaccagagaagcaggagagaagcatacaaagcaacactcatcactgcgtagactcaacaaaacaaagccagagataaacgnnnnnnnnnngaagaagcacgcacggcacgcatctccaattcactcatgtaactcaccaaacacacacgtgtgcggggggagggcgcgccgcgcgtgagagaagaaaaaagaaacacaaccacaccaacggaatggagtgaggcgagccgccagagcggagtagaacaaatagagaaagagaagcacgaccaacacacccgacacaaccataccaacaaatcaagtgcgagcgaccacaccaccagacgagtgagagtagagcaccgaacacaccacgaccagaatggaagtaacaaacaaagatgagcaatacgcgagcgcatcgagagcagacaaaacaaagaaaaacacaacaatgagtgagaacaaccccacccgatcacactcgatcactgcagacaaacacacacacactcgccagacnnnnnnnnnnnnnnacaacgnnnnnnnnnnnnnnnnnnnnnnnnnnnnnnnnnnnnnnnnnnnnnnnnnnnnnnnnnnnnnngacccccacgcccaagagaagaaaacacgaacgagtgataggaccgccaggccacgagagaacaaaccaaatcgagcaggaagaggccaaacaacagagacggacgaacaaaacaaaagaagagcgcatcatgannnnnnnnnnnnnnnnnnnnnnnnnnnnnnnnnnnnnnnnnnnnnnnnnnnnnnnnnnngcacacaacacaaacgaagagacaagactccaaccacgaagcagac

SEQ ID NO: 415550 - DNA, 619 bp, Homo Sapiens
  misc_feature (171)..(184): n is a, c, g, or t
cttaaacggggcggcgaaaagagggggtgtagccagcggtagtcaccaaggagcgaggagggaggagttcacgcgggggtggcaaagagggggggctcacagttgttttaaccggcgcacaaaatatcaccaaatcttgagggcccaccacagcggtgcgaaagaataaannnnnnnnnnnnnncctcctcctccacaacaaccacatattaggttctctgcgaagaggaaaaataagtggtgctcccaccgtaggggaccccactgtgtgtgtctttgtgttttcaaacagcgcgatataaacagaggggcctctctatcaccacgttgtattctttttctaccaccaggtgaggtataaggagcaacacaccttctctctctccagagaggtccctctcagggagacaaagagaggtaggaacacgcgcgacgaggcacccacaaaataataagtaacaactatccgtggcgaatgtatatcaacacccaacaaaacactgttgagtgaggcgccccaccccacaacagaaaacacccactctattgtgggggcgaactacaaagtgatgaagaacgacccccaagcgggagagcaacaaccacaggcggcgccggc

SEQ ID NO: 415551 - DNA, 1244 bp, Homo Sapiens
  misc_feature (167)..(167): n is a, c, g, or t
  misc_feature (213)..(213): n is a, c, g, or t
  misc_feature (434)..(450): n is a, c, g, or t
  misc_feature (513)..(521): n is a, c, g, or t
  misc_feature (813)..(822): n is a, c, g, or t
cagagatgggagaaaagatcgccgtgtgttcacgaaagaggatgctcggcagatattgtccccaaaacgaaaatgatgaaggaagacgcggggagaacactaaagggtgcgtctggggggagacctcgtagtggtggggggtgacccaacccttcacaatcacacgnagggttgtgcaccagggtgttgtgaaggatgagaagaggaagaccncccgcccggtgggtattagtgtgcaacaaaagcaatcacaagacgccggagcagatataagagccacagagcgaacaaaaacggtggtggagtggagaagagaggcacagagtaactctaccagaaaacatcctctgagtgccagagggataccccccagggggtggtgtgctcccacgcggggccacatgtgatggaattgttttgttttgtgatgcacnnnnnnnnnnnnnnnnngtggggagtggtggtgaacagatagaggagaggagttgaaaaaacaaatagaggggtggaagnnnnnnnnntgtgaattgtgtgtgtgggagggagagagaggaaagaggataaaaatagtgagagacaagtgtgggaacgaagagatggttgacgtgagagtcggggcgggtgccacacacaggcagcactaacataggagcaaacagcaaccagaaaacgcaaggacatccccactagaaaaatagcgctaaggagagacacgaacaccaaagatcaagggcacacacaccacacatttgaggaagagaacaccacggggggggccaccagctaataaaaaccaccacaggtcggcgagtnnnnnnnnnncactaccaacaaaaaggacacgcaccacttggagagccacacaagaaggtgcacaacaaaatgggagacaccaccacacacgaatgaacgacagagaaaaaagagggggaggtacgaccacaccaccaacatatactagaaagaaggagaaaggagaacgaaagagaagcaacaacagacgcaaccaacacagtcagacgagacaagccataagaggaaacacaacaactcaaggaggcagacgagaaacgagagccgcacagaagtactagccccacagaaaaagaaggggcgactaccaccacgctacggggggactcttgagaacagcaagctgggaccccacaccccaccactagacagagagaaaaacacaaacgaggacccccccggacgtgtagtagaaaaagagaggaagtaat

SEQ ID NO: 415552 - DNA, 1499 bp, Homo Sapiens
  misc_feature (58)..(153): n is a, c, g, or t
  misc_feature (289)..(307): n is a, c, g, or t
  misc_feature (378)..(438): n is a, c, g, or t
  misc_feature (602)..(665): n is a, c, g, or t
  misc_feature (862)..(906): n is a, c, g, or t
  misc_feature (1193)..(1193): n is a, c, g, or t
caacaaccaagcacaacacgcgaagaggggtgaaagagaagcaaggaggaaaaacaannnnnnnnnnnnnnnnnnnnnnnnnnnnnnnnnnnnnnnnnnnnnnnnnnnnnnnnnnnnnnnnnnnnnnnnnnnnnnnnnnnnnnnnnnnnnnnnaaccgacaaagacccaacacaccgacagaggagagagaagcgagcagggcggacgagctgcaggcgcgacaaagcagaacgaacgaggcgcacgacgccagaacgcgcacgcgcagacagacgcacagaaacacannnnnnnnnnnnnnnnnnncgcagccacaaaaaaccacactcaatcactcaaaacgaaaccaaacaccaaaaacagaggaagacaaacannnnnnnnnnnnnnnnnnnnnnnnnnnnnnnnnnnnnnnnnnnnnnnnnnnnnnnnnnnnngcaggagggaaacgcaacaacggccggcccagaacgcgcgacacacagcgagaagacagaacaaccgggaaagcacccaagcacgaacagacaaataacacagaaaacgcaaaacgcgacagaagacgagcaacgagaacacaaacaacaagaggaaacactgnnnnnnnnnnnnnnnnnnnnnnnnnnnnnnnnnnnnnnnnnnnnnnnnnnnnnnnnnnnnnnnngacgcaacacagcagaagaaaccacaacatctacagcccacaacacgcaagcagagaggaaagagcagagaggaagacgaccaccaccaacgcaacaaagaccacaccacacgctcacatgggcgaccacagccaaccgaacaagaagtaacaaaaaacaacccagagacaaagcgcacgagcacaaaaagaatacnnnnnnnnnnnnnnnnnnnnnnnnnnnnnnnnnnnnnnnnnnnnngaggacgacgagaaacagagacagcgcgcgacccaccaccccaccaacacaacgcacaacacacacgcatgaccacagacaaaaacacaaaaggatcaagacaacagaaaagaaccgcgccaggcaacgaagaaagcaataacgcggcaacaagcaccaacacacacgaacacacaaacaaccagaaagaaaccgtgcacgaacgacaacaagacacaacaatgctagaagcaaacatagacgcaggaacaagacgagacacgaagcagggaccacagacacgagcnaagcacaagcggaaccgcacggcagacaacaccaaacaggacaacacagtaacaagcaagaagacgaagcagcacaacgaacacacaagcagcaccagcgcacactcagcgcacagcgcgacacaacaagatccgcacacagacaggaagatcagaagagagcaagccaaaagagcagacgaaaaaaacacgaacaacaaccttcacgacagacacagcaacagacagtgaagaacgacccgagtgcagcaacaggacgagagaacacactacgacaacctcacggcaacaacacaacacaaacag

SEQ ID NO: 415553 - DNA, 1447 bp, Homo Sapiens
  misc_feature (1387)..(1396): n is a, c, g, or t
gttgtacacaaaaaacccacaggggtcctttaaccccatgtttgggggaatttttataacccttggctcttaaaagtcgtgggggaattaacagagagccacaaactttagaggccccagtagattttggccccccctagtgagagcgggggagatcctcaactcggttattctgcgcacatggtgcagatgggtgcctctgagatgatgatctcaccaccatgttttaaacgcacaaaaggcgcgctctattgtgttcctcccgagatagtcccctcgtgtgtggggagacaggcgcaacaagagtgtgggcgcaggtgcttgcctcccggggggagacctaaaaagtgctccacaagtcttgaggttgtccccctgtgaaaaactgcgcaagaagagggagcacccccattttataaacaccaacaggggaccagggacaaacaaaacaaccacacgcctccacaggggagacccacggtgtgcggttgtgttgcacaaactcacaccacacaccaagtgtgtgagagtccttatgtgtgtgggtctctcctccccacccagaaggggtgtgggtgcgacagagcgggtagatacaaaactctgctctgtgtgctcgcaaaaagagaacagcggggggggctccctactctatagagtgagagagaagaaaacgttccccccttgttttgtggcaccaaggcaaaggtactatattttctctgtggggcgccgccgcgggggcggcccccaacaccaaaagtctctctcgagatggaaacacatcactactactaatccagaggtgaggcgaagagaaggcaccaccaacagtagagactctagagacacaccactagcgtggtgggagcggacgcacgagcctcctaaaaaacgaccacccgcgagttacgtgagaaaccaaaacaactgatgatatatgggggggaggtgacccccaaaacggccccccgtggatggaacacaccccgggggggaatacaaaacaccggcagggaggagggggcccaacttactctaccaggccgggtatcatattaaagaaagaggagaaggggcctaccctcggatcacggcgatggatgaaacaccgcgtgttcatattatgacggcgggcggccccactactttaccacaccacacggggggggtgaagaagaggcccccctatcagggaggggtgaggaaccgtcgccggtgtgaccacaatggaccgacaacaactttcttctaacgacgcgctcttttctctccacaaccacaaggggggtgattacaccacaacctatttttctttagaaccccttcccgtcgtggttatctctacgcacaacaactgttgggcgggggccgcgacaacccacannnnnnnnnncccgctgggaggcgctcattcacttccccatgcgagaggcattcttcggcg

SEQ ID NO: 415554 - DNA, 1200 bp, Homo Sapiens
  misc_feature (74)..(82): n is a, c, g, or t
  misc_feature (894)..(894): n is a, c, g, or t
atttgataaaaaaacacggcgggttttttaataaagagaaaggagaagaaggaagggggagaataaaacaagannnnnnnnnacatggggaggagcacggcggggcgaaccgctcggccgcgcgtgcgggcgcacatcttgtgtggtggggcccaacaccaaaaccaactgagggagagatggaccaccaccctcaccatcaggagaaggagcggccgtcctagctcacactcaacagcacagaagaagcagccgaggtgaggggaaaacacacgacatgaaaacacacagaaagatgaaacagaaagggaagaggaagcgggcagccacagcacacacaacatgagagatcactccacgacacacgcgacgcgggcgggggcggcacacccacgacaacaataaaacacaacataagcacacagcagaaggagaagcgaaaacatgtgagtgagactgcgggcgcagcagagcacacacacgacaccagtggagtgagcgtcagacagcaaaagagcacgggagcgacacgcggaccgagagcgagaaagccgaaacgcagcgagactaggcaaacacacacaagcgcgtagatataccacgcgcacacgcgcgcgtgaggagggagggaagagcacgcgagcggaggagggacaagcaaaaactaccaagagacagaaaaacaaagtaacaagagcacgtgccgcggggaaacacacaagcgagcgcgggtgagtcgccagaagacaaacaaaacaccccactaaagagagcaggcgcacccacaacacacaactgaaatgtagagacaagcgcgtcgcacaccaccgaacagaagatgagaagaaacagccgacacggagactcaacgaaccaagaatcacacaacagccnatcacacagcagacaatgatgagaaggcgaggcggagaggatggacgcaaacacaaacacagaatcaccaccgcagatagacaagatctccatccacggcgccccgctggagacaaacactaccgctaagcaaaacacccaagccacagcgagcaggcagaaaagtccacaccataaccaaatccaaataaagtcatagaacaaccagacacaacacccagcgcgcggcaggacgatgaaccgcagaagcagccaacaaaacacaacaagaacggcggcacgccacatgcaagcaagcccacaccc

SEQ ID NO: 415555 - DNA, 1342 bp, Homo Sapiens
  misc_feature (214)..(214): n is a, c, g, or t
  misc_feature (436)..(447): n is a, c, g, or t
  misc_feature (502)..(511): n is a, c, g, or t
  misc_feature (577)..(640): n is a, c, g, or t
  misc_feature (707)..(767): n is a, c, g, or t
  misc_feature (787)..(904): n is a, c, g, or t
tttggcgccccccccaagatgaacgattctctatccagaaacacgattgggggtggggaaaacaacaacggtgtgtctagcggaaggtgaggggggtggtaatccaactgagagaaagaaggtgacgatgagaggagcaagagagggagtgatggtggtggtcactgtagagagtaatagtaagttatgatgagcatacgatggtgtatacaanagaagtgtatgtagaagggccgataaaggggagaggaacaacaccccgcaacgcggtaagtcacgaaatagagagggtgggtgggaggatataccccacaacacagagacagagtataggtacttacagacacacacaacacaaaaccacagagatgagggggaggacaaaccacccggagagtgcgcacaaacagagaagaaaacaacacaaggagcgagnnnnnnnnnnnngaagcggagggagcaagaagaagcacacaatgtgtatgtaggggagagaaacacnnnnnnnnnncaccacgcagcgaggcaaaacaacagcaaggaccaaaagacgaggcgagactgaacagaacaaatnnnnnnnnnnnnnnnnnnnnnnnnnnnnnnnnnnnnnnnnnnnnnnnnnnnnnnnnnnnnnnnnacaataaacaaacccataaccagcagagagaacgcaggaaagaaacagcgaacacggcagagcacgnnnnnnnnnnnnnnnnnnnnnnnnnnnnnnnnnnnnnnnnnnnnnnnnnnnnnnnnnnnnngacaccccaccgaagtaggnnnnnnnnnnnnnnnnnnnnnnnnnnnnnnnnnnnnnnnnnnnnnnnnnnnnnnnnnnnnnnnnnnnnnnnnnnnnnnnnnnnnnnnnnnnnnnnnnnnnnnnnnnnnnnnnnnnnnnggcggagagcacacaacagtagcagacgaggagaaagcaaggaacaaaacaccccaacacacaactagcaaaagaggtgaggtaagctgacgacaacaccccaacaaaaaaacagcacacaagaggacgacaaaggacataagagacagacaaacacaaacaacaatccacaaacataaatacaaagactagcacgaaaccaaatcgagaggtgagtacgaacaaagacaagagaagccaactcaagctcacgggaacgcaagacaaaaagcaacgaaatgatgcatcgacaacgcgcgacaagaagacaagagaccgaggagggaaaaacaacacacacgtcaaagcaagacgcaggagacacaaacaaaccacggacgcggcacaccccacacaacccaaacaaacaaagatagagagacagactggatgtgggga

SEQ ID NO: 415556 - DNA, 1702 bp, Homo Sapiens
  misc_feature (54)..(67): n is a, c, g, or t
  misc_feature (103)..(115): n is a, c, g, or t
  misc_feature (590)..(598): n is a, c, g, or t
  misc_feature (765)..(765): n is a, c, g, or t
  misc_feature (771)..(771): n is a, c, g, or t
  misc_feature (819)..(819): n is a, c, g, or t
gagttttatatactcccccttttttttgaattctcccaaaattgtgaaaccacnnnnnnnnnnnnnnttaacctaatgtgcgcggaagggaattagggggagnnnnnnnnnnnnnggtgcaggtggtaaaggggttattaggagttccctatttattaaataaggtggttccctccacagagggtggggtgaagcaggtatcaacatataccgcttgttgtacaatagcgataacaaaacagggtgattataataacttttacactgtatgtggtgtatatttttataaagactattagagggtcactaaataattgtgttcgccacagggtgtggtgttcttgtaaaacactctggtggcctaaataagagatattctctccacacctatgctaagcctccacccacattgtgggggggagcatccaacgggggatattaagccgccacataatccgcggggtgtgatgtgatataatataacactttcacaaggtggggtgacactgtaatcaatatgtgcgatgatacatgatgtatatttcttctatctctcccgacgtactaaaaacaatagacacacacgcgcnnnnnnnnncgtatgctttgtacaagtgagcgagagatactgatatataatatagtgctctcacaacaatatttattgtggagaggcggttggaccaaacaaaagcaacacgtggtgtgctgacaacaacaatacttggtgggtggggagacaataaactactacagaaggcgtgntggtanatatctaattatctctattgtatacacacaacacgctgtctgtggcancaaactcagttgtggctacctaattatataatacaccacgcgtggtgggtggtgcagcggcgatattataaacaaaacgcctgctatctataaaaaacgagagagaacactgttaatgtgagagaggaaaccgcaacgagatcctagacagaattatttgtatttacctaactagaagagggggggaaccgagacaacacacacatgttggcgatagctgacatcgagggaggaaaataacgtgagaggagtgtgatcttgtagaaaaaggtgggagaaactagcatattaccattttttttaacacaacagatgtgcgatcccctacttagtggagtaagcccctcctttccgaagaaccccactatcgttggagtctctacggaggattggaaaacaacaaacagctatctaaaacacttgttatcttctagttccacctactattttattctacagagagatcacgacaaacacacgacggatgggagcatactacacatactctggtgggcagggagtcggtaacacaactctccagacagacactaacgatcaatccaacaaaagcaaacaaccaatatcccgtcggagaactagaagacatcgtgagcgacaaacaaacacatccaacagaaaaagattatcacaccacccgaccacatgtatggtggcgcccacaccaaaatattaagaaacgctccacctatcacaagacagacaatgcatgaacgttaattcacaacacaccacaaccacagacgtgtggtgcggtgaccacaccaccccttgaatataacaacaccaaacgactgcaccacaaacatcaactcacgcaacgtggagagcgacaccccccagtgcgaaacacaacaaacccagg

SEQ ID NO: 415557 - DNA, 472 bp, Homo Sapiens
ttgtatcaaaataatgaagggagaaaacaacatggagatcaagaaatatttatttacacctctattggcaaaacatacaatgagattataggcgattctttcgtgccattattacaacacagagggagaaattatactggggtggagtggtgtggagggagaaaagaatgaccgacgacacgcgcggagaagtccaccaccggggggggtaaaacaaaacgagggcggacgctttctggccaccgacggtgagaaataggaagagaaaaaaagagcgacctccaagagaggaggggaaaacctcccgcggaaaaaaagatggtgttatcccgccccctaaagcgggggacacgcgggcataaatgctgccaacacaaaacctaaaaaaacaagcccccctgccctaaagcacaccagtgggggacccaacggcataccaagagaggcggaggggggagaataatctcctcac

SEQ ID NO: 415558 - DNA, 1449 bp, Homo Sapiens
  misc_feature (449)..(511): n is a, c, g, or t
ggtgggcagacaccagggatgattgtagaaaacaaaacaagaaagagggggggagtggagacagcaaagaacaccacgacagaagcgacggactggtaccaagaagaaagcagcggacaacaccaccacaacggaggcacaacacaccacaagacacagacaggaggaggtactagcaaacgaaagaaaccaatcacaatacgtagttatcctattagtctctagaaagaaactacccacaacacactcgcacaagcacaaacacgccacgggtacgggagagagtgtgattgacgccacacacacacagagtacatgtgtgaatatacaaagaacactgactaatacatagaatgaaaaaaaacgaagacagagaggaaaagacagcgaggaagagcggagcggcgcagagcgacaaacagagagagagcgcgatggcgaagcgacgnnnnnnnnnnnnnnnnnnnnnnnnnnnnnnnnnnnnnnnnnnnnnnnnnnnnnnnnnnnnnnngggaacagctaagaatgttctccacgctggaaagagatgagacgagagcacaaaagcaccacaaacaagacgaacagggaagggcgacgagaaaacaagccacacaaccgagcctgagacaaaaccgacacagcaccaaaaccacagagagacgcgaaaagagcacgaatcaagaataggagagagacagtagacaggccacgaggacagagcaggggagagaaaagcgagcaaccggaaaacaacacaagacaagaagacgcgcagagcagacacaaggagcagagacgacagacacacaacagctaaccagaggaccaccagacgaacaatactactactcaatgtcaatgacgcaagccaaacacactcgacggcaagcaacaggcagaaaccagaccgaacagatacagcagaagactgcgacgcgacaacaaccaacgcaaccaagcacacaacgaacacacacacaagacagacgcaagaaatgcactacaaagacgcacgatgggacgctgagtacgacaccccaacaaacaaaaaacagagacaagacgcgaggggcgacgacacacgccaacaaaccaaaacgacgaagaaaaaagaccaaacaacacacgagagagcaccagacagagccgcaagcaacaggaccgacgccagacagacacaacgagcgaacgcacagcagcgagagctgagcacagcagtgacacaaaaagcagaaaaaagtggagagaatacgccatcacaataccaacacgaacgcaagagaggcacgcgagacaggccgcgcccgcgcccgacgagagacacaaccaaaatgaacacaagagcaagccagcacaacccgatggagtccgtgctcctcacagacacgaagaaaatagagtccacacaaataaaaaacaaaacacactgagaggtgagagatgaca

SEQ ID NO: 415559 - DNA, 1026 bp, Homo Sapiens
  misc_feature (314)..(314): n is a, c, g, or t
  misc_feature (416)..(416): n is a, c, g, or t
aaagagggggagaaaatttttttaatataaaagtttatccaaattcccacccctgtgggttctacagggtggcttttcccaaagaggtaagtgtggggacacttttatcccggggcttttaaaagcaagggcaatacaaaaaccacagcacattctataaataaccccccttccgtgtggcccgcgttttcacaggcgcgtgtgtgggggaaagaggtgctaaatagcgcctgtatagtggggaatttctgctccttctcatcttgcgatggtgtgccaagaaaaagagagtgtgtaaaaaatatggacaaaangcccacacacaacattcgtgtggagcaagaggggccgcggggagcgaataaaaagcggggtatacggcgcgagggggatatatacacaggcggccccatatngcgggggagtgagtctcgagagaagatgtggcccgaaaagaaggaatatacgcgagatgagtgggccagcactatcacggtgttgtgttgtatataacgccaacaaccacgcgcgggtaagttaaactccacccatatttataaaaaagggcgtggcgaaacagccaccaccaaataaacgccggtcgggcgaacaacgttagctacagctgcaaaaccccagcgtgtcattatgggacaccaccattatctatttactcactcaaacgaagaagagagtatcccccacaacaaaaagagaagggactaataaaaacgagggggagcccaacaacaccttcacacgagaagtgaagattgtatagaagtgaccagcaatacaaaagaggagggagacaccccacaaatgagtgaccacaactgtgagaacgaacacacaagtgggggagggacaacatcccagagcagagatgatcatatataagcacacccaccaaagataagtagaatcatagcagagcaacacgagagtggagtaagcgaaccaataggggagggtgtgaggccgatagagggccatgacccccaccacccggcaacaagtaaaggg

SEQ ID NO: 415560 - DNA, 560 bp, Homo Sapiens
  misc_feature (437)..(465): n is a, c, g, or t
tgaggatctttttgtgcacaaaaagtggggtggggtttatatgagtataataggggcacgaggtacacctgatggtgggggaggagaaaaacacactgttcaacaaaaatataaagagtatatcttctgctcgatattttaacagtcttaatacataaaagagggctcgagagtgggatataatcaaaatatcggctgggttatatcttcgcggcgagcgagaacaccacgcgtcggttgtgttgtgtggagacaacaagtgtggtgcattatgagtgtggtcacaccaaaaagaagcccacatatgagcgcgaaaagtatggttgccgtggtgataaaaaagtgatgctcacaccacccgccggggcgtaagcagcgaaacaacacacgcggggggagaggaggagaccacccaccgcggcggtgctctcacaggnnnnnnnnnnnnnnnnnnnnnnnnnnnnnagaggtgcgctcacaggaggcggacagagagggcggggcaacaaaaaacaacgacctgcgcgctatattattgaaacccaccggcggggggaggg

SEQ ID NO: 415561 - DNA, 1176 bp, Homo Sapiens
aaaaaacaagggtttttgtccaatgaaaatccaggtgaaccaaagagtgcctctgaggagagaccttacagtggcacaacaacaacggggggttggggaaccggcagtggatagaagaggactgtgggggcgtaggtgagcccatggccaaacaacgcctaccacggtgggacactcggggggcgcccctccttcaacacgcacaaaaggaaacacagcccgagacggaactctacggagaaacacccgggcgcgacgtcgtgcatcaggatcctggaatccctccggagacagatccagaccaacgaggcctcgtgcacatatgggagatcgacagaaattgccgaagagaacaagataaaatcccttttctacaaccacgtttccaaatacgtgtgtgtccaacaaggtgttactggaaattgtggtggcaccccaaaagttctgattgaaagagaaaactgcgatagactatatgggatacccgcgcgagaacatcgggtgatcttagagatcacacggggaactcagtgccagcgggcaaccacccattgcgcgcgtggagggaacagaccgcgagatacaccacactccagaataaagtactcacgaaaacaccaacccacagcagcggagggagcatatccacacaagagagagaggcatcgcacacaaagggcgagggaccacagacaagcaccaaccaaaccaagcggcgccgagaaagtatccacgcactccgagggtcgacaaatcaaacaacatgccaccccgacattaggccacacaccacgtgtggtgctctgttcgggcacacaccacaggcggtgaccaccaggtagaaatcagcggtggaacaacaccggggcgggcgccctcccaaaggaggcaccaacaacgtggggacgagagaccaacaaataccaacacaggacatgaaacacaccatcgccaccacaggaagcgaacctactggaggaataagtcgaccaaaaatagagtcgaccccccaactattcgagtcattcacaagagtcatattgacaacagacaccacacagaaacgatcagaagcaggcggactcaacacaaaaaaagaagccacgaggggggaccccacctccagcaaagccaggcacccaacaccacggaccaataccaccgaacaagcaaacg

SEQ ID NO: 415562 - DNA, 706 bp, Homo Sapiens
  misc_feature (90)..(98): n is a, c, g, or t
  misc_feature (455)..(463): n is a, c, g, or t
gccccgcggagggtgaaatcccttttcttttggcccttttttaaaaaacgccgggaaacccccccgtctttatcaccaaacatggggggnnnnnnnnncagcgcaaacaatgtgccccgccccactcagttgaggcgccccagaccgtggtgggggggcacaacacacgaccacgaagcatatccaacacacacggggtgtgtaggggcgccatacgtggccaacacgcgtcatgttctttgcatcaaaaaaacatctggggctccccacaacacaggggcgggtggcgctgcattatacaaccaacaaaaacgacaggatactacgcgcgcggtcatggacgacaaaccaagtcgggagtggaacaacaccaaccggcggtaacgcacccgcggcaagactcgtcgcccccccacaaggatgagcctgcgcgtcgaccacaacgcgggggcaannnnnnnnnaaggagggccgcaccaaatagtggggagcaacgaaacactccgcgaggagagggcaccacaggggggcccacactcgcaacaggggaggcacccctacaccaagggggcaggagaaaaacaccgcacaacaaaacagggggaataccagaaacagcagggcgcaccacgagcaccaaacaagacaggtgcaaaacccccagaaaacacagtagcaaactatggcgggcccccatctaccccac

SEQ ID NO: 415563 - DNA, 888 bp, Homo Sapiens
  misc_feature (290)..(339): n is a, c, g, or t
  misc_feature (752)..(835): n is a, c, g, or t
acggagcgagaagcgggtaggacaggtcccaccacacaaaacacaaaaagaggcgccccccgccgagagacagaggtggcatccacaccacacgaagaaggggtggtagttaactgaccgatcagcgagcaagaacaagacagaatcaccacccaaaggagaggagagcctagcacgaaaaaaagaaaccaagcaggcggtaggagacaacaaccagggacaactctaccgcacgcagaaaacaaaaacacaccagaaaagaagagacagaagcaggaacgacgcagcannnnnnnnnnnnnnnnnnnnnnnnnnnnnnnnnnnnnnnnnnnnnnnnnnggagggcggagtcacagaacgaaaacaaagagcaaacaaaatcaacgacaacaaagaacggacgaaaacccacgccccgaaaacgtgtgggaatcaccacacacccacaacagggacaggcaggaaacaaacacaaagcaagcaacatcaaccaccccaccaacaacctaagaccaacaaaagagaacacagaggcaagagacaaacagccaagcacagcgcacccaaccgcaaaaaacaagcagaaacagccccggacatcaaaccaaaagaaagacagcatgaaaagccactacagaggaaagacaaacagaagcaaacaacggagggactcccaacagcagacacacagccacgtagaaaatacgagaaaagaacaacagacacaccacaccatgcgtaagccccacagnnnnnnnnnnnnnnnnnnnnnnnnnnnnnnnnnnnnnnnnnnnnnnnnnnnnnnnnnnnnnnnnnnnnnnnnnnnnnnnnnnnngcacggcgcaaactccaccaccgaatgcagcgaaacgaagacaaagaacaaac

SEQ ID NO: 415564 - DNA, 1666 bp, Homo Sapiens
  misc_feature (238)..(252): n is a, c, g, or t
aaaacgggccccacaggggtataaggggggtgcccaaaaaattatcccgcgacgacccttggtaccacacaaaaaagaagtccacaaagatgaagacggtgcaaactctgctgaagatcagagagcgcgaaacgatggttgtttcacggaggagcaccagagcagtctgatagtgaggcagaacacccctgtgttgtgaggggtgtcgcccacaggagagcaggtggtgtggtggtgnnnnnnnnnnnnnnnaaaggaacaaaatacaagggggagtggtacactgaccgaaaaaatacaacatggagcaaccaccctataagagacgaccccactgcagtgtggtctcaagaaaaccaactcacgcgaacacacagacacatgtgtggtggcgagaaaaccaccaagtgtgtgtgaagcacactactgtgaataccaacggagtgtgaggaggagcgacccacactctctgggcggaccacacaacaggtggtggggaagcgaggcgcgacacacaacggcaaatagacaacacgagcagagtagcagttgttataccaaaagacgatacgtgaagcaagatacgtggccctacggacaaagcgcagagacaggaacaataataacaaaaacttatgaggaggagagcacactactacaccacagtgttggtgttgccgttgtggagaagcaaaaccaccacctctctgttagtgggacaagacaagataatagatgtgtgggagtagaacaaaaacgagagggaaaacaaacacactagtagtagtgagagaaacaccactcacgggggccgaacacatatttggttagtgagcagagcccaacaaggtgagagaagacgacaacgatgtacccactgtacaaccaacaagacaaccgctctttagtgcacgaaaagagaaacccacacgaagcgcagcaagaacgaacaaaaaaggaaaacaaaagtgggtggagggcgacgactcctactagcagacaagagaggtacccagatatattagccagaaacaaacacacacaaaataaagagggacgaagcacacaaacaaaaactagatacaaaaactaacagcgaagtgaagacaaggatgagcagcagaccagcacagaaacgagagcacccttactgtaaactacaactagaggtctacaaacacaagagacgacacaacacacaaaagccaacgagcaccacaccccacccaacaaaggagggtatagagttgaggagccaaccacaactagactgtaagtagacaatggaagcagcacacacacccgaaagaagaaaagaagcctcaacacacagaacccaactggaggaggagactacacacaagcaaacacaaagagggagagataaaaggaacgaagccgacacaagaacagacaccacacacaacaacccacatcatggaagtagagagcaagaaaaaacacaccaccaaccgagaggagcacaagaacaaacaaagacagaacagaccagcagagagaagtagagaaaaaaagagaagtagaaggctagcagcggccagagataaaacaacaccacagagtgacagagagagaaagaagaaaacacgcacacccatagactacatagtggtgcgaacgccagcaaagagagagaagaagagag

SEQ ID NO: 415565 - DNA, 767 bp, Homo Sapiens
tggctcccccaaggctctttgggacttaaggggtggggctttaccccagtttctcatagactcttgtgtaatccggtccaaaaacgcaagaaaacacgcggtaacaacacgttgtggccacgggggacaatctttgcacattaccgcgggtggggggtattaatacttccttctcgagaggcaaccaacacgttttggtgggtctacacacagatcaagtgtgtgcccccggtatagatcaccctataggaggccccccaatagggggcccacaaaagttcgcctccgagtgtgcgaccattctatctatcttctctggcgcgcaaaagaatgtctcacttgcgaggagtactgtgtagtgttaacaacctcgctggggtggggacgaatactaaacatcttaccagacagcaggggcccaaaattttggagcgaaacgtgggtgttatcaaaaccagcaggtataactcctgtgggcgttatttcacgccaccgacaaaagactgtgagacagtctcctcaacccatgtgttgagcccccctgtgtgagtgggcgacacacatatctccaaccactcacaccagggggggagcagcgagacaaaaaatacagaggggggacaaaacacagcctgagtgatcctacaggggaggtccacacagaaatatcatatctccaccacgctgattgaaccgatcgagcagaaaacaagggttgtgggagaacgctctgtagattgggcgcccacacacaacaccacaatatt

SEQ ID NO: 415566 - DNA, 786 bp, Homo Sapiens
ccccaaaagggtacacaacgggggaaaaaaaacaccgcccgtaacccgcgcgggccaaccgccgagatcacgggcaatcaactttataaaaagacgccgcgcacatctgacgcgaagagaagatcccgacggcggggaggcccacgggaagccagcgagagcccccactattaagcggcggagtgtggacatccaccccgcgaaaaaacgcaggggggacagaacgacacagcgaagagacaacagcacacagacagcggacgacgacacacaccgaggcgagacgagcgagcagggtgaggagagatgaaacaccggaaagagagagggcgccgcgacgcgggggaaaaaaccacacagcgggagcggcaccaacgcgaggcagggaccaacctggagagccagccaacgcagcgggtgaggaagcaagcgagatgggcgagacagggagcgaacgagggagtgcacacggggcaagagagttggatgaccgccgcggacggctgtgtaacgacacaccccgcggctcccacgaagaaaaccaaccagcctgcattccaaaacaaaaaagcaggagagcgagaaggggagacgacccaacacgattacacagacctccacgcgacgcagaactgacccacagcgaggcgcactagcccacacgaacagacgaggagcagcaaacaaccacaatcccctccgacgacacggcacaacacagacgcacggccacagccgacgcgatctaccacgacagaaacacaacaccaccaccgcgaaaccaac

SEQ ID NO: 415567 - DNA, 811 bp, Homo Sapiens
  misc_feature (292)..(312): n is a, c, g, or t
aggtttctttcttcttcacaaaaaacctcacgaaataattcttttgcatcaataaaaaagagtatgagtagaatgtggcgacgccaccgcaaacaacttattttcttctatgctcgcgcatctttcctcccccctggtggagaaacaagaagatgatagcataactgatcgcgaggcactcctcgaggggcgctctttcgcgcagcaggacgacaaccctctcactataagacactaggagacagatatatatctatctatcgtctctcggagagtagatagtatttatcannnnnnnnnnnnnnnnnnnnnaaaaagataataagagagaatagcgactctccagtgtagtggctctgtcgtggggcgagccgctctctactatctctctctctcacacaaaaattatctatgcacctatagatagagtggtcggagcatagtctccccatatatcaatacaccgccggcgcgctctctctgtgctcgtcatcaccacaaaaatcacatatatctcttgctactaagcgggcgagacggagtggtgtctgcctgcgcacacatactaagacaaagaagagatagtctgtatctatacacacatagcatagacacaacacaaccacatagagcggctctcaacagagaggtgcagtgtgtgtcgtccacttctctctcaccaccaaacagacaaagcaatttgctttacgcagcaccaaacctctcacctcccccccctgcctgatgtcatcgtgtccacacaactcgctgagtaagcacagctcgggcagggagcgacaacccccgccaa

SEQ ID NO: 415568 - DNA, 956 bp, Homo Sapiens
  misc_feature (350)..(408): n is a, c, g, or t
  misc_feature (425)..(455): n is a, c, g, or t
  misc_feature (497)..(521): n is a, c, g, or t
  misc_feature (552)..(602): n is a, c, g, or t
  misc_feature (648)..(703): n is a, c, g, or t
aaaaaaaatcggaaccccacacaaatttattccgaagcctcattccttccgcactctttatttcctctctccctccataaaaagacgcggtgataacaccaccgaagaagaagaggtattatctgtcccacaaacaaagaagtggtggcgggctcatcttatctgtcgaggggccacaataccaccccttttctactacgtagtacacatatgttctctgcaggagagtgtgtcgtagaacaccatatatatatatcacctatatgtcttgtgcccccgcctctgtgtgtgaatcacacagagcacactgcagaacagcagagatagacacacacccgcgagtgagtgtnnnnnnnnnnnnnnnnnnnnnnnnnnnnnnnnnnnnnnnnnnnnnnnnnnnnnnnnnnngcagtagagtagagtgnnnnnnnnnnnnnnnnnnnnnnnnnnnnnnntgtagtgtgtgtggtggggacatatatattctctccgccgcnnnnnnnnnnnnnnnnnnnnnnnnnctctcccactatatcgccctccccgcggagnnnnnnnnnnnnnnnnnnnnnnnnnnnnnnnnnnnnnnnnnnnnnnnnnnngcgcgcgcgcggctgctctgtgggagcaggagtgtgtgtgtggcgnnnnnnnnnnnnnnnnnnnnnnnnnnnnnnnnnnnnnnnnnnnnnnnnnnnnnnnngtgtgtgatgtgtcatatctccgcgctgtgatgtgagtgcgagcgacgatgagctgtgtattttctctaatgatattatatcatcatctctgctgatgtgaggtgctgtcgctcgctccgctgatatggtgatatatctcatctcgccgcgagatgagcagcgcagaagtgatatgaggtgctctcctactactaatatcatcttctctcaacggataatgatgttgtgtcgtctactcatactacacacgcg

SEQ ID NO: 415569 - DNA, 548 bp, Homo Sapiens
ctggcaaaccgagggttttttttatttggtagctttctcacttgcttggggaggtgatttctgaggtccccccgaatataaaggtgccgggggccgcaggccggttacgaaaccgctaaatcggtcccccctcgtgtgttttgaacacgtggcaccctgaggatggcaggacaaccccggtggggatctgctccctacacctgttggtcctgttcaggcccctggactgctaggagggttgacatggagggctaacttcacacatactgaggtggggcggtgtctatgtgggtgtccaatgggcatgctgctctgaaaaggccgtgtcctcactcaggtcggggctctaccatggtgctttccgagaagctgttgaccgtccagggggaagcgccttggtatctgcctcaatcgagggggttcccgcagcctcacttgtaccccttctgtggacgtcttgcccgggggaccactcgcaagtctcattgggccaggctcaggcttaatgggctccaagcaaacagagccctcggggcgaacggcttgac

SEQ ID NO: 415570 - DNA, 542 bp, Homo Sapiens
  misc_feature (320)..(320): n is a, c, g, or t
caacggtgcccgaacccctgataaaaagaagaccgccatatttatatgaatcaaaaaacacacagaaatatcggaaagaagaaagaccgacgagtcatcggtcaaaaatgtggagggatcctccccttgaagggtctgctgctcgtatgtgagtaaagagagagcgcatcggcctaggggcacgccggagggcaccctggggaggaggagggggagaagacgtgcgtggggcagaaaaaaacacacccacgagcagaatggagaagaattatttaacaacgacaacaacaagaggggaagaacaaggagaagagcgtagngcgaaccaacccgcagggagggcatccccaacagggcggagggagcaacgcggggggaaccccacggaggaaaaacattccaggcacagaggcataaaaaaaggcacacgcgagggggggcgcgcgcgcccgacagcagcggaacgaactcgtcgcgcggtgagggagggaggagcggaaaaaaatgcgcgaccagggcgagtcgcgagcgacgaaacaaaa

SEQ ID NO: 415571 - DNA, 976 bp, Homo Sapiens
  misc_feature (289)..(329): n is a, c, g, or t
  misc_feature (816)..(828): n is a, c, g, or t
cacactttctgttaaccacaaaaatttccttcctcttcctgtgggaccggagatctctcttcggtgtttactccccacggtgtggtctcatcaaattacacctggtcttaggtggactgttgtccctctcttctctgaggaagaacacgtggctgagagagggtgttcacggcgccaaacctctctcatatagaggagagaacattagaaattactcctccctcgtgtgttgtgtgtggagagagaggagcctcaattgtctctcctgtagggggtgtgtctttcctcnnnnnnnnnnnnnnnnnnnnnnnnnnnnnnnnnnnnnnnnnaaaagctatacacgtgatacacgagcgctcaaactgagcaagacggtatcaaagagaggagtttcccatacagacacagtagtctgcgccgtacacagcaaaaaagatgctgcatactatcaaatccaccactgtctccttactagtactcagacgcgccggagggatgacgagatggcgtgacgttacaccaaacctaacacgacggcttctcacacactccgtagcttcctctatttgttcccccaacaagagaaatgggtgtatcctcctctcctctcctacaccaactacttcagttggaggcgaacaacaaccacccgcgtcgtgggaaccaacaacatagttgactactacacagccccagcctcttatccacctagcgccgcacctctctccctgctcctggtggttgcaggagctcataaaacaatactctctcgctgtagacgaagagaggcggaaattaatacacttaaggccgcgnnnnnnnnnnnnnactgttagctcaactcaattaaacagcaggcgagctggtacatcatagctctggcggacaacacctctcttgggtttaacaccatccatcactctcactactacaaccaaccacacaccaagccaaagagccataattattctacact

SEQ ID NO: 415572 - DNA, 666 bp, Homo Sapiens
atccaggggaccaaaaaagatctttaaggaggaaggggggggtcctccacaccccctggaggaccaccaaggaggggatggagggatgatttcctctctcctcaaaaacaaacgacggtggtggaggggggtgatggtcgacacacaccccaaaaaatatctacgtggggagatgtaccatcctcatttctgccataacattattttgcgaagccaacgggagaaacagagttgcccccacgagtgtggggtgcatgtcttctctgttcagaaacacaacaaaaatacgttgggcccgcacacaagacagcactgtggtctacctccacgatgtggacgctgtgcgtgtcactgtgcacattccatatactatctattctgcgcgcggggagaaccacaaatcttagaaacaaacgatgtggtcctttcccttgcgcacctcaacataaccaacaacagcgcgcgtgcggccaggaccccagacaaatgtagtcgctggtctcctctctctcacagacaataacatacccactgtgagtaaacaccgctggttgtttgataccaccccctcgcctcgaaaaccaccacagaaccataggtacgccccatcaccgctgggggagcgtttttgtgttgaacttaaccccaaactcaattgtcgccccc

SEQ ID NO: 415573 - DNA, 1055 bp, Homo Sapiens
  misc_feature (52)..(60): n is a, c, g, or t
  misc_feature (960)..(995): n is a, c, g, or t
aggaaactctccctcctctccttttttggggctgccctttaattcttaaaannnnnnnnnaccccgtcaacacgttgaaaacaagtttggaaaaacccggggcctctgggggaaacaacaagcgcggggccccagccagggtcttccctgtcctccggaagcccccacaaaaaacgcgggggctccacagggaacgcgcgctgatcccaccacccacgtacagaagaccgcaagaggggcccctgaaaagaccccacaaaaaaaagggtagcctgctccacaacctgcggaaagacaaaaagaatgaggggtccctcccgcggagagaggggccctcacctaccaaaatctcccgcgccctcgaggagagagtgggcgctgcggacacagagaagaggggccccaagcaaacaaagaagaggcgccgacagacggaaagaggggccttgcctcccgaccccaaagaagaggggcagcaccccccatggggaaaatctccccgcgcacaggcgtcccgtggcggatcacgttgtcttcccctctgctgggaaagcgggcgccaaagaggtctctccgcaatctgtgctcgggggtggggcgcgagagagaggtcccccgtcgctctcggggcgatccccgagacccttgagagaccgctctttaggcggggggggtgtcgcaaccctctctgttgtctcgcaggagcccccagcccccccatttgtggtgtgtgtctgtatacccccctcggtgctttagaggtccccgcggcggctcctggcggcaagacatccccctccacggggggttgtcttcccccccgagatttttgggccgccactttcctgcggccccaggcggttgttagaccacccctgcgtgttctctcggaggggaactacttgctggtccctctcggcaccaacggaggtggggtgcacccctacaagcggttctctnnnnnnnnnnnnnnnnnnnnnnnnnnnnnnnnnnnngggggctacaacccctctcgtgtcctcgcccttatgggggttctcgccccccctttttgc

SEQ ID NO: 415574 - DNA, 741 bp, Homo Sapiens
ccaaatttaacccgtttttatttctacagcaacttctgaaaataaaaagcacccgcctccacccgacaacagggggagcccctctgtgccaccagggggacccgtctcgccgcccctctcgcgaaaagtcttgacaggcgtgtgtggggagagcgcagaggcacggatgtggcctctcggtgtgcggcggtgtgccgcgggccccggggtctcgcgccgtgtgcctgtggcgcgggcgcccgcgtgtgtggcacagagggcacagtgctgcacatatagagcgcgccgcgaatatatgctgcgggcgcacagagggcccccgcgcgcggtgatgtggaagggacacgccgcgaaccatacgaggggcgagagatgtctccccccgtgtcgcgtgggggcacacaaccgtgggggcgacgaaaggagcgcgcgcccgcgtgtataggagaaagcggcacatctccccctctacaagaagagcgcgccccagagagagaggacagccgcggcgcgaacacaaaagaggggtctcccccgaagagagagcacccccctgttgtggagagcagcggccccccgccgggattctccccgccagaagacaacacgtgtcgtaaacaagccccctgtggggggaagaaatataatcacccacccccggccacagggcagaacacgtgggggggagtgtgaacattaaaggggcctgtggggggcgggtaaccccaccttatgaaagag

SEQ ID NO: 415575 - DNA, 554 bp, Homo Sapiens
  misc_feature (102)..(110): n is a, c, g, or t
  misc_feature (268)..(277): n is a, c, g, or t
  misc_feature (315)..(332): n is a, c, g, or t
tgcgtgtgtgtgtgcccccaaagaggggtgagtattatctcaggattatacgaacaactcactctccccccgcgcacaaacaatatattgggtgaggagagnnnnnnnnntatctcatttgttagtgtgactccccacgagtagacgcacaaagtaaataaactacatatgccatcgatgcagcgcttaaaatcactggtggaacaaaaactctctctctccgcaccaccgccgccagctcctctgtaataatataatagagtggagnnnnnnnnnncaattctctcacccatccgatgtctgtcggggcgaaannnnnnnnnnnnnnnnnngtatgatataaaaaataattatatctgagttgatgtcaacagacgagggtgtgtttattaatctactctcgttagtggacacaaaaaggtgaatataactactcactctcactggacactacatcgctcactcccagaggtggggagagaaccacccgaataggataatatccaacacaacataacaccgtgcgaggcataacgatcaccacatatatatat

SEQ ID NO: 415576 - DNA, 869 bp, Homo Sapiens
acacaaaacctcttaaaaaaagcggtgtataagggggagagagtggggggagaaccacgggtgctcgcattcgccaacaattcaccccccacgatctctcttgtcctccccgccatctagaaagaatctccggatcgggaattagcaaggatggcctctcccatatatccaccaaccgcctacacaaaaggtggcattacgccgggaggtgccctctagaacccccacgactcttctaaaagaggtctatggggactcaatgcttccacattctgtccccgaggagaaacaccactgatataatataacagactcttaagcgccaccgtgcccccaccccactgaaacttatctccacttctatgtctcccccccaattcttctccactctccgccagaggtctcttgaaacaaacagtttcccacactaatgtacacccccaatacatagcgcacattgtgcccgcctatccccaaaaataatttcctcccccccatacatacaaacaatctcctgtatcacaaaagagagggtccgtggtcggacctttatgtaacagaccattttcgttgacccaaggtgggatcccgccccccacacgtgtgccccccagacaacatgttcaccccaccactccgccgaaaattatctcctccagtacatagaaacatgagctttctaaagagacggtggcctcctcactggggaataaaggggtcggcccgccccccacacaaaaacatttgtacgacttacccccccgctctcctgtggcagttacctacttccaaaagctgcgccctatcagctggtcccttgttgggcgactattgtgttgagccagctgagtaaagacggtgctactcac

SEQ ID NO: 415577 - DNA, 1014 bp, Homo Sapiens
  misc_feature (370)..(386): n is a, c, g, or t
tttgtttcttgtgtcgtcgcgagggtgatgactctgtccaccaacaacaaaaaaatacaacaagatggtcatgaacacacatacatgatatatactatctgtcgatactgcccgacttcatgaaaaggaggccggggagcgagtagcaccgcgcgtgcggggtgagcaacaccacagatggtatgatgaaccggctctcgcgcgcgcacacataatacaaaaaggtggtatggcgagtgtccgtgtctatgtctatacctggacgggcgtccgctcgccacgcacgccgagcgtgcgtgcgtctccctaaaacaacgaaacacagccctcggatactagagtagagcgacgagcgacggacgagacagannnnnnnnnnnnnnnnnataaccaccgcatgcttccgtgtgcgacagaaccccctcacgctggcgccggcgcctgtactgcctcatctatcacgcatgaaacacacacacagtagagctgcgtgtgcgtaggtgctcgtcgcgtggcgcgcgaagcggaaagacgcctcgtgagtcacgacaacatcacaggctgcacgcgctacccaaccacagactcgagcacgcgagtggagtcaccccggcacaccaggcgacacagttctgacgtctcgtctcaccacgccgtgccgtcggccgcatacccagatctcaatcccgctcggcgccgtgtcccctacggcccccacgctatctacgcataacaccatcacactatactaaatcacctaatactagtgcattctccctctctctaccaccacacaaaacagacagacatacacacgcaaacaatctacctatctctctatcctacctcgagacctacccctacatgccaactcaccctccccaaaccagccaccccagccgccccaccctcgcgctgtggtgaagtcgaagcttcatcaaatccgtctgctccctccctaactcccccactcactcaacatctaatatataccatcactctcacccaccagtc

SEQ ID NO: 415578 - DNA, 614 bp, Homo Sapiens
ccttccgaaaaattttcccgcgtgtttccccggtggccccgcttcgcggcccgtgagggcgccacctgtgtgtgggcaaggtgaaaacacaatgcccacacctgtgaacaccgtgggcttgcagggatgtgaagggtggctctcctctctcgccgaaagaggccccgaggaaacaccccaccttgtgccacagcgccagagcatgttgtgcgccccacagacgtgctcctcccacagagaggtctccgcgggtctcacattcttctcacgaaacccccacagaggcgcgactataagcacgtgtgtgtgcccctcgcgtttgtgcgcccaagcgcgtgtggcacacaatgtataagagaggcacccccggcgctgggttgcactggtacgcgcgacgcctcccccagatggcagtgcgccctcgcttgtttggtacgcccacacttaggctgagacggagttactacatgccgatgccgtcctttcaggcgcgcccttgcgacagaccacaacaacggacacaatgtgaccaaacatactagcccaatcttgtaaggaactttggtgagtgcgggcctcacacgagggaacgtaaaccaacatcgtggggcgcc

SEQ ID NO: 415579 - DNA, 855 bp, Homo Sapiens
  misc_feature (88)..(96): n is a, c, g, or t
  misc_feature (841)..(841): n is a, c, g, or t
ctgattgagaaaaaaggagggtgccatccccgagaaccaccacctccacttctggtagggccgaaccatcaccaaacaaaagagggannnnnnnnncgggtggagggagcaatgctattctatacaacacaacggacgagcaggcagaggggtggcacgcccctctttactatccccccaccgtgtggtcgtcagaccactccacctctatcttggagtagacgtgaggctgaccagacacaacacaacacagaagagcaggagtgtgtgtgatgtatcaatcgacaacacagagtcgagacagacacaacgagcgaggcatcgcacacaacacaaagaaatgcgcgcgcgggaggccgaaagaaaacatcaacatttcaactagctcgaactctcatcagcaccagcgtgaaggacgcacgaagacatcgcaaaccgcaccaccccgcgacaacacagacaagagaacgagcctcgcgcgcgaccacgacgcccgagccatgacgacgggcgactggacatccgacaccacgccacgccgccgcgagagaaagcacgcaaccaagagacgcgcgagacaaaaagcacaaatacgtcgtcgcgcgcgtcgcgacgcacaacatgccgcgcgtcgccgggcggcacgctaggacaacatcaaataaccaccagcgtcggcgccacgtcagcaccccacagagcctcgagacgtgccgcacgccacccgccccgctctgccgctgcctcccctccctacaccaccagcccacaagacgcgcgggggccgacgagacaacaagacgtacgtgatgttacgcagcctcgcggccaaccacccacngcacacaaaaacac

SEQ ID NO: 415580 - DNA, 1070 bp, Homo Sapiens
  misc_feature (292)..(333): n is a, c, g, or t
taatactacaccacaacatatagcaactactcagcacacatctacatgacgaaggcgcgcacgtctgcgcggagaagaacaataaaagaatagagagagaaataaaagaaaacgatctagcaacgcgcttgctgctatgaatacagagacaaacacggatgtgcgtggagaggcggcggtgcaaactgtcgcatctcgctgcacagccaccctccgcccgcactcgaaacgccctcacgcgagacaccgcgcgacgcgcgccgtgtgcgaggagatacaggacaggagcgannnnnnnnnnnnnnnnnnnnnnnnnnnnnnnnnnnnnnnnnnaatgctatccaccagctatacaaaaagacacaaaacaccgccgcgaagcgctgtgccagcaaaaccccacgaagagacacacgacgcagccagccgcccccacctcctatacacatagagacaaacaaaaagacagagagagcagcgccccccgcccgacgactatatacgccagcggagtagcgcagagcagacaaacaaaggacaccgagaagcgcagacccgacaacacgagacgcagagacaccacgagagagacgacactccctcctaaccacacacaaagacaaagagcagagacgcgccgcgctgacctcaccctcctccccaacacacaacagatacagactgtcgcatgcgccgacgggcgactgaggaaacacgcccccacaaccacctagagaacgagtgtcggcgatagtcgcgcatcgcactccaccgcacagacctcacgcgaccggtatcagcaaagaagtccactaaaacgagcacaccactcacgctggaccagcagtcgctccgacgtgcggagatgccgacgcgagggcggacacagaacaagaccacattggccgtcgctgagtacacagcgcaacacgacacgatcctatcctagcgccagcagagacgacagaggcgaatgaccagcgagcgcccgcccgccgccgtcctccgccgtcgcgcgctccacgccttctcaccgccgggcatccacacaacaacggcgaaacacacac

SEQ ID NO: 415581 - DNA, 847 bp, Homo Sapiens
gaagaggaacacgggggggccgggtcttaaaaaaacaactcacggggtagaggcacagcaggccgccgggacacaccacaaaagaaataatggactcaaccatgacggagaagataagaataggaccagcccgcgacgaaaacgtgcagctgaacacgacactccctggcagcatcacccagggcgcggggggaggctcgccacaacaataataccaccgacttgttctcacataaacaattatttctcgggaatcatttagtggtatgcaccgccacgtggcccatcaactcctccccgctatcaccctcccgagagcgagagggagcatacaaaagaacaagtctctgtttctgccgcgtgcgtgggggacaacgcccttcggagtggcggagcgacggtgaggggagtgtcctctcacctcgagagagcggtgggggcgcacacacacctcctgggcgggggagagataccggcttgtcgtgaataggatcttttgccaacaaaaaaacgcggataaggagatcctgcggtgtcgaggtgtgggtctctgcagaccaacccggcgcgcggcgttcacactcctttttgggagaacccactcgctgcgggacatcgcccccctctcatctttgttctccacagaaagaggaaacatagtctcttccgccctcccgacagtgagtgtgcgagaacagagaatgagcggtgagacgcgtgtgagcgtggacactcacaaatatgtcgcgacacgtggaaggatagaaatcagcgcgtcggctccccgccctcattgaggggtgtacaatcttatcaccgagaacaaaactaagctttgcctcaacaa

SEQ ID NO: 415582 - DNA, 852 bp, Homo Sapiens
  misc_feature (42)..(58): n is a, c, g, or t
ccccaaagcgaaaatcccccccatttaatttggtgccccacnnnnnnnnnnnnnnnnntggtgttttaaacccccccttcttgggtgggaacaggaggaatggtggctgatgcgtctgcgcccccacacatccaatcaaaataatcttgtgggtccacgagagaattagtataatctaccacatgcagtgttgccccacaaagaaataatttcttatcacactgtcttcaaggaggggttgaacacgggtgtcacgcccgggtttgtgtgggcgacgccactatgtggaggcacaatataacgaaaattgtgtgtaaaagcttccgcccctctctgtcgcgagcgtcctcctctgctccactctctctgaagacagacaaaagagagcggcgcgtgcgaacacctctccacgcgcacgggagctgtcgttctcctccctcactccgacaggacacctctctttaatataggctcggcccactcatacatattcagcgagggggagcccacatgataaaaacatatatctgcaacacacatttttacagaagaaacactccccttgtttccgggggggacaataaacgagctgaggagcaactgtgaacagtgcgtgtggagaccaccctcgatccacgtctttctctgagcccgcgcctaatgtactacacaaaatctttgcggggctgtcactagagtgcgcagaggaggaaacccaaacggcggattttagtaatcctcgccacactaaaccatattctgtcagagagtaatctctttctctctcgcgtggggagaaggtccgcccctcccgtgtgtttagaccagggcggctatttaaacacaccccca

SEQ ID NO: 415583 - DNA, 1371 bp, Homo Sapiens
  misc_feature (433)..(449): n is a, c, g, or t
aaccttacgatagaagaatgtagttgatggcgcgcgcaccactcctagtagcagccgtcccgacagcctcaagaccgcccatgctgtttgtccgtgagcgaagagcgggctggcacccacgccgcggaggagagaacagacacccaccaggaggcagagcctctccgcaagcgagtggagcagagcagttaacacaacacaaaagactcttgtggtgtggggcgtctctctcatagcacgagctgcgccgctctctgcgcgcggcgtgtacttgaggacacaacaacaacttgtgtgggagagacaacatcgatgtgctgctctcttgcatcttcttattgaatgtgtgtgtgccgcacgcgcccacaacataaagagaaacactccgcacgcacgctgcgatgcgtgtgggacacgttctctctctcgcgcnnnnnnnnnnnnnnnnntgcttcctatctgtgaactgcacaaagagagagtgagcgacgcgcgcgccccccagatcacaacgcactgcactgcgcagtgagtagtgagtgtatatgtccaacaaccagacaacacacagacagagactagttattgtagtgtgtaagcaaaccgcgggcgcaggtgaaaactactctaccttacagcgctgtacgagggatacatctcactccctcatcccagacgcgagacgactacacgactctcctctttctctctatcgtataacacaacaaatgatgagtcccacccacgtcttcccctttctatgtgtgcgatgacccacacgcccccctccacacctatatatcgacatagtgacacgtctgctacccatcgcacctatctctttcctacccactccgccgcgagcaggatcaatcaccttccagcgacaatcggcaaacccatcccaaccccctctcctcctatctaattatcgcatctcaccacccaacgctgtctgtcctgttccattcataagctagtggtggcgtctcacacctaacaacaagaacgccaggccccagcagctgtgagtagcatgcctaaagtcgtacgatgcaatgccagtcagtcatcgaccgtcacaaacaatatagttctctactccgccctcccgccgccgcgcgcgcgtgcccatccacaatatcctcaacataagcgcaaggcgcgcagaatgggtgtaattatcacctccgaccgacccgtcgtgctggtttatctatttacttacgatgtgaagcgggcaacaaaaacacaaacaagagagtgagagggatatgtaagtattctatctctactcgccagcagacctcctatattagtcgtaggttactcaaaaacaaaaagcacaacgggtcttatattaatataacc

SEQ ID NO: 415584 - DNA, 1427 bp, Homo Sapiens
  misc_feature (151)..(211): n is a, c, g, or t
  misc_feature (340)..(497): n is a, c, g, or t
  misc_feature (502)..(659): n is a, c, g, or t
  misc_feature (759)..(817): n is a, c, g, or t
  misc_feature (824)..(878): n is a, c, g, or t
  misc_feature (916)..(1001): n is a, c, g, or t
aaaacaggggccacacaaggtttattggtgtgggtcgaaactttttccccgcggggcgcccctcttccccccgctgctcccgcgtccgcaaccctgcttttaataacccatcttcctacccgaacacttcgaaactaccaacacaactatnnnnnnnnnnnnnnnnnnnnnnnnnnnnnnnnnnnnnnnnnnnnnnnnnnnnnnnnnnnnncactacctcctccacccactccatcataacaaatcacacataaacaaccaccaaacaccatcatgaccctatcatcaacatataattatgaaaactataataaactcccacattaaaatcaccacacannnnnnnnnnnnnnnnnnnnnnnnnnnnnnnnnnnnnnnnnnnnnnnnnnnnnnnnnnnnnnnnnnnnnnnnnnnnnnnnnnnnnnnnnnnnnnnnnnnnnnnnnnnnnnnnnnnnnnnnnnnnnnnnnnnnnnnnnnnnnnnnnnnnnnnnnnnnnntcagnnnnnnnnnnnnnnnnnnnnnnnnnnnnnnnnnnnnnnnnnnnnnnnnnnnnnnnnnnnnnnnnnnnnnnnnnnnnnnnnnnnnnnnnnnnnnnnnnnnnnnnnnnnnnnnnnnnnnnnnnnnnnnnnnnnnnnnnnnnnnnnnnnnnnnnnnnnnnnatatcaacaaaaatccacacacaatacattcacaacatacttacccacaaccaaaaacacactccactatcaacaacacactaccaatatcaaccccatnnnnnnnnnnnnnnnnnnnnnnnnnnnnnnnnnnnnnnnnnnnnnnnnnnnnnnnnnnnaaccatnnnnnnnnnnnnnnnnnnnnnnnnnnnnnnnnnnnnnnnnnnnnnnnnnnnnnnntccccaccatccatcccattcacaaacaaacaatactnnnnnnnnnnnnnnnnnnnnnnnnnnnnnnnnnnnnnnnnnnnnnnnnnnnnnnnnnnnnnnnnnnnnnnnnnnnnnnnnnnnnnncttctcccacatcaccttctcaaacacaaaccataatatcctatcacaacactacacacaactacatcactatctgacaacactcctcacaaaaaaccacaaactacaccaacctacctatccacttacaccactaatcaatacatcgaccacctacaaacaaacaacatatatctaacatcttcacccaccacctacactactaatcatcaacactactcatctcacatccaacccaactatattacataaattaccttatagtatccattacatcactctatcacacactacataccactactccataccacacaccactatacctaacacccacaaccaaataccactcaacccctatacacgatcataataccatgctaacacaataccacctaaaatctacttcacctacctctatacaca

SEQ ID NO: 415585 - DNA, 782 bp, Homo Sapiens
  misc_feature (491)..(518): n is a, c, g, or t
tttttttgcccagaaaaaataccccctcacaaattaacggggggagaaggagcggtggttcgggagtttatttataccagcacacacctaacccccagaagaggagaggtgtgcgccgctccctggtggtgcaccaacggcggacatatcttcatcaacctcctcgacgacgctggcggattttttttatttgatgaggaggactcttctcttccaagaaaaaccttcttctgtggaggggcgccgccctttctccgcgagaaaagtgtgtggcggcgcctcttcgcggcggggttgttgctccccccacgccgtctggcggggaagaaatggtggggagaggcttctcctgcggaggaggagaggtggcccacagggcgcgccttttgtatttttctccaccccaaaagggagaggaagatgtgtcgcagcgcccgccccccgcggcggggcggcggtcgtgatgtgtgtggcgccgcccaccaatatannnnnnnnnnnnnnnnnnnnnnnnnnnnagagacagcccccgcgcgcgtggagcgggagagatactattcggcgcgagcaacacacggtgggcgtgcgtggcgcggaaaccatggcgggggtgtggggagaacacaagtctcctcttatacatagaaacagagaggcggcaacacacagagggggggaccacaacctcttggcaccgcgcgcggggggatgtggtgtgttctcttcctcacaccctcctcctcattctcaccgggggagcactacaatagacaagcaacgct

SEQ ID NO: 415586 - DNA, 549 bp, Homo Sapiens
  misc_feature (57)..(77): n is a, c, g, or t
attcattctcttgttcaaccttatctgcaccccccagactgacaggcataaagcacnnnnnnnnnnnnnnnnnnnnncacacaacatcgcacaggcgaggagcgaggccgacgcgtcaaggtctgctcgtcgcgttcggtgcacctagacaagcacgacccaccgacagcgagcgatgggcgccagtcacacgaccatgcatgcgtgaggtcacgtctgatatctctgaatcccatcaacagcaactatagggggagttagcccacgtcctcaccacgcctcacccaccatacaagcccgtcgagctgcggtgctgaatagcgtcaaacactgacagctccgcctcagctaggccgctatgcgaaggtagctctcacccgtcgccgcggacgcgtgcgccccgaccccacaccacaccatgcccaacactaccaaaaacgtagtctacacgcaaagagaggtgatgatgactacagctctcagcgcatcgcgatgagactggtgaccgccgcactatgctatgccaacgacactctcagttcagtgagc

SEQ ID NO: 415587 - DNA, 1437 bp, Homo Sapiens
  misc_feature (1059)..(1059): n is a, c, g, or t
  misc_feature (1177)..(1177): n is a, c, g, or t
gcaaaaaaagaatttgtgggcccatcaaacaaaacaccgccgcccggaggaggtgtcgccagcgggtggggtcctccctcttagcagtggaggcgaacaactaaaacctttattaggatccagctccactcacaacaatgtatattttccccctctataatccccacaatatatcagtaagcgcaggggccctctgatcgggaacccaccacaagccaccgagtcagccgcgtttaagagcgtgctacagaaaacaacacgacgggtcgctacaaagtatgatagtcccccaccctctatatctagagcgcttgctaaaaaagagtgtgactgtacactccctctcgatgaaaggataacaccccctacactaaaatcgattgccctccggcgatcacctctctgtcttgcctcctcaccagagaagaaccccaacaatgagagagcaactcatctccactctgtgtgggaaagaaaaaagaacacgtcttcgcagcgctttgatgtgtacaacaaaaataacagccccgcgtgtgtagtgtggcgccccacagactgtgatgtgagttgtgtgcgactcctctatacacaacgattatgtgccaagttaagtacctagacccccagatgtagtcgtctacatcctaacctccatatctggtgaacagccgacgctgtctatttgttttccccctacacagtcacacagaaggtaggagaaacaaccaacacaataatacatagacgagtcgaattatcagtcaagcactgtagtgtgatgcgccaggacaacacagatggtgctggccaacaaagaaaaaaacaccccaacttcatttagtaggtgtggtgctccccaccacctacctcttgtgagcaagacaaagagtgagttgattttatggcacgccagcacaacacaacaatactactgccgcggaggaaaaaataacctctcgacggacacgctaggttatcaacaaccaccgccctgcatgatcaatattaatttgatagatgcaaaccactaactgcttgtcagtcctaataatatagggntgtgagtcaccccactaaataaatagcacggcgctcgctacagtgatgtgtcgatcactacgacagacaggctatccactcccgagtctggaagcgtaacaaaacacattgtgtatcntcaccctccgctcctccccgggggctgttttatctaggtgtagctaaaacaccctctctggtgaagcgtcatgtaatagtcgctggcccgcagggcgagtatttctacttaactaaatggtaggcgggcgaaccaaacacacacccgggttgtgtaaatcgtttgacgctatctactcaccagggcgagaactacgtctagcttagtgacgtggctctacataaacaacaccgaaagcccgcctgctggttataattaga

SEQ ID NO: 415588 - DNA, 1418 bp, Homo Sapiens
ccctgggataaaatcggattttttccaaaaggcttattcccggaaaaaaatcccccaagttgggaaaaaagggtggggcccccttgaaggggaaaacagggtttaagcctttccctaacctcccaaactcgtcgcgggaaaggctgttgaagacccaagttatcatgtagaggggactccttggggggtgggccgtgggtgtgttcgtgaccgtgtcctcctttgtgccccacgaggtgtcaattgttacacctggggctccgtgaggattcccgaagttattcagagaagacgcgtgcgcaagaggaatctcatgtgcaacaggccaagagcccaggagcccccgaacggggaaacactccccatgtgttgtctcaaagaattccagtcgtgtggccgcccattgtgcaacacctccgcgggtgcctcctctccgtggtgttcctccgagcggcacacagtgtttgcgagacaacggttgtctaaccctgtataggactgtggccactctccccgagtgagacgacccccttactatatacaaaaacagtgtatctaccaggagacacaaccgcaggggtaaaacactagccatgggcgccacaaaaaagaggccccaaaacaccaacaccagcgtctctctgccaccacggcgagggcaaaaccaccgcgacgggtgtgcgcaaggcgcacacctcttggaccccagccacgcgtgccccaaggggccccccgagggtgtacaaacacgccgggtgagtgcccccaaccacaacgcggacgcgcgagcccacaaacaaaaccacaagccgcgggtcagcagcgccataacagaccaccctcccacacgcccgcgagtactacccacgcccaacccctgggggccaccactcgaggcgcggcaccatttatgcacggcgaacacggccggggagaaacacaccaaggggaaaaagcttgctccccccggagacaacacaccaggacgggcggctctcccccaccaacagacggcccccggcggtgtgtgcaccaacaggcacaaaacaatcataacttctccgtgcgccagaaagaggatcacaccatcctcaccaccagcacccgccacgagcggcgaaacacacacacctgtgctcccactcaacacgagccgtcaagcacccccccgttggagagacaccatcagtgtgtggcccacagcctcctatcacccctcccacacgaacggggcacaatatgcgcctcttcggcccctcagggcagaccacgccctgctggctctctactcctaacactcggccggagcgcacctcggcgacgccttctcttctagcatacagcaggggactctcccacacgatggccccacgcacctcacctcgcgtggcgactacatctactcctccaccccctcg

SEQ ID NO: 415589 - DNA, 825 bp, Homo Sapiens
atttattgtgtgaggggaaagaaaaaggggatgctctcttcttttttctatacacacagaacacaaccaacaaaaaaaacaacagcgcccgcgccgtgccgcgcggcggggggcgcggatcgaagaagaaggagcgagtcataaagaagaagggacggcggcgcagaagcaacaaaatagaggcacgcacacaccattcaataccaagcaaccgactgctcatcgttcctgaggaggccacaaacagcacaaaccgcgggcggctgggtgcgcagcacgcataacacaaacaccccccaccaaagaaccaccctgccgtggcgacgggcacccgcacatagacaaacaaccgaccccgcacgcgccgcgccgggccccgctccggctacgcatcgccagcacaacacaacgcaccgcgcagcgcggcgcgggagcgagccgaagcccaccaccgagagagcgccgccacccgccccacgacagacgcacgaacaccagagccccacccccgggcccgagggccgacgcagccccccaccgccaccgcctcggcaactccgacgcaacccatgcccgcgaacggccccaccgagacccacgcgcgcgagcggcgagcggcaaccggccagcgggcgcgcgcgcctcgcccacggaccgccgagcccgcccactccaatagagaccaagaaaaccacggcgcctcctgcaccagggcaaccccacacagaaagaggagggaccgacaccccgactagtgagcatatcacgccgcacacgccagggcgaaagggcccagcacgcacccacccccaccacccctagcac

SEQ ID NO: 415590 - DNA, 717 bp, Homo Sapiens
  misc_feature (62)..(134): n is a, c, g, or t
  misc_feature (211)..(228): n is a, c, g, or t
aaaacattctctcatctcaaaaaatgatgtggtgggaaaaaatttttttggagagatagatnnnnnnnnnnnnnnnnnnnnnnnnnnnnnnnnnnnnnnnnnnnnnnnnnnnnnnnnnnnnnnnnnnnnnnnnntggtggagtagttaggtggggggtgtgtatgatagtacagagagagaggtgggggggacgcagaagatgattgagannnnnnnnnnnnnnnnnntatattattaatatatttatttcttcgtgggtgggttgtattcagtcgggggggaaggaggagagagagaggggcgcgcaaaaccccacacgcagaaaaaaacacgcgcgcggagacatacactccgcgcggggagaccaaccacgcgccacgcgagagtgttataggagcgaaaaaaagaagcagcagattcagagtaggcgcgcgccacaacaaaaagacacgccgcagacacggaaaaataaaattctaccgcgagcggagcaggaaaatagattcatatctctctccgccccgccggcaaacgtggataaatagatccgcggaggcgcggggtggatgactccatccgtacgcgagtgtttttttgtgaggagtggagaagcaacgaagaggagggggtgcggtctgctcttctgcgggacgaacagtagagagtgagagagatcaaaacaaaaaagaagatgtttgttttatattaatacaccg

SEQ ID NO: 415591 - DNA, 607 bp, Homo Sapiens
  misc_feature (42)..(60): n is a, c, g, or t
  misc_feature (148)..(224): n is a, c, g, or t
gtccccggacttgggatattttcttatgacctgtgcctgacnnnnnnnnnnnnnnnnnnngacatccactgtgtgcgtggtgtgtcctccgccaccccacacacacacaacggaacacggatggtgctgtgtgccggtgatgcatctnnnnnnnnnnnnnnnnnnnnnnnnnnnnnnnnnnnnnnnnnnnnnnnnnnnnnnnnnnnnnnnnnnnnnnnnnnnnnaccaccttcatctgacccgcgacagcagcgggaggacagacgacccgccacacacgacgagcagaccctgccgcgcgcgacgccgcacggcaacccgcgcacgccagcaggaacccacagggaggagacacgaacacacagccgcacaccaaacagaaagcaaaggacgaaagagagtagcgcaggagcaggcacgagagagaagagcgcagcggcgccacggaaacagcacgtccccaacacagaaaaccaaagacacaccaacacacaccaacccgcaaacgacgacacacgaggacaacgacacggcccacccaccgcgagcccctcgcgcgctcaaaggaccgtccccacgccacacacccccgcacgcagccgctccg

SEQ ID NO: 415592 - DNA, 521 bp, Homo Sapiens
aagaaggaagaaaaaaagggggcaggagcaagaggagcaaaacaggagaacaacaaaaccacaaccctttctgtgggaaaagaaggcgcggcgacgcacaacaacacaggcgggctatcagaacggatcaacacaagcggtggcgagcgggtggtgacccaacaggacgaggcgcgggctcttctttcacagagcgcgcccctccttgtacgaggagagagacgcgaccaacatagagaggctggaggcgccgaacacagccgcgcggcgtccgaccaaggatccaccgagacctcgcccgagaagacacacgcggtcggagagagagagacgggtccgtgtgtgaggtgtgggaggagcgacggagagcgcacaacacagacacgcgcgggagccgtccatcgcgcgagacaagagagggcggggacaaacagaaacaacccaagcgcgtgcgcatacccaccccagcccagccgcgcagtgcgccgccaccgccccgcggcgcggggcaaacacaaaac

SEQ ID NO: 415593 - DNA, 822 bp, Homo Sapiens
  misc_feature (91)..(99): n is a, c, g, or t
  misc_feature (313)..(381): n is a, c, g, or t
  misc_feature (684)..(711): n is a, c, g, or t
atttgtgggggggctccacacaacacactctcctttatgaaagaaagaagacagacacaaaataaacaaacagatgtttcccccgcgagannnnnnnnncgcctctctctctccgccgaatcattcttcccgcctttttatgaaaacacgcaagatagatgtgtactaggctggatgttataataaaaagacagagagcgacctcttctttctgtataaaaacaccacagagactgtgtgtccatgcaaattcttcttgcggagagtgtgattttcttaaacctctctctcttcttatgttgtatatgatatnnnnnnnnnnnnnnnnnnnnnnnnnnnnnnnnnnnnnnnnnnnnnnnnnnnnnnnnnnnnnnnnnnnnngcgcgcgcggagggtgtgtctgatgctgtgatgtgtgttgtctctctctctctagctgcagtcgtctctctgcgcgcgcgagaagggggtgggtgcgcgtcgtcgtcgtctcttgtgctgagatgagatgagagacgagtgtggtggtgtgtgtgcgtggcgtctcctcctctctctctatatagctacgctgcgcgggcccgcgcgcgcaactcgctgagaaagtgtgtgtgtcgagctctctctctctcaccagcagcagagggggtgagagagacactacaccacccgcccccccgcgcnnnnnnnnnnnnnnnnnnnnnnnnnnnngacgatagtgtgtgtggcgtagcacccacacagagcagggagagagacaatatcacacaaacagagagagcagagtagcgggtggtggggagagagaaaacccacgcgcgt

SEQ ID NO: 415594 - DNA, 511 bp, Homo Sapiens
  misc_feature (85)..(110): n is a, c, g, or t
  misc_feature (163)..(250): n is a, c, g, or t
tagaaaagcacctctctgatggcgcgaggaaaaagaaagaaggcggcggtgcgcagagccaacagccgaagggacagcagtcgcnnnnnnnnnnnnnnnnnnnnnnnnnncagtgaaaggaaagaagaagaagagggagcggcccgcgcgcagcgccataaannnnnnnnnnnnnnnnnnnnnnnnnnnnnnnnnnnnnnnnnnnnnnnnnnnnnnnnnnnnnnnnnnnnnnnnnnnnnnnnnnnnnnnncgccgcgaagagtgcggcgcaggatctcttcatccgtaagccgcgcccgccgcggcgcgggaggactatcaacgcgaagaagagtacacacacacccgggcgcggagaggaggtaagggtagcggagggagcagggatcactcaccacgaccgctcggcccgacaccagagaggagagggcggggtgtaccacaaaaacaccaactacaacatggcgggggcgagcgcccacccctcaccgaagagaggaggcgagcagac

SEQ ID NO: 415595 - DNA, 1190 bp, Homo Sapiens
  misc_feature (44)..(55): n is a, c, g, or t
gggggcttccatcatcttctcgtggggatttgtgttggcccccnnnnnnnnnnnngagtgtactataaaaaaatttttgtgggggggagagagggggcaccaccgtgtggttctctgctgggagagaaaggtgtccccgcagacataattctctgctgagggcatcatgaggtggttccccctcttagaagtggaggaaacatcccttgggcacaaaatctccaccgggaagcacatcattttgttcttagcaacgggttcctccccccgtgagctcatataagagtttctaacaccacgacaagtgggttattttcgtggtgtgtggtgggagatacattctcacgctgcttgtggtccccacatacagaagaagagacattcccttccaccatcaagtgtgtgtggtgcagacacaaactaccccccgtctgtggggacacacagacagagggggtcgtccctggatgagaacagagacgagagcggcgcccgtgcgtgaggaggagggaacaaacccgagcgtgattccaaccacacgtgcgtgaaaccagagagcgcgccggacagaaaaaatcaaacaccctcccacacccgagtggagcatcacacgagggagtgggagacgaccacccacccgagtgctaagtgtgggtgcaacacacttatacatctctctcttttataagaagagcggaagcaacgtttctctcttgtggtgctaacacggtgtgttgtatctcccccgggggaaaaataatcccgggcgagggtgattacaccccacacggcgttactagttattttgttgggcgacacccaaccagctgttgtctattaagtaggtgtgtgcccaccaactaaagataaggggaccccaataggggagccgacacacaagagagtgtagtaacccgccgtgatgggtgcacagacaaacagtgtggtcgtaactacccaccgacaccgcgaggcgcctcaggcgatgataataaattgtcccaccgagggaaggagatagtaaatgacgatacgcccgccgaaggtgagtttctacatcactgagtgagggggaacagccgacaaacacgaggtgagtggaagagggagacttaccacgcaggaggaacacatagaggggggagtcaccaaacaacagaagagcgtcttagtattatataaaacccggg

SEQ ID NO: 415596 - DNA, 1120 bp, Homo Sapiens
  misc_feature (353)..(415): n is a, c, g, or t
  misc_feature (959)..(959): n is a, c, g, or t
ccgggggcaaaggggttccggccccttttaaaactacccacaaaaacaagtttaattctcacacacaaaaggccgggacaaataaagaaaacctcgggaacaagtgtgaggggggaccctcccgtggtttgagggaactctcccccacaaaacgctcatcacatctctctccccatcctggatgtcctcatgttcctctctttttataaagccccctcaacacacaataccctgcactgcactcaccgcataaaaataactagctcatgaccctctcttatatctcgcccacaaagagtgcgcacagcagaagtggggtgcgttggaggtgccccgaaggctccgtggtggtnnnnnnnnnnnnnnnnnnnnnnnnnnnnnnnnnnnnnnnnnnnnnnnnnnnnnnnnnnnnnnnctctagtggggcactctctctatatctctcaccaccgcaggggcccgctgtaggagcgcgggggtgctcacacaccaccacagatgcacccacacaacaatccgcgcaccaaccccaacaacactcccaccagcggacgtaaaccaccgaggcgccgcgaccaacaacacgaagtagcgtggcagagcccgcaaacctccggataagaaaggggcagtgacaccgtacacaccaacacgagagtgttctacaaaaacacccgcacgagtgggttccacacaacaactacttcgtgacgcaagaaaaatcaccaccacccgcgatcgatggtgaggcaccacaccagagagagccgggcgagcgcagagtcgtgtgtaacaaaccaaccacgcagcggcacccacaataccgcgcccacgcggtggggcgacacaacaacaaaagacgaggccgaaaaaggcgggccgcccccacacaccccaatatggagaggtgatgagagcgccaagcccccgcgtgcagcacaacagacgcgatcagtcanaaagcacgcatctccctcggcggagaggaagaacttctcccgcgcgcacgacgcgacgtaaaaccacaagccaccgtggacattatatgtgcgtgacatcccacacaaccacctgatgtggactacaccccaacaacagggccgtaccccacccaaataaa

SEQ ID NO: 415597 - DNA, 802 bp, Homo Sapiens
  misc_feature (405)..(405): n is a, c, g, or t
  misc_feature (614)..(673): n is a, c, g, or t
ggaaaatctcggggggttccctttaaatcagggctctactgaaggttgtttgggggggttaaaaccccccaaaaattaaattggctcttttaacaccccctggtttcccccatagagggccaaaccatctctggggagagcactgggtgggtgctcgcccaaattcggggtaatcagagggggtaatccatggggggtgctatttcaaagcacagctactggttttacagccaggatagaatgggggatgtggaccccagtctggctagcaaagctggcccatctccgggtgtgagaagaacgccaatgtaccgacggcccattgtgccatgtagaaatatcggggccctcttatacttgagacggggagatgttttgttacaaaatgtcacaggccaccggggntctggggaagggggaaaaaaattccaggggagtaatactctggctcgcggaggatgtgtatcccagggggtcttccggaagtctcccttgcgccccagaactttttctctgtgggagaaaaagcgcgctctcttctgggggggataaaaacagccgcgtgtgtgggaggggggccgcctccccaggttgtgggggctgaaaaaactgtnnnnnnnnnnnnnnnnnnnnnnnnnnnnnnnnnnnnnnnnnnnnnnnnnnnnnnnnnnnntaaaaatttctcctctccgcgagaggtctggacaactgggtgtgtccccagggagtctggccgtttggcccgcgttgttccccccccgggggtcccccagacagtttggttgggggcggcgcctccctc

SEQ ID NO: 415598 - DNA, 311 bp, Homo Sapiens
  misc_feature (120)..(120): n is a, c, g, or t
  misc_feature (256)..(271): n is a, c, g, or t
ccccccggcctgtataaccgggttttttttcaaaaaaagtgtgcccaaaatgattggcccttttgggaaaatccaatttaaaaatttatatgcagggggttttttccccttttggtgaantagagggtgtcttctctggaagggctcttttcacaggggggtgggtttcttgggaccgctgggtgcgcttttttccccaccacagagaggggcttctttctggcgtctttataacacccaacaaggcagcgcttannnnnnnnnnnnnnnnccctctccacagggctctcttgctctgaaccctgcggcac

SEQ ID NO: 415599 - DNA, 869 bp, Homo Sapiens
  misc_feature (473)..(473): n is a, c, g, or t
  misc_feature (655)..(655): n is a, c, g, or t
  misc_feature (734)..(734): n is a, c, g, or t
cgcggccctttataaagggcaaatcataaagggccccaaaaaaggtgttcatattctccaagtgtgtgagaatatcatcccaaattattttccaaccttctaaccactgggcagcacattgatgttgggcgaaaatctcggaacactctcttacaactatggtgtgtgtgtccacaaatgttaatctatcacaccacgcacacacaattattcctcttcgcggagaaatcaccacagaggggccgcaatgtgtataggcgcgcgagattttcctcttgtgtggggcaccatatctttattcacatatacactgtgggtggtgtgggggcgacacacccctctctttattctatgagacatatatatgagggagagacacactcctccacatttacaaaccatatacgcgctccgagacacgtgcgcgcacgacatatatgcgccatatatagatatgtaacgatgagagtctnccctatataaatatatatcaagatgatgtgtgctcctccccacatacttatttctatccaccacaatatatgatgtggtgtctctctatatgattaacaccgcgtcgaggaagtacccctctatatctctacatatatctcctatatatctgcgcggacgcacacaaacatatatgagggcncccgcgaaaaaagatgtgtgcctgtgtgtggagtgtggtctctctgtgtcacactctcctccagagaagagagtggtgntgtgttttcacaaaaaacacaacactgctgttgtcggagtctcctcacttatcagaagacagagctggtgggcaccaaaaaatacacactctctattaaacatatattgtctctggctgtggtgtggcgaacccc

SEQ ID NO: 415600 - DNA, 1128 bp, Homo Sapiens
  misc_feature (302)..(319): n is a, c, g, or t
aaaaaaaggggtggccaccccacggggggggaaaaagatctcgacactctccctcaccacacataggaaaaaatattgaattaaaaatagagatgtataacaataaaagaaggtggtgaatagtctcccgaacaagtaatagaaggtagtacatctattgcgggtgggtggatatataaatactatagtatgtatatctgtgtgagccgcgaggacatacaaaataataagaataatattacgctagaatctcgccgcgtcacagaatataatatatatgctgtgcggcgcttatattttannnnnnnnnnnnnnnnnngaaatatgatgtctgtttcctcacagacggatgtatatctctatactctttcgacctcgcaaacaacgccgcacacagatgtgtggcaaacaatgtgagcggctaccttatgtgtgtaacacacaaataaaaagagacgggggtgtgagcccacacacatatgatcgtgcgtgagtgcaaaaaatgcctgggcaaactaatactatttctacacaagccatcatatcactatctagtatttatctaatataatcttcatatggggcggccccaccacaacaatatatagagtgtggtgtgtaaactacacacaacagggatgtctatatatatctcatatcgacacaccccgagcggtggagggagagacgctctacacaatatctgatcgatgtgtgcctgctcaccactacgaacgatgtgtaagcaccgccggggtatatagaatagcaatataagacgtgcgagcgccccacgaactatatatacatatatacgacacgacgagaatgcagaacacacaacaacatcaacccgccaccaagagagaaaataactccaccacacgaggatagaacgtagacagacagcaacaacaaaaagagaagcgcgaccccgcaagagagaaaaacacacgcaccggcacgcgacacaacaaacaacagcagcggggcgggagcgacacaaaaagcaaaacatacgacgcaacagatgccctaccagaaaaaacaaccccccactcggcagcgaggacaatactaaatcatcaggtccaccccctcacgagcagacaggagtgacgaatgcac

SEQ ID NO: 415601 - DNA, 748 bp, Homo Sapiens
  misc_feature (581)..(623): n is a, c, g, or t
ccccccggacaaggttttgtgccccacaggtttttcccccaaaattttttactccaggtcccttgcttttttgggggtcttattctcagtgcagtgtggaaaacaccaccaccttgttagctttttgtactactcgaggaaaactagcaggagggcgaacaaaactatctcacagaggacaatacgtgggttctacgaggtttacagcccatttttatccccgagagaacctcctataactctccaaaaaaaaggggccccggaaaagaaaggggggatctcctcatagggagtaaattcttcgtgtggtgccccccagctttttgttgtgagagacagagatttgtggcctttaaacccccaaaaagaaaaaggggtgtgtctttcttcaaaattcaaaagggtggacacacaaattttctgcaaggggggctcataaacacaaacaaaagggggctcagcaaatcataatcaattttgcgtatttgtggggtgcaccagaaaggtggtaaactaccccggagataatgaagggaggggggaaaaaatccccccagatattttaattatccccccgtgtnnnnnnnnnnnnnnnnnnnnnnnnnnnnnnnnnnnnnnnnnnnccccttgttttgttgaaaacacaccaaaaggtggcccatctttcagagaaaaaagatgggtctctcaacacaccctttatatttttgacacacctataatgcacacataaaccccccttcttttt

SEQ ID NO: 415602 - DNA, 1025 bp, Homo Sapiens
ggggctaaaatggcttcgtacacggggtggccccccgggtaaaaaatgcaaatgggaaaccttgtccttctctgttataaaaccaacctctcaccttacccaacaacatttgtgttaggccaaagttcttcaggggacaactcccgtgggggtgggaattctcgtgggagtgggggtggatacacgaaggataccgtggggtcttgcaacaagtgtgggggtggaaactcccgtggggcactaagctccacaggaagggtgggggccaccaatggctatcagagggtgagatatattcccatatattatttctcacccctctggaggacacttcgacgcctctggtgtgctcccccagtacatggtgtcccctccaaagccagtaagctctcgccgactcttaactcgggagactcttgtgtgaaaaaatatggcaggagaatctcccacaatattctttttgagagtgttaaaagtctgtgttttaaacagaatatcccccaggtggtatttcttatgcgcccaatccacatgtttgtgtggagggccccctgtttggaaaatcttctctggaagtggcacagagaatggcggggacaccctctgggtgaaaggtggtcgttcatagaagagggcgtctggaagcggggacaggctctgtgtgagcgcagaggggggatataactagtacaaacgcgcctagtgggggtgcaagcggggagaataaaacaccctctaataacacagaggtgtgttctcctgctgggatgaatacccccctcggccccaacctctgtgggccgggggatattgccccacaagcaaaaaaagggggcccatgttgtgcagaaagcttgtgtcgcccgcgtgtcccccttttctcactccccccactagagggggctcttttaaaaacgggcaggggtgctcccatttaaacagcctttaagacccttggagtgagagccgtcgcggtggattacaacaccccccggggtttggggagaagttccccggtgacacac

SEQ ID NO: 415603 - DNA, 742 bp, Homo Sapiens
  misc_feature (212)..(221): n is a, c, g, or t
tcttgggtagaggacctgaaaaaaagggatggaggtccactaccgccgccgcaaaagaaaaggacagagaggattaatgatgttcatcccaccggtcgaggcggggggcccaggggcgtagacggcgatgagggggggtacaaacacaagaagaggggcagcagcgacgaggaggagggcaagggcgagacggcggaagcagaaaacgggannnnnnnnnnaacacaacaagaaaaacgacgagagggggcgcgcgccagacgcgagaggttgagtcgggagcacgctaggggacgaaccatggcacaagaaagacgtgcgggcgacggtagcactcacattatcctcgagcgtgcatagaagacagaagaaagagcgcgagcgagagaaaaagacacaacagcgcgagtggcgacactcggtctctcaccagacacgtgcgagaacacgaaaaaggcaaggcccgcatgacccaaggacgctgagactcacacgccggccacacaagcgacacgagagcagacttagtcgaactcatggcacaagtccagaccacagcgagactcttcgacacagagaagagaagagaggagtggtgcggagcgcaacaccatagacaagatgcgaagcgcgtgcgcgcgttgagcagagaacgaaagaagcagggacggagcagtagaacaacaaaatctgccgcgcgaccccacgtcgcagtagctggagcgcgaccgctgtacagacc

SEQ ID NO: 415604 - DNA, 1434 bp, Homo Sapiens
  misc_feature (577)..(638): n is a, c, g, or t
tggatgcagacaacagacagaagaggatgaggaccggccgtgatgcaagggtggaagaaggaggacacggcctcgcccacaacaaaacaaacctgctgcgtcataacacacaaacaaacagagtgtatttacgaagaacacacaaaacgcggcagaccgaacaagaacaacaaacataaacagaaacagcaagtggcggtgaggcgcggcggccgggtaccatatacgcacgcgcgggcgagggaagaatgtagctcggtgacggacgcgcacgaacgagagagagagatgtgcgcgagagcggagggcgcgcgagaaaagaagagatggtgatgcgcgtgcgagtgcgaagagagcgcacagaccgacgtgcgtgtgtgtgagggagagagggcccgccgcgcggtgtgagtgccgcgacaatcacacagctcgacgcgggcgagggtgagtgagtgtcgcccgccacgcgcgatgacaaaaacacacgtcacgcgcggagggagagtcgacacgcctagaccaccccgcagacgagaggggaacacgacccgcgcgacgccgcgagggcggcgannnnnnnnnnnnnnnnnnnnnnnnnnnnnnnnnnnnnnnnnnnnnnnnnnnnnnnnnnnnnntgacagcaacacccgagatagagaggagcgctgtgggcggagggcacagcaaagacatgagagaccagaggggtggagacggccgcggggcccgaccagtgacgtgagcgagaggagagggcgcacgaggcgacgtgacgtagtagggtgcgtacaccccaccacgaagcgcagcgcagcggggacgcgcgagagccgggagtgcggtcccggccccaccgaccgactatgtattatgcacaaacgacgacgacagcgagccgcgcgaccgagagggcaacgcagacaccgacgagaagagaggggtgagcagcaagagcagcgccccccacccaacaggtagctgatactgcggcgcggcgaggagagcgcgagcgtggccgtgagcgacgatcgcaacacacaagacacgagaggggcgggagaggggagcgcgaccccgggcccagccccaaaaataaacagagaagatgtgggcggcggcgccgagcgagagaacacgcagacgagcaacgcagcggaagaacgatggcccctgctgcagcggagcagcacgcgccaccctcgcatatgcgacccaacgagaaaacaacaagagaggagcagcgagcaccaccaacagcacacaccgccggggtgcgggggacgacgcgcacacaacaaaacgcactgcacagcgcgcagcaagggacagacgacactcgcacgcccgcgcgtggggccccaccagccagagggagcgtaggccaaggaatgaacagagcagcacccgatactacgaaggggcggccgcacc

SEQ ID NO: 415605 - DNA, 1065 bp, Homo Sapiens
  misc_feature (419)..(437): n is a, c, g, or t
  misc_feature (529)..(543): n is a, c, g, or t
  misc_feature (569)..(578): n is a, c, g, or t
  misc_feature (741)..(750): n is a, c, g, or t
  misc_feature (974)..(982): n is a, c, g, or t
atatattcgcaggggcaatgcaacacacatacacacgggacccacgggtgtgggtacacaaaaattggttcctttcaccccccagcctgttgtttcctgaaaatttcggtggcgcctagggtggaaaaaagcttgccggcgggtggtggttctctacaaagaggtgtccgagagagcatccacttagaggtgggcccgtgagaggcccaacactcccaagagagagaggtcgtggatatgattacaaacactctcttcttttgtgtggaaaatattctgtgttcgcgcgggagaatacccgcgcggctgtgtgagggagagtgtctcctctaacgccccgacgaacatacagagagcggcggggggctctaatctatcactctcgagagtttatatagagccgacacgacaaagatatnnnnnnnnnnnnnnnnnnnataacgagaggggggcccactagaatagagcgtgacaaaaagaccgcccacgagggggcgccccggggtgcgctccaaaaaaagagaaaagnnnnnnnnnnnnnnntggtatactgcgaggggagtggacannnnnnnnnnatcttttttatcatcgcccacgagtggggcgcgcgcgtataaaaagcgcgccgcagaggagaagcacccacacgtgtggtgcgtcaccaatatgagtggtgggtgcgctgccccgagaattttgaacgcgcgccacgacgggcccacaaaaaagaggggggtnnnnnnnnnntacaaagacgagaggcggaacatttttgtgtgatgaggagccccgagagtgcgggcgcgcgaacacaacacaccacgagtgggggtggcttgttcatatagaggggggggcaacacatgctgcggtcctccacaagacagcagacgcaacacacgaggtcatgtagtgttcacacacacacgagttgggcacccccgcgcgagaaaaccgccgcgtgcgtgtcnnnnnnnnnaggagtacaaatgaagtcacagcacaacgagggtggtaggagagtagaggagccctctataacaaatcaagaccggtgcgtct

SEQ ID NO: 415606 - DNA, 1222 bp, Homo Sapiens
gggagaagggtgttaccttttatatttggaactttttcaaaaattttttttacaattcataaaaaattcccagtgcccaaagataaacaaacacaacggagtgcccttgtggggcaaatctccaaagggaattataccgggagaggcttacaagaagtgctcgagaagggaaaacgccttaggtgtgagtaggggtggtgggaactttcacgaccaccaacactttaattaaaacccgtgcgggcgttacaaactcccagcgagggtctcaacgcgtggaaaggatttacacgacactcgtggttagaaaaaatagtgtgagagggtgtgaaaaaaccctctgtataagcgggtctctctgtgtgaacacaactttctatacagagagggggctctatcacagagagtgtgtgttctctgcggagagatataagtgagaggacagacatctcttacaaggggggggaaacaaacagaggtctgtggggcgttttccacaatctaaatatttataagcgtgcgtcctttaggaggttctccgtgtgtagaaggtgggggacacaaaacaatcttcacacatctcctctgcgtgcgaacacccagtgcgcgtgggtgtgtatctatcttccaccagaagacaacactcagacaaactatattcgcgcctttctcccagaataattcccccaaaatgtggaaaaactctctttataccgagggataacgtgtatcccccccgctgcttgcgcgcatatatacaccgcggatctttatccgcgagaaagttgtcttctataagagacaatatcctccgcgcgtctgctgtgttgccccccaagtggtggcgaacaacactcttctatgatatatattcgaccaacagataaagacgcgctataaagatattgtatcccgccgcccccagaaaacgcgcgtgtggggtattatcctcttatagaagatggtctcttacaaaaaggtggggcgccaaccacaaaaaaatcgtcgcgggtgggcacgaaaaactacgtgctatgtgggggagccccctccccacacggcgcgtggttgtacaacaacgcatctttcccgaagacagagaggggccacaacccacaaccgtcttatacagacgcggcgcgccgccgtggtcttccacccccaacgagggggcggagctctatatataacaagcgggggggcccccccagggcacacaaaa

SEQ ID NO: 415607 - DNA, 774 bp, Homo Sapiens
  misc_feature (133)..(133): n is a, c, g, or t
  misc_feature (427)..(442): n is a, c, g, or t
gaaattttttccccttccccttggtccccacaaaaaaggtggttacaaaagggggtgttgttctctcccacaaaatattttcttgaagtatctgcttagtattattcagggaatgataatatcccgaagaaanaggggtgaggaacactcctttcacactggctggttgaatcaaccaatatgtgttggcgtagttttctaataaacaagtatggggtggggacgaggatatttttgaggattacattgcttgtgatatatgtctacaatatatattagcacaataacgaaaggggccatctaactccaagagggggcgcgggtgtgttcaacatacactagttttagatatatatatctatcgcaaacaacatatatatatctcgagcgagtgagaacgcacaaaaaaagttgttacaaaagagannnnnnnnnnnnnnnncgtccaagaaaaaaacatcgtctcttgtcgatgaacttggcgtgcgagaaaaaacccacgccgcgatagaaaaaacaccaccacgagtggtgttcttcaacatacccgctaagctaatatagttatctttacacgcgcaaaccaccaaatgtgattctattatattatgtgggaggagatatattatcccgctcgcgggggtgtatagcccagcgagagttcagcacaacaccccttggtttggtggacgaggcgacgtgagcacctatctccatgagtggaagatgagaggaggtgcgtttataccaatagataaaaaatggtgtggtgta

SEQ ID NO: 415608 - DNA, 438 bp, Homo Sapiens
  misc_feature (233)..(253): n is a, c, g, or t
  misc_feature (381)..(381): n is a, c, g, or t
tccttcccgaccctccccgcccttggcgggagagaaaaaagaaaattttccctcccccacccctcccgaaagggggggagtatcgggggcgacaccaacacacccccacacacaaattagtttgtttttataaaaaaacaagagaggggagacccaccgaggatggggagacagagagggtgatgtcttatactcctccgcgcgcaccaccgaggagagacagcccgcccgcnnnnnnnnnnnnnnnnnnnnnagagagagagcgcgtgagaaagcaagcgagagagggtgtagacaaccccacgcgcgcggcgcgcgcagagaagagaagatattctcatacacaacacacacagcgagtgagtgaggagagagagaganaaacctatcgcgccactcatcgtgttcttgtatgtagtgagaggcgctctctctgat

SEQ ID NO: 415609 - DNA, 837 bp, Homo Sapiens
  misc_feature (281)..(281): n is a, c, g, or t
  misc_feature (612)..(612): n is a, c, g, or t
acccaaggggggaaaattgttttttaaaaaaacattttagcagctccccttataaaattttacaaaaaaaagcaacaccccgagagggatttccggtttacaattcattataaccccaccatacttatagggggggcgtggctaaactctaacaaagcgtggaaaggtggcccgaggggggtggtaaccagtgcccccgtggtaaagtgttagcgtttttcttacaaaatttcacaaagtgggtggggggatatacttgtggagtgacccctcttgtgganggcaggaagtctctccccccacaaaatatatgtgtcacgacacgtgtggtgtcttgtgtgtgtctctcaaagcaaggctctcacatatatgtgcgggagcaaaaattctcagatcccgcgggagaaatatctcgcgggacgcggcggtttacacaggcgcgcgctgcgcttttgtgtgtgtgtaccacaaagcgtgtgtgtccccatatatgagggtgggtcccccccataaaatgatgggccccaaagagggggacacataagcgcgtgtgtatccccgtgtgtgggtgagaacagtgtgtgtaatatctcgcggccccgcgcggggccncatgaagggggcatagagagtgctgcgcgcgagaggagcgcggtgagaaacctgcgggccccgcgcggggggtgtgctccctctctactaagagggggagggggctcacaccaacacgagcggggtgtgagagtggggcgtgtcctcccccgaggggggacacttcgtgagagcggggtcaccccataaaagagagagccccgccgcggcttatatattaaaccc

SEQ ID NO: 415610 - DNA, 734 bp, Homo Sapiens
  misc_feature (110)..(148): n is a, c, g, or t
  misc_feature (168)..(198): n is a, c, g, or t
  misc_feature (574)..(623): n is a, c, g, or t
cagatgccccaccaccaaagaagaaagaggagcatcaaaaaagagagagggggacgaacatgcacaccccgcccccaaagaagatgcaagggaggcgagtgagcgaagtnnnnnnnnnnnnnnnnnnnnnnnnnnnnnnnnnnnnnnncaccgcgccccacctatatnnnnnnnnnnnnnnnnnnnnnnnnnnnnnnnagacagacaagatagtgatacattacaccacgcaaaccgcgagtggcgagaacacagccacaccactctccatcgtggaggacaaaagagagacggccgggcgcgcagccgagcataaacgaaacgaagaaggacaggaacaacgaacaagaggaaaagagaagagaggagggttcaccgaaaaacaagagacagaacaaagagagcacgcgagagacagacgcagcgcgaaacgaggacgcacagagaagaagacaccaacccaagaaccgcggtggtgagagcgggaggaaatccacacagcgaacagaaaggagagagaggagcgcacccacacagcgtagcactaacagtagcacaacatactacagcgaannnnnnnnnnnnnnnnnnnnnnnnnnnnnnnnnnnnnnnnnnnnnnnnnngaagagagaagcgccccgccgcccactaacagccagagggagcggcgagcggaaccccaacaccaaaacaagaacgacaacacggaaaagataaccgacccccaaaaaaca

SEQ ID NO: 415611 - DNA, 810 bp, Homo Sapiens
aaaaccttggggggtcttcattgggtttgggtcaaaaacccaaggtcctcggaccccacaaaagtgtttgaccccccctccgcggaaccccttcgaggccgcccacctttgtgttgtgcccgaggggagtccgaggttccctcaagtattccggggagcccttttattccggtgaacatcttgtggggcctccagtgtgcacacaacctattaatgtgtggacccgtgggcatattgccgccacgccaaacaagccgtggaatctctgtgcgaggcgtgtatggaacactctccagaacacagattcaacacgaggggcgctttacacacaccaggggccttgccgctgtgcaccaaaacacactgtgtgggggttctcccgtggagaacctctttctcagtggaagaactccaaagcgacgcggtgccacggtctacacctctatcccccagagaggagccaggtgtgcagcaacaaacacccagagaggcgcgcgcccgcgcggagcgcacaccacgcgcgcccagacgcacaaaaccacgcacacacctgtgagaggggaaaaaacgtcgcgcccacggcacaaacctcacacgaggagggggtcgcctctgcaccacaatgcggagagctacccagcggtgtggagcccacgtgccgcgcgtctacgcgcccccccaacagcggcctccacacgggacagaaaaaacccccccgtgcgtgagaacccgggtgtgagacaaccgcgccctccaccacagaggcaaaaacacgtgggagaccccccccggcggggggggagagacact

SEQ ID NO: 415612 - DNA, 1163 bp, Homo Sapiens
  misc_feature (56)..(97): n is a, c, g, or t
aaattttgtttaaaaaatttcctcccattaccaaaccgcctttaacacacttaccnnnnnnnnnnnnnnnnnnnnnnnnnnnnnnnnnnnnnnnnnnccgccctcccgcgaagtattttcgaaaaacacccggtgagcgccctagtagtacacccttcggcgctccctccacacagcgggcataaccgttcacaaatttggtgtctcttaacagggttcccttttaaatcgcgtgttttctagaacagccggtgtgtacagacatcgctcaatcgtaaagtggtacaccccctataggtgcgagtatggtatctctctctctgagtgaagcaagcccatgcgaggtttcatgcgagagacctcttctctctttatgtgtgcggaacgagattatgtgccgccccaacgttgtcgtccccccgctttcactgcacttacttgtcggggacgtaacgaacaagctaacgcacccatcactgctcgagtgcagagaccaaccacacgcgttgagtggtggcgaacaatatcatatcccgcgcaacgaaggaatattttttgtgtcctccccagacacaaccacacgtgtgtgggctgggcgagacccaacaccctgcggtggggaaggatctccttcgcccccgggaggggatgtcttgtcatccatgctatccctgtgtatcctcgctccactctatgttagcaaccgaacaaccaacagctgtgggctatagacaacacatctaccctctcccgccgctgggtgagcaaaccccgcagtgtggtgtgttcaagaagagcagatgtttctctcctcagaagacgggagacgtaatgttgttatcctcggcgggagcaaaaatgtgccaactggatgcgagctctaccgagaaagaagagagcgggttttactggggcgagcaacagccccgcgcggtagtatgattcaccccacaagaggtggggtcgtctccccccgcggcgtttccccccacacaagtagattgtgggtaggtgtctccttacgccacgacatctggtctgtctaactaaacccgcttgctgtcgtggccaccgaacaggacgtgcgccaccccccatactgttgttgaacggcacgaagatggtccctgtgtagaacgggggggaaccatcaaccacacatt

SEQ ID NO: 415613 - DNA, 363 bp, Homo Sapiens
  misc_feature (114)..(154): n is a, c, g, or t
aagaagacaaaatcttttttggggaaaaagaaaagagacggcagcaccccgctcgcgcgcggcgaggagggaggaagaacaacatcacctccctcctcacctgcagcgaggcgnnnnnnnnnnnnnnnnnnnnnnnnnnnnnnnnnnnnnnnnnctcgaagccactgcggcgcggaacggccccacacgccgcatagcaaagcaagagcagacagacgagagagcagaggatgagagcgcagagagcacaaacaacaacagaaaggagacgatgagaatacaatgagctagaagggcggtgacgagagagaggacacacaattgatcagcagccgcgaggcagagcaaagaaaactaaacaat

SEQ ID NO: 415614 - DNA, 1104 bp, Homo Sapiens
  misc_feature (476)..(476): n is a, c, g, or t
  misc_feature (852)..(852): n is a, c, g, or t
atctgcatcaaaaaaaactggaggtacgccaacaaaaacagaaaatatgctccgggggacaaaaagaacagcagccaagcaaaagaagagaagcagactcgcaggggggagccgccgcacaaagacagcgaggcggagccgccaccaagaaaaaatattacatgagacgcgcagcggtggagtgagaggccagcggcggacagaggaacagaagacagccagccctccgcaacaccagcacgagagagagggggaagggcgcgccgcagcactccctcctctccgcgcacgactggtccgcgggagtgggaggacgagcgacggacaaccgcaatcagcaggggtgcggcgcgcagcggcaaaggcacagcaggcaggcgccgaggcagcaacgcgggcgagagggaagcgaacaagagaacagcaacggagaacgactgggaacaagaatacaagcaaagcgacgagttgagatnatgcgcggagagcgtagatgagaaaagcaagacttgtactcgccgacgcagaagcgacaggagggaggagatgatgaagacagaaagagtacaaccaacagacaccacgccaccacgcagacgaacgcgaagaggagacgaagaaggcgaggagccgccgtggggcgcagtgacgacaagacaccgagtaagcacattgaccagacctacacccacgcagacaaccagagacagccgacggcaccaggcgagggagcccgatagcgcaagcgccgcctcagaagtagcacacggaccaggaacgacgaggagcaaagacgatcaacgacgcatgcgagcgaggaaaaaacagacacgacaacaccaacaccgacgnacgcaggagacgacgaggagatcgcgaaatgcagcaacccgcagagaagaaaataagacagagaagaagcagaagagcgcgatgccaccgggtcacgagctgcgtccgcgcagacgagcgtgacgagacatgagcagaggcgccgaggtgaagcggacacacccacagctccgcctcctctttgcgcaggcacgaccgtaccccctggcaacgggaatggagaagagaacaaagcgaacacagctgacagga

SEQ ID NO: 415615 - DNA, 1114 bp, Homo Sapiens
gaaaagggggtcttgctctgtacccccaggtggggatgtgcgtgggcagaatcataacactcttgacaacctccacaattggccggaaaatggtcctcaaattccctaagataggcgtggaaatatcacggggttgagcaacgatatgtgttcaggaataattatggaggaatttctagggggagaaagtggggtattacaccgagtgttgtggccaagggtgtggtctcgagatgtcattgaagcatggagagaaagttgtgcccgtattgtgtgggcctcccaaatagcggcgcgcgggagaatcacaccccgggctgggtggagcgcaccagttcgaaccgcgcacgaagcgcacaatagaggagactcgcaaatttgtgtaaacacaggagtagacaaagctccacagggcgtgagcagttaccacgcacagtacaagaacgcaggcggcgcaagtacaacccaatgcccacacagcgaggagacacatattcggtcccgcccaagagcggcgagcgggaagaagaagggcatgacacccctacacgcgccacggcgtgcagaaggacacctccgctacaaaggtggacccacgagaaaaggacaaacgagagcaagaccaattcccacgagaggactcacacgacacagctgccagataaacgagtacaacacacgacgatcatggtgtactacgagaagcggcagcgcacagacgatgcgttgagagtagaacaacaaccaagaagagaggaaactctctcgccccaccaaaaaacgcaacggacgaggtgcacccgcctaacacaaaactcgaggaagatactatggtgacgccaccgcgaatcatgactgaagcaaaccagcttgtgacgatgtggagaagcggggtcgacgagacgcgggggtggcaccgcccctcgccatcaccagagcgaacgatcagcctgcgtaccaaaaaagaacacaacacaacagaagcaacatacagagaggcccaccgcgtgacgccgaaagaaaaaatccacctggagcgccccccatgcagcagatgggagccatctcctatcaccaactcacaggactaggtagtagatcccccaacgacagg

SEQ ID NO: 415616 - DNA, 582 bp, Homo Sapiens
cgggtatacagcaaagcacatggcctttaacaaacctagatctcaatacagtcacttgagtgagtaacactgagttacttaaactccctgaggtagtaaaatggtgataacacccacctcagtaaggctgctgcagacactgagtaacagctgataccagtgttccttatcagtagcaggcatgtagtgaatgcccagataactacaacatgtctacttaagacttgttgatctgtttataatactctcccaacatggtgctttgcaccttacctaacttatcttgaccatcacttggtttgtctacccattcaatgtatgaagcatacacatgtcttgataacataaaacacggacaccgagaacaacttctggaaggataagctatcaaaagtcctaatagcagtgtacctcttggttgctactgaaatgttactattttgctgttttgccttaactctttgtgtgccaacaaaattcaactaccaaacacctagtttctattatgcctacaatataacgctttaacaccaaacaaaattcacatataataaaaaaacattgctaccaggtacaaggcaa

SEQ ID NO: 415617 - DNA, 812 bp, Homo Sapiens
tcgagttagggatgcgtcaacttatatgaagggctccacctcatctctcccacaaatgactctcaagagacccctccttcgcatgggatacgacaggatcacaggcaggagttcctattctcactgacaagtgaagaggaacattttctggcacagcacttgagggggttcactacaactggccccaaccttacccttgacccccgatgtctgtccacattctcatgtatacacagagaacttcatttcatctacactagtgccctattcatgcctctattccttctgactggaagcgccttccctaccctccgtctgttcttgcatatttctagagcctcgttgaggacccaaggctcaataagtcacgtatctgctaaaggttatcccgtagaccccctcctgcgcattgccacagaccatgcacaattcaaggcatcagtcacactcctttgttctcgtgcatgttatatgtacatgtccgcccagacagaaggactttgcacccagtggtgaagggacgtgtgatgggggcccatgctcacgtctcatcacccaaccagaactggcagacttccttgagggcagggcccaatgtcgcagttcaccaaccagtgtccctggttaagtggtctccagatgtctggcgcaggtcaacatacaacggcaaggacgtgaattgagccaaaataaacaaagactccagtgccctactccatagagatccttcatgctacagccttacccagtaggaatatcgcttaccaagacaccttttggcaaaaaaactgaaaacggaaacacggaagcca

SEQ ID NO: 415618 - DNA, 680 bp, Homo Sapiens
tacgctgaagccctggcctgggacaagggcactaggggcgttgccccccatacatggcatgcggcggttcctagtgttagcgctatggagctacattttagtgttaatagagcctggggccatggccgctgggagcattgtccctcagatgacgttgtgcacgttgatctggaacagcccttggtaacccaattctgctgagggcaaggcaggggtgcctcctcgcacttggggcggccagacagatggcacgtggtgtgaacacgcaatgacacactcaaggcacggagtcacttgtgaaggggggctgggaggggggcttgactgggtcaggatctgacagttctaaaatagattctgttctcgtgaaagaagcttgttcatagaaatgttgcaggcgtgtgcggattgacgagatagcgctgatagctgtccagtcttgttatgtagaatgaacaggctgtaggcagaatcaattgagccgaggtttgggcgacttgtgtggggtgtctcccgagtggaaagtgagtacgagcgtatcagtacagaaacgagtccatatgtgttcgcgtattgacgcgccattggcgcggccgcactcggcaggacgggcgggtgagggcttattgcgggggcaacttgtgaggcatcgggaagggcccacaccctgggtaaacaca

SEQ ID NO: 415619 - DNA, 638 bp, Homo Sapiens
ggttcaagcattctccgactggcggattcttattcatggctgaatatattcattgtggtaatatatgccaatatttcgctaggacatgtaagttgttccaatatattggctattgtgagataactgcaatgagtgtggaagttgcagatgatctctttgagattctgatttaatttcctttggattgatacccaatactaggcaacacagataatctatataggaagttgatacaatcgatgttggactaaaacatcaagaaggcacaatatgagaacagagagatactgctgcaaaacagtaccacccgtctgggtttgggaggtgccagcagaggaagcttgggctgtcagaacctggcacttgagggaaaaggtgccccctctgctgctgctggcacctgcggggcaggggcaagcctggttgggggagtgcaaacagacactgaagcccagaaccagctctagcaaccgaggtaaggggctcatactggggtgataacctaaaggaacagcagccaatgttaagggtcaaatacgttctactttttatttgctattaggatcatgtggttaatttgaccattcagtccttaaagaatatttgagtgccagccaattttctttaagctaactaga

SEQ ID NO: 415620 - DNA, 718 bp, Homo Sapiens
gtagcattaaaaaacaagatagttccaggctcccatttccaaaattcttatcagtctccctagatgattatagcaaaggaaccaagtaacatgtacaactacgtcatcacatttcccaattgagattcttttccaaatgcgtaattttatcaattacagtaactaagtaaatccatgatcagcaaacagtagctaggtgatgacgaatttaaacaaagcatgtaaataatttggcaactcaaccatgtaattcaaacctagtaacaggtaaaaaactaaatattctgaagttataatagtgggagtatatgtatacttactgtatatgtgtatgcacacatatatacatgcagtggtgttgtattggggtttgatgtgtcatctctgtccatagatcagccaagaggaagaacggtaattcgtttaagagttaggaactgggcttaccttgtgacaatttcatatcacgcgtatttcctttactattgtatgacagtaagctgactgctataaacactgttgctctgaacgcctagagttagaataaagtctatttcgagaacagcatttatcagtgcccaaagatagagtaaggaacaactgttgcagattacatcgagatatggagcttggactacacgctgatctctgagaacaatgtttcgcaccatcttctaagagaggtagtgagtattggcttcaacccggtcaagatgat

SEQ ID NO: 415621 - DNA, 652 bp, Homo Sapiens
aacaatgctatatcaaattatgccaaagtcccaacatatcatttcatttgctaagttaattccgtggggatcagagcagagtgatacgcaagtttattaagcacagactacaacgtcaatgacagcctcctgacgattgtcagcgaagatcagaaaacatgctataaaaaatcttcgaaatgcaggttcgaatgcaaatccaagtgacaggaaaaagcactactgtgtaagccttaatcgtgcaaagtatatttcctcttacacaaggaggtttgtagtacaactggagatgaaggcctggttggacagatagacataggatggcactagattcctacatgggatgaaaattcccatatacctgactggggcgtgctgcctctctgctagggcctcatcaggcagtcgacttcaaacttgaatgcattaggcgcctgtaaggttgtaacgagaatgctaacctctaggcttgatcttagcaaaaggctgattttctttgaggcagcatattctccgagtgcagaactgcatggagaacaggtgagtgtggacttcgtgtgaacgaaagatctgctgaagagtacctctatggatctagcatgaagaggtaagatgatttgccacaccaggtctccgagcacttacagtgcaa

SEQ ID NO: 415622 - DNA, 1043 bp, Homo Sapiens
  misc_feature (172)..(227): n is a, c, g, or t
  misc_feature (288)..(348): n is a, c, g, or t
ggagtacaggggatgaggaggaaagaatagagagtgacttgctaaagggtataggagttccctttatcatcagtgcttcctccacagtggtggacagttacataaccttgttaataagctataaaccaacggattatagaattttatttatgtttattttccagagtctaannnnnnnnnnnnnnnnnnnnnnnnnnnnnnnnnnnnnnnnnnnnnnnnnnnnnnnncgctcagcctcacccatttgtctgggattgacaggcactaagccaccatacccggttctgnnnnnnnnnnnnnnnnnnnnnnnnnnnnnnnnnnnnnnnnnnnnnnnnnnnnnnnnnnnnnaaaagaacagggaggtctgtactgagatgatataatcttcaaatatagtaagtgagagaagaaaggtacagaatagtgtgcctaatatactgttatattctttaacagacatgtacacatgtacatatagcactgtgcaggcataaaacctctataagatagcacatataggaaaccagtaacattatttcctaaagggaaggaacctggggtgcctggggataaggtggtctggaagggagacctaacttttcaaccatgctcttttgtaccttttgaactttgtatcgagtacaacgacgtctagcgtgtatgtttactaagttttagagaaaagcaagaaaccggaataccgtctgattggctatgagtctttaggttacctcattgttaggagaatcatctggcagtctcgcgtctggtaataagccttacaaggatattccaccccagttggtcaagatgcactgtagttccaagagacaaaggttaacgctctttaagaaatcgccccggatgttaggtagtacactcccttgaagtgagtccttattaattcggttatagtgccaatggtttcagctttcgtcacctgggagaaaaacggcaacacggggcttaacacctatctgagtgtccacctgggacgttcatgcaacaagtgattcgattaagggggtgttgggcgttgcaac

SEQ ID NO: 415623 - DNA, 707 bp, Homo Sapiens
  misc_feature (91)..(167): n is a, c, g, or t
gacttgtatccccgtgcttatctcccaaagatgctgggattataggcatgagcctacctcacccagccagccaataattttttttggaggnnnnnnnnnnnnnnnnnnnnnnnnnnnnnnnnnnnnnnnnnnnnnnnnnnnnnnnnnnnnnnnnnnnnnnnnnnnnntgggcccaagccagtcccaccaccccagcctcctgagtatctgggactaaagactcacatcgcaccagtgccaggccagaatttcttaagtttttcttgtaagagacagattctcacttgtgttgaccaggctggtctcatactccttgcctgaagtgtgatcctcctgcctctagcctcccacagtggtgggaccactggcatgagccactacgcttggtttatgccaataattaaaaaattttaatagataacatatttagatgataaatgaaatatataacttatcaaaactgacgacattaagaaatagaaacatattaactagctctattactattcaagaaattgtatccataattcaaaaacttcccttaaaggagaactccagatggcttcaccagtagattctaactaaacattttaagtaaaaaagaatgacaatcttatacaaactcttccagagaacataaaaataggaaacacccctaacctgttgtatgaagctagcataacttttttaaatcaaagcctgacaac

SEQ ID NO: 415624 - DNA, 419 bp, Homo Sapiens
tatgcccttggccgtttccaagccaaatgaaaacattctgcgactacaatgatataatctcatgcgggggtgtgaaaacagtaggaacatgcaaacataggaagttaaacaaaacttgccgtaaagtgcttaccatcaggagaaaaactgataatgcacatatcaatacaatgcttcctcaccatttgcactcgagttaaactagaaacttgaataatttgtggggcgtaaagacaaccaagacagaagtatcatcactgctggaacaaatgatttgtccgtaaggacttcatatgaggccaagaatacacaatacgttgactatcgtgaatgaggtaacatgtagaagactgactgaaagacaacagtaggagtgcaaaacacaccacacaacgttagccaccaagaggacaaggaac

SEQ ID NO: 415625 - DNA, 1058 bp, Homo Sapiens
tcggccagacacggtccctgccctcatggagctcactagtctggtgggggaagacagacacacagacaatcaacaaagcacatgtagtgattgagggctactattggccgccagcagcctgtccttgtctcatatagaagatctagggtcgatcctaatacagatgtggttgcttatagaatagaagaaaagacagcgatattcaggcatagtggagaactaggatgggaagataacccatgtgaagccacgcatgaggtcaacacactagtgcatgcgtatgaagtcctggtgcattcgctcgcatagtggagccattagatttgtgctctgagcttccgatgtgagacccctagaggctcactcgtccgcagcgatgcaccatcatccgcaggcgactgggatgtcctgcagtctcgagagcatgtgacttcagacttgacgagacggcatcctgaagcatcatgaaagctagatgtcataccggttagagacttggatgttgctggcgcctctacgggacaccagttggaacgcgttacaccaagctgagaggccatgtgattaagaccagcggagttgtcagtggagctacctatagagaaccatgacagcacaagaaagggacgtaggtacacataggcggatacaagatacctagtacagaattcgactccatgcaagcctccacagagatgcaacaggcgagtaaacacgaggacttcacgcgggtatgtacatacggccagacttggggagttaaccatagccagcccacatacatcagaacaaaaatcacagttacgtaaggagcgtgtccaaagaattgaaaaccagcatagaaaccacgcattacatacacgaacccctaaccaaaaagggttcacattgtaacaagaacctttgcagaaagcatccaccggcaccagaaaacccctcagcacacaaggacttcgcatatacaccagagaggattaagaacacaaatcatatacctaggacaaacatgttcactcgaaacatcaactgacgtggaaaacattagtccaaggacgacc

SEQ ID NO: 415626 - DNA, 2691 bp, Homo Sapiens
  misc_feature (35)..(35): n is a, c, g, or t
  misc_feature (94)..(282): n is a, c, g, or t
  misc_feature (333)..(576): n is a, c, g, or t
  misc_feature (770)..(804): n is a, c, g, or t
  misc_feature (875)..(1472): n is a, c, g, or t
  misc_feature (1482)..(1629): n is a, c, g, or t
  misc_feature (1793)..(2048): n is a, c, g, or t
  misc_feature (2114)..(2191): n is a, c, g, or t
  misc_feature (2305)..(2400): n is a, c, g, or t
  misc_feature (2433)..(2526): n is a, c, g, or t
  misc_feature (2566)..(2576): n is a, c, g, or t
  misc_feature (2593)..(2644): n is a, c, g, or t
aggggctacacgccgtacagcttaagaaggccccncttcaggcaggggggaattcacttaactaaggacaggtcgggtccgggcctcctttacnnnnnnnnnnnnnnnnnnnnnnnnnnnnnnnnnnnnnnnnnnnnnnnnnnnnnnnnnnnnnnnnnnnnnnnnnnnnnnnnnnnnnnnnnnnnnnnnnnnnnnnnnnnnnnnnnnnnnnnnnnnnnnnnnnnnnnnnnnnnnnnnnnnnnnnnnnnnnnnnnnnnnnnnnnnnnnnnnnnnnnnnnnnnntattctctctcatcatatacttctcttccttttcattttctctccctcctnnnnnnnnnnnnnnnnnnnnnnnnnnnnnnnnnnnnnnnnnnnnnnnnnnnnnnnnnnnnnnnnnnnnnnnnnnnnnnnnnnnnnnnnnnnnnnnnnnnnnnnnnnnnnnnnnnnnnnnnnnnnnnnnnnnnnnnnnnnnnnnnnnnnnnnnnnnnnnnnnnnnnnnnnnnnnnnnnnnnnnnnnnnnnnnnnnnnnnnnnnnnnnnnnnnnnnnnnnnnnnnnnnnnnnnnnnnnnnnnnnnnatacctcctcattctctccttcttttatacatcccagccctcacacgaacactcactacacccccgatcacttactttctcgtcgctcctacttatctcctacctctatcctactcaacacacaccttcctcatatatcttctttcacactctttatcacttcttctcatcttatacttctatatttacctctnnnnnnnnnnnnnnnnnnnnnnnnnnnnnnnnnnnttctccatcctatactctcctcttcactttttacattctaccttcctcttctatcatatctcctccctctnnnnnnnnnnnnnnnnnnnnnnnnnnnnnnnnnnnnnnnnnnnnnnnnnnnnnnnnnnnnnnnnnnnnnnnnnnnnnnnnnnnnnnnnnnnnnnnnnnnnnnnnnnnnnnnnnnnnnnnnnnnnnnnnnnnnnnnnnnnnnnnnnnnnnnnnnnnnnnnnnnnnnnnnnnnnnnnnnnnnnnnnnnnnnnnnnnnnnnnnnnnnnnnnnnnnnnnnnnnnnnnnnnnnnnnnnnnnnnnnnnnnnnnnnnnnnnnnnnnnnnnnnnnnnnnnnnnnnnnnnnnnnnnnnnnnnnnnnnnnnnnnnnnnnnnnnnnnnnnnnnnnnnnnnnnnnnnnnnnnnnnnnnnnnnnnnnnnnnnnnnnnnnnnnnnnnnnnnnnnnnnnnnnnnnnnnnnnnnnnnnnnnnnnnnnnnnnnnnnnnnnnnnnnnnnnnnnnnnnnnnnnnnnnnnnnnnnnnnnnnnnnnnnnnnnnnnnnnnnnnnnnnnnnnnnnnnnnnnnnnnnnnnnnnnnnnnnnnnnnnnnnnnnnnnnnnnnnnnnnnnnnnnnnnnnnnnnnnnnnnnnnnnnnnnnnnnnnnnnnnnnnnnnnnnnnnnnnnncgagcgccannnnnnnnnnnnnnnnnnnnnnnnnnnnnnnnnnnnnnnnnnnnnnnnnnnnnnnnnnnnnnnnnnnnnnnnnnnnnnnnnnnnnnnnnnnnnnnnnnnnnnnnnnnnnnnnnnnnnnnnnnnnnnnnnnnnnnnnnnnnnnnnnnnngcacgcagcgcacacaacccggccgacccaagcaccacacgcacccagcgccagacacacgagaacaacaacgaccaccgcgcaaccacacagcacacacaggccaccagcgaccacaaccaacacgccccacagcgactagcacaacaaacagacaaacacgnnnnnnnnnnnnnnnnnnnnnnnnnnnnnnnnnnnnnnnnnnnnnnnnnnnnnnnnnnnnnnnnnnnnnnnnnnnnnnnnnnnnnnnnnnnnnnnnnnnnnnnnnnnnnnnnnnnnnnnnnnnnnnnnnnnnnnnnnnnnnnnnnnnnnnnnnnnnnnnnnnnnnnnnnnnnnnnnnnnnnnnnnnnnnnnnnnnnnnnnnnnnnnnnnnnnnnnnnnnnnnnnnnnnnnnnnnnnnnnnnnnnnnnnnnnnnnnncaacccggagccccgcccgacaacaccacacacacgaccaccacagcacgcacagacgcacagcannnnnnnnnnnnnnnnnnnnnnnnnnnnnnnnnnnnnnnnnnnnnnnnnnnnnnnnnnnnnnnnnnnnnnnnnnnnnngaacagcagcaccgacgaaagcacaccaacacacaacccgacgacaaaaacgcgacaccacccgacccacacaccccaacgacagacgagaacagacaccaccaccaaacaccnnnnnnnnnnnnnnnnnnnnnnnnnnnnnnnnnnnnnnnnnnnnnnnnnnnnnnnnnnnnnnnnnnnnnnnnnnnnnnnnnnnnnnnnnnnnnnnncagcgcaaaccagccaaagacaaacagaagcgnnnnnnnnnnnnnnnnnnnnnnnnnnnnnnnnnnnnnnnnnnnnnnnnnnnnnnnnnnnnnnnnnnnnnnnnnnnnnnnnnnnnnnnnnnnnnnagcagcaaccccgcccacccaacagaggcaacagacacannnnnnnnnnnaccagccacgacgcacnnnnnnnnnnnnnnnnnnnnnnnnnnnnnnnnnnnnnnnnnnnnnnnnnnnnagacaaccaagaaaagccacgccaccgcccccacacccgaggacgac

SEQ ID NO: 415627 - DNA, 724 bp, Homo Sapiens
gggctggtaccgcccggaatgtagggatttttaggacagattcatatgaacaaataattttaccagattgtaaaaaatgtagaggaatttggactccttagatggtggtccaaatgaaaggctgataaattctgcttgggggccttgattcagagaagacttcaaatagaaaatgcttgaaaggagcaaattagataataaggaaatctttacatactctattgctgttcttatgttgttgtcattagctgtttaagcgtatgcatatgacttatcacatctaagatgcttgaatagttttggatagcatatattcataagaacatttgttaacattaaagtaaacttctagcctggagaagggtagactcaggggtatgcatgatagcatgtttaaataatctgaaggaatgctgtagggtgggtggagtgacaggtttaaactgctccagaatacagaatcaggatcaatgaataaaggttatgagaaggctgatttaccctcactacaaagaagaacctttcaataattaaagcacagcctgggaggaatcttaattgacaaagagaaagtgcagctttgaaagcaaatgcagagagagcttcacagaaaagagagcatggaaaaatcaagccctgaataatgtaatatcatgtgtgggtattcagaagccaaaggaagatggtaaactggtagcagtgacagtggtcctgggagagagat

SEQ ID NO: 415628 - DNA, 1289 bp, Homo Sapiens
  misc_feature (221)..(221): n is a, c, g, or t
  misc_feature (438)..(438): n is a, c, g, or t
  misc_feature (1115)..(1115): n is a, c, g, or t
  misc_feature (1274)..(1274): n is a, c, g, or t
ggaactgggtaccggcccggaatttactggtcatagttacgcaacgagcaggcctagagtctgaccccagacgacactgcacgtcgtttctgactacagaggatgcactaattctatttcctgtgccacctgagaaaatcataatctgagaagagaaagtgtcaggccatgtcgtagtgaactattatttccaaaccctcacggaaccctgtaacagggtngtgaattgatggattcatcaacttagcttgactgtctgcctggtatcagccttctgctgttcgcaactcacataaaggctaaagccgcttacagctatggttcattattcctgtccagactcgtttactcgccgctaaagattatctcatgttcatcttggctcagttctcaacgcccacatcgtcgacgtctcattaacggataatcactagccanaacatcaagatcagtaccttcacctttgtgatgccaccctcgaaggtaccgcagtggagataggtccatactcataagcgtagaagggagaagaggggaaaagtcatagaagggacaagcgcgaggggatggctattttcgatcaatttggaccttcctcgttatcgcttctttcctgacacgtacgccggggaatatctccgagcgtaacgttgtcgagaacgaagtgcttgcgaaggaagagatccatattagtggacattcccattctctatgcgccttgccttctagaatctctcccctcttccttctagcacttggtcgtcccctaccacccgtggtttaaatactaggggggtaaaaacccttgttgggtgagcttgactccgtaaactttgtaaggttttaagagaacgggaaatatttagctcgggtggaaagggatgaatgcgggggcaatagggtaggttgcggttttgggacagtcgacggaagcgggagaatttgggaaatttttaatagtgggggacagctcttttgtttgagcgcgcgaagataggaaccgttgacttttcgcgcaacgccgaattataataggtaaccctattcgacgtaagataaggggcctcttggacccggcttttggtttgggaaagagcccactttttaccgcaggnggcgtaggccctctaacgaaaggggcgaaattggttgaccaagggttggaaggaattcctaccggaatgacacgcgcgcactgtgtgggtggcccagcgggagatggcccccgttgtggatgtcgccgtttagggggggcaaaaattctgcttttcttnctccttcaccaaacg

SEQ ID NO: 415629 - DNA, 788 bp, Homo Sapiens
  misc_feature (424)..(507): n is a, c, g, or t
aaagggccccaagctggtaccgtccggaagtaagggatgttgggggagaggtctggctcaagctgccacatcccactggaagcttctgggatgtctcatgatcctctgccaataccagctgtactactgaagtagacatccccaaagagatgggtttgactttgtacacgagtcagtgcagctgctggattcatagagggaggacctctgattgactttcacccactttgctccctccaccccgaactgttcagtgctgatctgacagcccccggtcaggaactggttttaaatctaattatatatgtgccccttgcaatggggtcgcagtgcctgaaacacgacctcctgcagctagtatatacagcgggcaccatggaaagatccagctccttggacgtctccaggctggagtgagagctgnnnnnnnnnnnnnnnnnnnnnnnnnnnnnnnnnnnnnnnnnnnnnnnnnnnnnnnnnnnnnnnnnnnnnnnnnnnnnnnnnnnncccaactcataaggttgctctgcagatgcgaggtcccatgcccaggacctagcacagaggtttagtcagctgtagctctcattgtgggacgcacacagagcttgtcgctccgtctgggatcccctgtgccctccaggaaggcaacagcccctgagaagctctggggatggttcccactggagactgcacaccaggctttaagcagctcctctccttcacagacccgctggccgtccttccccccactgtggcttctcatctgtggaggtgccttctgggga

SEQ ID NO: 415630 - DNA, 845 bp, Homo Sapiens
gaatttactctccataacggtctatgttatcaccaacatttttaaaaactgtgatttaaattcccatttcaagagttacattaacccgattacttccaaatgggtgctaagcaaaaacccccaatggttttattggacccatgggactggcacctcatggttgaatggtggaatatttatttccatggtccctctataactgggttattactggtcctccctctagctggtattggtatttcagatatgtgatatctggttttcatactctggcctttccatcatgaatgcttaagttatgaacagagattcccttggtagagctcataggcagtacagagcaggtaagtctggcctcagaagggcctggtaatctgggggtagtttttaaatagtggcatagggtatagggtatagtggtacatttggtattggcacatagttggtggccccgaaggggtattttaccaagcctttatttcttccaggtatttcacagctccggagcacaagattctcgttctttcaaattacacaggtaattccgcttaacttaacaacattaaatctggggcttggaattcccaagtgcatgggactgatggatcgtaggggagtaaaaggctgtccaaccatccttagtttggggaaagtggctcctactgcttgtttcataagcgtaacagtacaacgggttgccattgggggtattctaccatgtccagcatgactggtcccaaatgcttgatctggtcaattactagaatgtaataagtcccaatctatgtaaatactctctctcaaacggcctttaaaacaagtgtacatcatctgcatggtattgg

SEQ ID NO: 415631 - DNA, 747 bp, Homo Sapiens
  misc_feature (579)..(639): n is a, c, g, or t
gattatgaagattgttaacttaaataagagttatagttttagcacttaacgttggtcttttatgagttttaattaattttgtacatgtgtgagtggaggtccaaattaattcttttatatgtgcttttccagctgtctcccagcacaattgttgaaaatagaattctttctctactgaatggtcttgagaccttggagaaaatcaattaaccataagtatatgagtttatttctggaccctaaatttgattccattgagctatgtttctatgcttgtatgtattcataagtcagttggtagttcgtgtcttcctaggaatttgtctatttcatttaggttatctaatttgttggtatataattgctcatatgatttctttataaccccatttatttctgtaaagtcaatgtaatgtcctctctttcattactgattttagtaatttgagtcctcttttttctcttggtaagtctaaagttttgatttggttaattatgttgtattttttttaaataaccaattttggtgcttgttcattttctctatggtgtttcttttctctatgtcatttatgtacnnnnnnnnnnnnnnnnnnnnnnnnnnnnnnnnnnnnnnnnnnnnnnnnnnnnnnnnnnnnnctagtttattatatacttaggttattgatttgagatattgggcgtgaaagtgtggatgttttccaatgaaaaaattctcatctaaaatactgcattggaaggatccat

SEQ ID NO: 415632 - DNA, 315 bp, Homo Sapiens
ggcgtttacggatggcgccaagctgcatgtcgccctctgatgtgcaggcagcagcctcataggcaactcctgggcccgcccgcactccccacatctcggaatgcagggccagatgttccatgtggctgctggccgagccaggcggtctgccctgcagcagctgcactggtgggctggtgaaccggccctcagccccatccccgtgtggctgcagagtggccccatggctagaggtctcgagctctggcagaggaggatgcctgggagggggcagtggtctggcgggctctcagtgccaggggcatccgcgatcca

SEQ ID NO: 415633 - DNA, 1392 bp, Homo Sapiens
cctggagctctggggagcggagcgtggtggggaggggagctgggacagtgcgacacatggaagacagcggcgccgcgtgcctctccccgacctagtgctgggcccgtgatcctactggacgccctgagggcacaccagacctgcgcctctagatgtcaccccactgccgaaccccatcaccctctttctctagaacgtatacttttccagtcgcgttcgcactgacgttgtaggcaatcagatgagtagctttagaagagtggtcgaacagaggaatgctactagagggggacggacaacgtgaggaacagaaagaccagggaggactgacggtatcatgttaaggtcgagaagaagggaagcgccgagaagaaacgataactgagcacaaaacgacgatgagcgaggacgaaagtgggcagcatgagagaatcaggaggagagagacactcaaatagacacgacagaagccaacagcgaacaagccgggcggatgcgagatgacgcgagacgcggagaaccggaagcgatctactacaggagctgatgacggagcgatcgcacaacgaaccagacacatccacaacacacactcaccaccgatctctcttcctacctgcccaaatctcaacaatcggtatccaaaacatgaactgataccccatttccctcactacacatcatcagacagcagacaagtcccaaacccaccactctataaacaactcaacagtgtcttcaagagaccacaacataacagctaacagaaccagcaatctacgaccataacacaaaacactagcacaccaccactaagatgcaccagcaaacaccaacgaccaagaacacaacacaagcacactatctccaccgtccaccaataactacacaacctacactacgacgccatcctacccctacgacatcagacgccgcccaaaaacaccatagtataaattatctatactcacaagccgcacacgacgctcacccacatcagcaagtcacaggtagcccaccagcgtagaacacaggcatcagagtccacgccggcgcacacagcagcaccccaaacgaacagcggaagcggagccgctacatagggaccgcgctagcaggagagagcagtgagcagaacggcagctcgaacgcgcgatgtggaacaggcggcgcgcggggcgacgggaagccgcagaggcgcggcagcagctcgtggcggaaccggccaggcgcgcggggtgcgagacgagcgcgtatgtgccgcccgtgcggcggtcgcccccgccaggtcgggtttgcaagacaggggcgcgcagcgggagccgaagtgccgtggagaccctcggctgtaggagggaatacaggacaggagtacacagcgagcgaagaacg

SEQ ID NO: 415634 - DNA, 210 bp, Homo Sapiens
acgggaatccaggcaccggatcaccaggcgcatctctaacgtcaccatcacaacaaatcacagacagcacaccctcacaccgctcgcgcgcacagctcaccatccacacaaactcccacgcatcatccacgaccacgcacacagcaacaacccgcagctatcgcaacacaaacgcacaacaccctccttacccacggaacacaccagaaa

SEQ ID NO: 415635 - DNA, 121 bp, Homo Sapiens
cagcacgcccgaggaagcaaacagaaccacaggcagcgaaaggggacgaaacgaggacagcaacgcacgccacacacaagaaaagccgaacaggagacccaggcaacacacatcgggcacc

SEQ ID NO: 415636 - DNA, 693 bp, Homo Sapiens
ggctgtggtgtagacctggatgccagctgccctggagactctgtgctgtcctgtggggtctttggcagtagaggaatggcccattttacggagactgccctgtgattttgcttgggaagagaccttgggtctcagttgtgccttgcgggcagcaccgtctcagtgggtttccagccgcagggctgtgggagttcacgtttgcctgaggctggatgtaccggctcaggcccccagcacacaacccacatcactcactggctcttgtggggatgtgcctcagcacctgacacacaacacctggttctgagtgggctgggtccaggcaccttcgctaagcttcctccaccagcgggacctggttctgggtgggctgggtctgggcaccttcgctaagcttcctccagcaccggggctggcaaggagcgaggcaaaggtgtgtgtggtgccatcctgtaggagccaggctccttggggatggtgtccttcattttgaaaatgtttccttcccatggggatgggggcagccagaatgcccactctttaatgcacctgtgccagtggcccacagggacacggtgtcccctccccgcgacacccctgtgccgcagctgcccttcccagacgcatccgtcgtgagtggctctcgccatgctgtggctggttgagctgaggtgccagcgctgggcaccctcg

SEQ ID NO: 415637 - DNA, 612 bp, Homo Sapiens
  misc_feature (93)..(109): n is a, c, g, or t
  misc_feature (121)..(370): n is a, c, g, or t
ctctaatcagcttgtctcttttcttttgtcctatatcatggaaaatcctacctccatgttttgttgataaactctacccttccaggaatgccnnnnnnnnnnnnnnnnngggtacagtctnnnnnnnnnnnnnnnnnnnnnnnnnnnnnnnnnnnnnnnnnnnnnnnnnnnnnnnnnnnnnnnnnnnnnnnnnnnnnnnnnnnnnnnnnnnnnnnnnnnnnnnnnnnnnnnnnnnnnnnnnnnnnnnnnnnnnnnnnnnnnnnnnnnnnnnnnnnnnnnnnnnnnnnnnnnnnnnnnnnnnnnnnnnnnnnnnnnnnnnnnnnnnnnnnnnnnnnnnnnnnnnnnnnnnnnnnnnnnnnnnnnnnnnnnntaagccaccacacatggcccaggaatgccttttccagtatacctatccaaaactattcagtaggacctgaatgaagttccatctccttggtaaaatagttcttataaacacagatcttttcaagtcttaaaattccataactcctattttcggtgcctcacaagggaagatttaccatatatggtctaacgtggttctctgatgtacatggtcttagattttttcattgcaactatctactt

SEQ ID NO: 415638 - DNA, 596 bp, Homo Sapiens
cgtatatgtaccacattttctttgtctaatccaccattgatgggcacttggattgatgccatgtctttgctgttgtgaatagtacccgataaatatacaaatgcaggtgtcatttggtagaatgatttattttcctttgggtatacacccagtaatgggattgtcgggttgaacggtaattctatgttgagttctttgagaaatctccgaaccactttctacaggggctgaactaatttggattccacaaccagcgtataaaacttcccttttctccttaaacttggccatggtctggtatttcctggaactccttattaaagagaacaggtggtaaacactggtaccaatctaatttctgggcttctcacgaatccaatctggctttcggttaacctttggattatttggggctcttaattcacaattggtgacctttgcgggtgggcttggtggtgttttgaccctttattttatatgtgggctctaccatttctgtgctgtgtatttccctggtgtgagggttttgagagacatttttccatgtgaaattccgggacctttaatctcggatgtgccccccattccttctctcg

SEQ ID NO: 415639 - DNA, 839 bp, Homo Sapiens
cttcctcttctgggctggtattgcctggcacgatgagttggccccctcgtcctcagtgtgctgtgcgtggcatcgcaggtgccctgtggtgcagcaggcatctgaaccctcctggacttgctaacgcacttccatgtgtatgcgcacgcgtttccttttttatcctaggagagggcttgtggcatccagcagattctcctgagggtttgtgacccccccacacccccaaaaagtcaggcacttgttccttgtcacggtcactgtcattgatagcaagaagtatcccggttgttggtaatttagccgtttgcttcctttttctgccccagagggtctgtttcaggggaacagccacacagatttgggtaccttcggttattgccctgcctcccagttgtgcgggaagcagttgctccgacactagtggacggagcagaacctgtgccttgtggtctcagcactgggccggactcacctgagagctggtgtggaaaaccagttgcactaggacctctgcagaaggagtggaacttttgcgtagttttcttaatgcagcgtcatggatccatcttcctgtggagggaactcttctgtgtgtgatatggagggcacgggtctggagccagtctggggagggctgagggagagctgccctgagcttggttctggaggatgaggtggggtgctcctgggcactctgagaacatggctttgcctggtagcaggacagctggaggtcttctttctgccacagtcagcttacgatgaagctgttcggatgatgagctcccagctacagagtcaggacccaagcggggctccacgaaaaggcctgggcc

SEQ ID NO: 415640 - DNA, 846 bp, Homo Sapiens
cagctgccgggcgatttagcgtgatgtgctggccagcgggcgatggagacagatgagacaccgctggacgagagtgatggcgggttgggggagtgcggggagagtgcgtggggcggaggctggtgcagggtggcgctggaagctggagcggtccgtgtcgctcccctgcgccctgagggtcacggatgtgctctgaagctggctgcttgcaccgctggggcccaggcggcgtgctcctccctgctccgaggcaactctgggctcgtgcgccgtctgggctgcgacggtgcggtgtggacgcactgcgaatgctgccgagagtggcggtgcgactggccgaatgcttcctggcgttgtgccttaaccgaggtacagcgggaaggccggacgggacaagtacgcctattccgggcctcaggccttgatttcgtcatctcgactcctccggacgctcgcgtgttcggctctttcagtcattcgggctttcttgcgtgtgctgaggtttccccgcggcgatgcgaggtggatccttgtcaaggccctagggggtataggccaattctgcagctgagctggcttgtcgggcttgccgagcagtacttcggtgtgagggttgcttcgagtttgtacccttttcactcttggttggcggccggaaactttggcaagtggggacagcgttcaacaaggtaaccgcctttgaacgttccaggggttctaacggttgaacaaaactcttgaggtccaaaagctaataaggggcggctacttacacaagcggaaaggaggcaccaggctacactgaactcaaaaacccgaaggtgatactaattattcccgtcccta

SEQ ID NO: 415641 - DNA, 340 bp, Homo Sapiens
actaacttaattatatactacttatatctaacgttaattatatcctatatacttaatcttgaaatagataccagtagaagcagaatgcattaggaattgagccatgtctaccactaggcacaccaccactatggaatcagaatctaagtgaagcttgagtaccctttcacatactctgtatatgattcaaaactagtggtaagcactgggcaaaaatggaatagagcttaatggacagccagtaggctcagccatcatattcttgaaaacctagaaaatgccagtattctgggtctcttaaattcattattttaaagtctggatgatctggctgggtgcg

SEQ ID NO: 415642 - DNA, 919 bp, Homo Sapiens
  misc_feature (386)..(404): n is a, c, g, or t
taatagtcactttaacattgagacctctgactcattgaattcaggttttttaagtacttgaaactcttcagtattctccttgattttagtttctttatatacatttatgaagtagaaagcattgtttggtaaactgtggttgagaataaatagcctagtctcttatcctctttagcgtggcattaaaggtgaagttctgcaaatgggagagtgttcacagtagatagctcagattgattgaacacattgaggcaagagcactcctgcatgagataccagcattttcacaaatacttgatatgtacagttcttgtatttagtcattgtgtcaacccatcatccccaagcacagtcttctttccttttacatatgtctatgtacgggnnnnnnnnnnnnnnnnnnnttgcagcttacgattacactcccaaaatgtgggtaatccgtgtcttacaaaaaacatttctgaacacagcacaagtacaaggatcagaccatagcataagtgacaagtaaggagtgcattgtggacacgtatgatatgaagcgggaggggcgactgagacattgactgctccttcaatagcgctgtccacaagtcaattaaccatgctaaagtaaaacagggcaaaatagaatcagatgccaaacgtcatacatacaagacacttaagaaaaacaaaagctgagcaatcacgagacaatactagccagaccacaagaagacaacgccaaccacatcagacacaaacaacaggaatcccaacatacccacagaaacagagaccaaaaaccacaataagacgagaacgtgagcgacaaacaggaaaccaaacaaaggtaatacaaggacagacatgacgcgaccaatacagagcaatagacaaacaagagcaaacaaaggaaaaaatacgaaaacaa

SEQ ID NO: 415643 - DNA, 753 bp, Homo Sapiens
gctgcgcatcccggcgttcgctgtgtgctgccgctttctcctccatctcttttcctccggctccggcggtgcgcatggcgacgcctgtgactggacacgcgagaagcggaagcgagctcagcgtgcgcgtgctgtgcggggctagtgcgacgtggcctgagtgtgcggaagagcttcaaccggcacttgcacttacacagctggtcaaggaccgaaactgtggccacgccccggcgactacttactacgcgctggcgcacacggttgcgccgaacacctcgatgggccgcatgaaattccagcacgcatgcaagcactactacagagcgcgaccaccaagacgcatatattatcataaccctggaatcctacatgggtcgacacgactgcagaaaccccgatggatgaacctgggccttcagaattgccagtgcgaattgaaagaccatactatatcgagatggaggtaagaactttggaatggaaacttacgaagagatgaatagaaagacaagactgatagagccatatgggagaaatgggaagagacataggaacacggcaagaaagaaaagaatgaaatcacatatgaacatcaaaagggggctaaaccacgatggtgaagcccatgggaaagtcaaaaacggagaatacgtggcaagtaaatggaagtaatgcaaaatatcggaaagaaataaatataaaaccatgaaagaaagtggataagaggaagttagcaagaggtcaaaagta

SEQ ID NO: 415644 - DNA, 1093 bp, Homo Sapiens
cgcgcgctcccgttgaggcgcctgcgccctggtcccgagggcgctccgttctgcgccgtggccgtgcccgtgggcctgcttcaccctgctgtcagcccaccccgctgcggcagccgcgcctcgtggcgctgtcagatgccctgctgctgtgctgttgcgtgggccgtaggtgctgctgcctgccctgcggcgctgagtgcctgatggcctgaggcccgcgcatgttcttccagctggcaactgctgctctctgcctgtgtgcggcctgagcccgcctgctgcactgctacttgctgtgccaccaattctggccagttctgccgtggcagcttgggcgactgtgcctgcctgccatgtaccttgggcgaggtgtgcactggctgacctggctgagacgcttgggagctgcagctcaagtggcgcctgggcccacgcccttctccagtgtccccagccttcctcctgatacgctcgtggtggcgtggccagctttacgtcccagacagcctcgctctgcgacttgacttcagcggaggcctggcccttgacttcccttgcgtcgggcagccctattattaagccccgaacgtgagaacacgaatgattgcttgattatgctaacaacgcggatagaacctggaagggaccgtgtgtgcaagtgaacttaggctggctcacagagagacaaaataccttgtgttgatccccaactttacattgagacaggcccgacggtcgcaaatggttcctaacgggtcaaaggccatccggggaggtcactaattgcagctaaacggacatatgttaccacgctttggagaggatacgccaaccaaagacggggcgcgggcggccttgcgatacacgatcaaggaggtacaaagggttggtggaggcgtaaggatgttatctagttgattgggatatgggaatacctttatgaggaattttatataagggtcattgcaatggattgatgaaaaatatggggtgttgcaagtgtcaccaagtattgatggaaaggtaacggagaattagagattcgtagaatgaaaggaaaataatgttcatggaaggtgcattataagccgga

SEQ ID NO: 415645 - DNA, 901 bp, Homo Sapiens
  misc_feature (482)..(551): n is a, c, g, or t
cccgactgctgagccccctggtgaaaatccccccacagtacaagggcagcctgtatcccatcaatccccaggatcacccaggccctctgcactgcacagaaactgcaggaaacgcctccccaccagcttcgcctcctcctccagtttccgcaggcctgtggctccctcacacccctcctctctctttgctgttattttaaagaaaagcagaagcgagaaatctctcaaaatgtcccaaccttgggtcaaaccacagacctttcctcctgaccccttgtgagttgagggcttttcctctggttaagccagttcccgttcctgcgcaggatccctcctgacttctcaggaagtctttgccatccctgccctttcttgtgcctaacatttcccccttccctcagctgaggctggaccagtccagtttatcacatcacccaccaaaaatgagccccacctgctgccttgttctccccttcgtgacnnnnnnnnnnnnnnnnnnnnnnnnnnnnnnnnnnnnnnnnnnnnnnnnnnnnnnnnnnnnnnnnnnnnnntggtccccatttcgtcacgtccacctcactcgtcagcccctccattgtggcttctgccccatccctctgctgaagtagctctttgtaaagtcatggatgatgaacacaaggtcactaaacccagggcgcattttcattttccttgagctggacccctgagctgtggtcagctggccgctgcctgcttttgtcataactgtgactactcctccttcggtttgcctcaggcttgcactttgaggtccttcccttctcagccatggtgtctccctgcgtggttccttctgcacccaggcatcagtgccatcctcttctgtcagagtcaagccacttccgagctccagggccca

SEQ ID NO: 415646 - DNA, 656 bp, Homo Sapiens
gtcttatagaaactaataattattacagagtaaacatccgataaatattgatataatggtgtatggtactgggaggccttggaattaacgtctgtcattatcatctgtcctggataagccaagcagagcactgaagctgtgatgtgggccctgagtccttgagtttaacttccagtctcatgttcttctaaggtgctttctgtgtatcctaactgagacaaggttagaataagtccaggcctatttttattgtactgggataaaggaagatgtatatgatttcctgagcatcttcagggaaacaatatttagggattcatatggaaactttttttggacattgctttgcaaatgacaaagtaattaaattgtagcagattttaaagcacgtaggtgattcaggcctaaactaaaaacagggtgggtgtcttaaattggtggcgtaccaaacgccactggtgtgtaggtacttgttttcctggtccaattttatgtgcaactaagatacttggatgtgtattggaatttttttagcatgcttctatacttttggcttagtcccttttttacttagttacttgctgacggggttttagggcccgtccaagtttccccgaaaaaatcaagcaccaagtggggggaaccaaaaccccaca

SEQ ID NO: 415647 - DNA, 777 bp, Homo Sapiens
  misc_feature (542)..(542): n is a, c, g, or t
  misc_feature (552)..(552): n is a, c, g, or t
  misc_feature (576)..(576): n is a, c, g, or t
  misc_feature (678)..(678): n is a, c, g, or t
  misc_feature (731)..(731): n is a, c, g, or t
ccaggctgtacgctcggaagtacggatcgccgcagcggctcgctccccgcgtgtggacgccagggccgaagtaaaagccccgaggcgcggctgcgctcgggaaactttgcccgaggagaggacagcaaagaaaaatcacccgaagttgagagctgagcctccaagttacagctccgcagcgggcgaggggaggtgggagggagcgcacggcaacgcggaatccagcctaggtttggagggctgcgggtccggaagggcagcgcccaagtctccaggagccctgcgctggcctggaaagatggggacctggcggagaggcgtaggcggcgcgaggcctggtggccctgaggtgcgcccccaaaggcccgagcccaggggacctggtgaatacttgaagccgcccccgcccaagcggacgtgggtccttgagatgcgaacttgagaagccgcgcgaagtcccccgtgctcccttaaagggggtcgcacgagacatcgcagacgcgcccgcacggacagtacaacgaacacgacgtgaaggccangacgctcgtngtgccccccggcagggcggacgcngctctgtgggggcctgtggccaacgaagaagagcaccgggaggcgtgtccaacgctcgtcgtagagagtgcctgagggtacacaaatgctgcgtggcaagtntccctgtggaagtcacacaggtccgccgtggggacattgtgccttcacctggnctgcctcgcggggaaggggtcccccgagagaccggggtccccttgg

SEQ ID NO: 415648 - DNA, 850 bp, Homo Sapiens
  misc_feature (24)..(24): n is a, c, g, or t
caggctggtactggcggggagtanggatggaaggaagaaaggaggaagaggcaggcacaagacaaaatgaatctctccgcttgtgcacatggagccttagctctgattccagttgagcaaaattatgaagaagatgattccccatatggatgacagataaacaccctgtggcgagtcactcactcccgaaaggccctctgaaggatcgcgcatgtcctgactgcacagcctgctcctccacggtcctttcaaagtcactgcctttggatgtaagtttctcagagagaatgagccttgtgtccaatgcctggaaagcaacagcatttggccaccaagttcctcttcatcctcatcaagcagcttttcctgttttgtttttagctccaaccttaggacaatggacaagtcaatcagtccagattaccctgcaccagggaagagaggcacctgacagctatacccttcaccaagtccacggggacaaaggcacaagagtaatagaagctgcagggagaatgcaattctcatcaacccttggggttgccgcattgtttttgctctgttttccagaaagtctttaacggaggagaaagggtgtggtggaagggagggccttgcctattagcagatatttcaatgcagtcatcaccctcccgccattcaatgtcagggatcagcccttgcaaaggagcagtcattggacaatgggcacaatcagggctctgggttttctgtcctgcttgcacattcgacccgccttcctctgctgaaaaggctgctttccacctaggcatgcctatgtatggaaaaaactgcctaactctgggttgccttcgtttgtacccaccca

SEQ ID NO: 415649 - DNA, 933 bp, Homo Sapiens
  misc_feature (103)..(111): n is a, c, g, or t
  misc_feature (271)..(271): n is a, c, g, or t
ggctggtactggtcctgggaggtttgggatctcagaatgtggcaaaggcgacgcctgctgtggcaggcgcttttggaaaagtaacactgcgtctatcctttannnnnnnnnatgccatgatgtgtgttacaatagaaaagtggtcacttccacaaaagtgcccttataaaggtgaccaccgaaatgggctaaggtgcattatggtattcatccataaatcagcaattttctttcacagaacagtgcacttcgagacatttaaacaggtcanaaaagtgcacccgtgtataggcatgggggcgaactacacacgatttatcagcttaagagggtctcaaagcattattaactcggcatcacgttgatgccttgcaaagctgtgttatacaagcaacccgtggcgttacaaatacagtgggtatacgagcgcctttcttgccaccaacacaaaaaccaacaggtagaggggaccacatatcacacgcgaacgcggatcaagacacgctcaagaataccagacaacgaaacatcaccgttgcgggaatatcacacagttggcccccaaagcgagcacccaagagacaaacatacaatgagggacaaaagcatcacatcaacatccacgcacagagagacagacaagacgagcagcgggcgtgaagggaagaaaaacacaaccgacaagagaccacacaaagaaggggcacaccacgggaaaacaagatagacacggagacaccagaagaagaaacaacacaaagagggaaaccccaccagtagtgccaccaccagacaagcgacagacaccatcaccccaaggatcacaccagtacaaacaaaagaccacaaccagcacccgaacaacaaatggagcagacgacacaccgaacggaaacaacacagcgaaagagaacagaggagagaagaaccaac

SEQ ID NO: 415650 - DNA, 758 bp, Homo Sapiens
gtgacatgatacgagcctggggagttacagcagtggtcaggggcttcctaggagtactgagaacagaagtgtgcacgagacgactagttacgacacgcagcgaaactagagaaaccattgtgtgtgagatctcatacctagagttgtttattttagaaagcctcacaaagaagcctctagtaagatactgtagataattcccaacttaaatatgctgtcttgaaacaatcctcttatatcaatttatacattgtgctttccctttgaagtctaaggtggataggggcataaactttggtgatgattaatagtaagttcagatcctgaaacattctgtctctgtcacgcatcattcttacctgtacaaaaaaaggttactaactacactcacattctcatggatataaaggaagattcagagggataatgcatacaaagattgttgacacaatgcactggatccgacatcagatagagacatcgagcaaatgtaaacataatattaacggctcctgaataggacctataacaggattacccaaccatatatttaagaaaatgattaattaaaaatgctatactacttattagggtgactggacattctgcaacgatgacagtaaaacacaagacatactgcctttggaaggaatgcacacagatagaagatgaggatatgcacaatacctcatgtagcacaacatccaccagtaataatagaacactgggaaaatgctaaagctgggcaacagacagtg

SEQ ID NO: 415651 - DNA, 1022 bp, Homo Sapiens
gggatggctgggaaagttgaggccgcgctgccgccgggtctccggccttgtagggctcgggctcgcggcggctgcgtgtggcctgcaaaaagaggcggcgggggcggggggagaggagggcctgggcccgcgctcccccagccccggaggagcaggcggtggccgcggacggagagattcgcccagacggtcagacactcctgccttcccctcctgggatcatgacccaggcgggggtctgccgcgtcgccgccggccaccgctggccgagaccgcgcagccggcggtaagaagaaaacataacccatagaccatcttctggcagaagatgatacatttggatcagaaacgggaggcattggaagccaggaatcaaaagtgacgaaactctgcaagcccttaggttcctattactgtaaccatgccagaaatgacagagaatgagacgcctacgagaaagcagcacagaaagaaaaccgggagacacacaatgcagtggaggagcgcatacgaggaagcgagaattactgctgggattaacagaataaggagagctgatccatgttctcctgcctgaagcagagcaagaatatgatcctggaccaagcctttaacatttattacagcgactttgagcaggcaacaatgatgaactcctgcttaatggacgaacacatgaacaggtttctactagaacctgtggagggtggacaccacatttagatcgagtcagccaatgctgataggaagcgtgaggacctaggcctgaccacagcagctattacaagactctatccacgcttgataaccctctacccatgactcctgaagaccttaaccctgcaagcgggggccacctggggcccagagagcgcagcgggacggaccgctactcacactcgcccacgccgcctggagacggcaaccggggccgctgggagctgcccgcgcggcgacacaccaccacacgccgccaccgccggcacggcgcgcaggccgcggcgcggcacacaccacccccg

SEQ ID NO: 415652 - DNA, 771 bp, Homo Sapiens
cccgagtaccgggatcccagtggaagaacacagttcactaccaggtaccaggtggttattaagaaagttatacaactttatctcttcagattgacagagctccttcagataaaagccttaagttcagtcaaggtggaaggaacactaaggtctgtcacttctaaatgacagacaatttaaataacttgtgaaatcattagcctcaagagccatctacctagtaatttttcataatcacatccaatgtgtattcttaggaacacacaagcagactccagtttatctttctatctacttcaatatttgatcacaacattttgagaaatatgctcatgactaattttaaaacctctaatttttctttaatggttttatatttcccaaatacacttaaaggggtggggaggagagaaaagtctattaaatacactgaaactttttaatatcggttactggattccctaaggagttagtgtaaattcagttcagttgaatgaaacagatatttcttcatctcctactatcagtatggtattgtgctgggattacggggagaaataggaactgaataaagcaccttctctacgcttaaggattctagaatctatacaaaaagtaaggtgcataaccataactaaaagctagaatatgatgactaagaacagaaagtcacaaacattctcgtcagaatatatcaatgagatcccgtctggctggtatcaacggatgacctcatagaggagagagcacttaaacacctgcttgaaagac

SEQ ID NO: 415653 - DNA, 690 bp, Homo Sapiens
  misc_feature (346)..(360): n is a, c, g, or t
aaaggggccttgggtttaacccgccccctcccggattacgggatgaaatgagtgagcaagaatgaatgccactcgcattggcatgtgagagctagaatgcctcactgttgcaattccagtaccacgggtgtgaaacaaagatcctctgtttctttggaaaatggcaccagattttatggagaactgaagtgttccttgatttaagtattagttcagtgtctgtaagattttttggcacctaatttaaacatctgatttaactgagattcttgtagccacagttatctcaaatgggagaagaagataactaaagcttgctggatgtgtaaagaagttcacctcactnnnnnnnnnnnnnnncagtgccagaagcagctgtagccaccaatgtcctcatgagtcctgcagaacatctgccaaatgtttcacggcggggggcgggtaaaatgttaatattaagcaaagtaatctagttagatcttcattagttttacttatttaggttattactcattttatgtagctaccaagctcagagctatagacaaccttcataaataaggccttcttttcctactagtcttttttatttgcaccttaatacagacgaaagaaaagaacttgaggccaaatggtatctcagggcacagtttggaataatttagttttgaaaagaaatattaatataaa

SEQ ID NO: 415654 - DNA, 595 bp, Homo Sapiens
  misc_feature (22)..(22): n is a, c, g, or t
atgtttgacagagtaatcttcnatgttggttgatacggtggagattacttattttaagtaacataatagttacttaaagatttgtaatagtggaacgtgcgcaatccctagtattataacagtgcttattttatggactggtgtgtacatagtactgtaggaggtgctatggagatttttaaaaatagcttaagaaaatatttgtcttttaagatatttaaaataaagctagagaggaaagtatgccaatgctagcaaacacaaactgctgattataaataagtttcatttatgtgtaatggaaaaaattagagcagtgatgcttatgtaatgaggtttgtcaaggacagcttcttgaacgaaggtgaatcttcagtgtgtcttaaagcactagaactctgcgttgatgacgagaacaccgtccacccaggtgtatggcacagtctgcagagaagttacgtgccatacgtattcttcagtctgcatagaatacagctagctatactgttccgcgcactagaacatcgaaccttcagccacgtgaccgcgcacgccgccaccgacaccgacccccgaccgcctgccggcacaccaa

SEQ ID NO: 415655 - DNA, 512 bp, Homo Sapiens
ctttggagcactgtggtcacttgctggattccctttaaactgccatttggaattcatgccaagacaccactgaatgtaattgggacagcctatgaagcagagaattcagaaaaagcccatgtacctttgaaaatacatttgggaggaccaccacattaaccaaatgaaatagaaccaacagttcccaggctgtttgggttaatttctactttagctgttcacagtgtggggattggggggcagtgatttagaggctccacggagaccctaggaggtgctgcttcttggggtccagtcagtttgcccttcaacaccaagcagccccctgggaggaagccctgtgctctctgctgatggcacaagaagtcagttctctctggaggtgctttacttaaaccagtgctgtttatggtgccaggtttctgatgcaatgcctgcctccagccagcctgtcgaacaaatcgaagtgtgatgggtggctggcttggggccagagtggcgtcactgcccaa

SEQ ID NO: 415656 - DNA, 542 bp, Homo Sapiens
gaacgggggggtgggcgttcgtataggagaagtgtctcttcaagttggtggcggccagcagatcacctagctagccgacgtagattgtttctagcaccaaaaggggagcctcgcctaatgatagaaggggacgaatattattatcgacgcacgttgggacgtactagagcgcgcgtagttaagaagaacgctggagtgagcgggaaacacagagagcgtctcatcgtcgggaaggatacacctgttagaaagagagcaccgcccttacctcttactcagggagggggggtgcaacacaaacaaatttcgttcgcggaggaaacacacttcttctctcaagctggacatatattgttagcaaccctcctctggcggggagtgcacacaattatacagcgcagtatctctattgagcggtctgtcgatagcacatggggggtaggaaaccagcggcagtcaacggcgagtactaattggtggaggtcggcgtcgatcaaaaagagtttttcgccagcaaccggcaggcaataaggtgtattacg

SEQ ID NO: 415657 - DNA, 889 bp, Homo Sapiens
  misc_feature (188)..(188): n is a, c, g, or t
  misc_feature (471)..(471): n is a, c, g, or t
  misc_feature (516)..(516): n is a, c, g, or t
  misc_feature (530)..(531): n is a, c, g, or t
ggtttaataattatacatatttggcgttaggaacatatatttgggagaggaaatactgtggcaataccattagatgtccattctcttcagaaagtggataagcatagctttgatattattacctttagtagaggttcattgggccatcttgttcaacatgatctttgccagcaagaagttgttcttancttgtgggtcagttacggtgaagacaatactaaattcttgtcccttaatgcccgaaaccataatccctcaagaaatagctttccagaagcgacttgtgattattctccatggagaattgctatagcgccttgtgatgctgtttgggagacacgtaacgggctccgggcctcgggcagagaagtagcccttgagagagctctgcttactgactctgcatccctgttgttgcacgcttaggtgactttgccccatgtcaaacgtgtttccgttggcgctctcagntggccttttttctctgtgttaacctgggagcttggtgagggtggnacgactcttgaatnntcccaacctctaactcttgcccgcactagggttgcgtcttgggcccagtatcccgagatggaagtccttggtgcgccttagaaagtaagcgcgcgaaacgatagtgtgaacggatacctctagagctcctatagacagagcattggggatacgatcgctttgcaggaagttgcttagtgtgcctaggactacacgggctcgtggcgttcacgtgctccactgtggatcctgggcgttgcgaacattctagagtctcccaagtggttgcttatctccaaggtttgctgttagacctctattgggcgctatggaatgcccatttgcaccttcttcgtaggaatcttcgctattctcgcta

SEQ ID NO: 415658 - DNA, 970 bp, Homo Sapiens
  misc_feature (283)..(335): n is a, c, g, or t
ctcatgtttcccactggagcatgcacatattgttacttggaataccacttgcatttcttgcgggtcttgtaagatttttcttcagcttcagtaacaaactttaactttaaataggagccaggaaggaatattgagaatttttaaaaaatgtgtaaatgtacttagaaaggatattttcgccatgaaggtttggttggtaaaggatataatagatgccttttaagcataggaatgaaagtgtggagggccagagatagtggaaggtgtgtcgtgtttagagatnnnnnnnnnnnnnnnnnnnnnnnnnnnnnnnnnnnnnnnnnnnnnnnnnnnnnaaactttaagagtctatctttccttatttataaaatgagaagatccatttttactctatagtgctgatagtaagtgaatttagtgacagatagaaaacattcaatgaatgattgctgtttcaaaattgtcatatttactaaaaaaaagtaattcttaggataaaaaagtaaattttcttatcaaatgttcttttaatgtcaggtaggcatttcagtttcatgatgttcattgtagatattactggtagctgtatttccttggttcctgtatgtcagcgtggtagacaaagacaaaaatgagaaaaccttgaatgtgggagcacacgaatttatatagatgaaattgtacagtaccatgtacttcattaatatgcacttaatgaaaagtcacttacacagttcgaatgagacgtcgaaggtatccagtatccattctcatttgcttggcagtaatttagggttaacttgcaggacaacctggagaaatctaggcttacattgtaattagggaacaactgaagtctccgccaggtaggcccagagttgggaattgcagcgacgggagaactcgattcacaggggaagcgcccggcatcccggggttaaacccaatctccctggcctgagggcacgag

SEQ ID NO: 415659 - DNA, 784 bp, Homo Sapiens
  misc_feature (258)..(272): n is a, c, g, or t
gtgcaggctccgactccggggctggcgccggggtccgggccgaggggaacccgcgagcggacttgtgggggagaatgaggatgaaaacgtggagcttccattgtctagggtttgaccggccgacagggatttcgacgggggaccggggatctggggagggggtcgcactttctcgcctctttcgcggcttcccggcttctgcttgcttccctgaccgttcccaggtgcgcggcggcgacgtgtctgctccaggcggcnnnnnnnnnnnnnnntggaggaagttcagccccaagccgcccgcctttctccagctgattcctgcgggaaccggggcggcgggaccctgcctctctccagaaggccccgggaacgctggcgcggggccctgaacccacgatcgtttgagcgcctgctgtgcgcctccgccgcgagtcgcagggcccgagataaacaatgggtctgaaaaaggagggagtttcaccatcctctctgcatcatcctcctggctgtccctcgggacagatggtggcaccgccagggtctggggacagatttggattctggtcccatatcatgccacccacaggcttcatgacttggtatttgctctctaggagcttttgctcccatctgcgagtaggactgataagaatcccgagaccccaagagtagcaggagggtccccacgagtaaaatctcaggcgtgaagcctggcgcttcgtaaactgctcaactcgtgtagacgtcaaagatggaaagtataggggcagtctcactctgtttg

SEQ ID NO: 415660 - DNA, 710 bp, Homo Sapiens
aaaactcctgcagctagctcggtgtttgcccaaacagccacccagctttgagcttgaaaggcaggccctggtggtgtaggcacccgagggaatctcctggtctgcgggttgtgaatgaccgtgggaagaagcatagtatctgggccgagagtgcaccgttcctcgacggcgacgagtatctcatggcttcccgttgtgctaggggagggagttccctggcttcccttggcttccctgggctaggggagggagttccctaacgctttgtgcttcccaggtgaggcaacaccccacccttcttctgctccccatccatgggctgtacccactgtctaaccagtcccaatgaggtgagctgggtacctcagttggaaatgcagaaatcgcttgccttctgcgttgatctcgctgggagctgcagaccggagttgttcctatttggccatcttgccagccagccgagagatcacttgttactgctgataggcaatttactgcagcagaggaactgttcacacagagatgattagtgtcacatggtatcgtgagtagatacttgcaacagcgagctcagtcgcaatagcaacaggaggtgaccacaaagcttattacagtactagagttaagtttcatgcagttatgatttaactactgtgtcttggcattggtagcattctttcaactgcaaatggtactaggtaccgtctata

SEQ ID NO: 415661 - DNA, 574 bp, Homo Sapiens
  misc_feature (60)..(134): n is a, c, g, or t
taacttcctcatcaacctatgggctccctgaggtcagaaaactgcatgttatttgtcttnnnnnnnnnnnnnnnnnnnnnnnnnnnnnnnnnnnnnnnnnnnnnnnnnnnnnnnnnnnnnnnnnnnnnnnnnnnagaaaattgagtctctccaaagtggtagatgagtttactactttaacactctggataggaatttaggaaatgctaatgtgatcagcatgcctatgtcaatggtcaacgaagggaacgacttgcactaaagagtcctggtagtatagttctcatataaacctatttcaaagaaacccacagacagacacatttatctgtgatggtagaagtcagagagaagagttagaaaaggcccccagggctgctgacagggcaaatacagtctcacatgcactacaaagacccgactctgacacctttctccagctttctcctgtgtgcattcagctcacatgaccagtgcagccaggctgcaccagagggaagatgaaggccattgtatctattgtcctttcatccacccctttttctaaattctatgggattaccctgaaaaggac

SEQ ID NO: 415662 - DNA, 716 bp, Homo Sapiens
gtcgtggatgaggcagttttgagtccctggctaatcagtgcacggatccacaacttcctttggctccctaatgagaactctgtgtgatcaggacacctgagattctaaccccacaacagcgccttccccgtctctccgccacacccctgctgctggtcattcaatccaaacacacgggtgcttgtgccgctgcccaaatgaggaattggggggcaggtgggagactttggagcatattccagggagtcttcatcactgtcatcattgttatcaccgtgtacctgttaatggaaataatggtcacttaaaatacttaatctgcatatcttggtttgttcctccatcatgtggttagattttcactaagttctgtgcagtttacatctgggatgatctgatgagaaccgaaggagcacatcacagcaggaatacacagcatacttgtcgtgagttcccttgaagaggacacttgaggaaaaagcagttatgctctagggcaactgaaaccacggtgacaaagagggcatgactggcagcgatacgccaccatgtaaagaatgtgaggtttcaaaggttatactctccctttctgcaagtggaaaatcctatcaattaagagccacagcacagatggtccagcttgcaggggccaattttcaattgagctccttctcacgtgagcacctctgtgtcatgctgcacgatgagcagtatca

SEQ ID NO: 415663 - DNA, 491 bp, Homo Sapiens
ccagctgtaccggcgcgcggatgtacggatgcacgctactttgttggcccctggggaggtggtgcagccaggcgtgtaaggaggactcgcgccatcagcggggtctgagacatggtgtgcccagtgggcagagaataggcctgtggtttttaagaacctcactgatatcgaatgtgtcttggagtgagaaagtttctaatggaaaaggagcaagagagagtaatgaaataatttgctaagtgcctactatgttccaggcattttacatccacagtctctttcaatcaacacgtccatgcggaggagagcttcttgtcgcccattataaaggctggggagagaccgggaagagcgagaagctacacgctgggctgcagattgggccctagcgggcttggagcgtggatatgctggctggcccccctccccgggagtcacagctctcgccggtctcgccactcaggctctgccagggtacccaggaggcttgc

SEQ ID NO: 415664 - DNA, 622 bp, Homo Sapiens
cggaggccatgccgtcggccggcagcagcctctggctctctgagctcttgaaagccttcatcttaggaagggaaaccgagggcaggtaacgacagggcagccaccataggccaggatggacagggcttgtctggtagggcaagcagaaacgggccccggggtactgcaccagggtgtacccgacacctgagcagacatctgggtgcctcagtctgagcgctcctgcgtgggctgtaggcaaagctcccccagcctggccccttaaagtgtggtaccgacatgtcagcacgcagcagctccgcctggagccaagctccaagcccctctccattcctgccccggaccctgaactcagtggagcccactgcagaggctcgttgggggtctattctgggccccatcatatctcccatgtggcacttgggggagccacaggcctattcgcccggatggactcatccgccgtaacgcgccaagcaccatatcaccaaaggcccaatggaccaacaccactcaccaacaacaatgggactagcgatacataggtcccaagatcgaagcaccaaagcatcccaaacggcactgatcgtggcgaaaacggagcgcataaggacagacagag

SEQ ID NO: 415665 - DNA, 614 bp, Homo Sapiens
cgcagtctctgtgctgttgaagcctggagacctgcggcggcctcagctgaggaccctccgccccggagccgcctggcctggagcctgcagcctctgcctgcagctgccccaggcactgtcccctcccacctccgcttccgcctggatcgctcgtgcatctgggtatgtgcctgtcaattgtgtactccacatctgtgacacacgcgacaatcgtgagtcggcatgatatgcttgcgagtgggtcaaagagtccctgcacctcagactataccaagatagaacagcttagtccacgggcgcaggccatactgccagtgcagtggacagtgcttcgtacccacgtgctgctgtgcacgtagaggagaaaatgtgatccggtttcgcgaagtggcccaaagagcgtatggacgcgattgcaagattaacacaatcgcatgcgaagtatccgcgacggataggcatgcgaaggtcgaatgacggtaagcgaaggggaagaggaattgcgcgttggtagagacgcagaagttagggattacggtgacggcactcagtgacgggcgtgcgccccgtggaagggaagcagggctagtgagcgcgcatggggcgaaagtaac

SEQ ID NO: 415666 - DNA, 812 bp, Homo Sapiens
ctctgaagacttactatttgatgtgctttttaatcgataccgattcacaagtttaggttatagaaaacaatactacttcgatgctttggagctgggaaatctggggcgcgtctttaagcatgactcttatatatcagtatattgaaaatagccataagagaagtagtaatattcagacaataatcactggacgaccaagaaatggattgatacgtgagctgtacttcacatgtatgaactagttgtagtggcgaggcttcttacctcaaggtacgatgcatgctcgggtaaggcgagtcaccctgagagtcagagcaggcgatacggacagtaacgcagatatctgtgaccactactaaggtctaactggtggatagtagtgtgtgcctcatagcgagagagtgacatgaatgcgacgttacaagaaggtcaaccatcaaacatctcaactgccaaccaatcctaggcagacatttcgcgagggactttccttatcgagagtctgtacagacgttacatgggatatttagcacatactagcatgcaatgaactggctatagtaaccaaggattgcttatttccatatttgcgactgtgaccctgctaagatgaactcaaaaggccgttgcagtgaccctgacacccaggtgcctaagtagtaactaggtggacatgcatgggactatgaggtgtaatagcagtaaagtaaccatattaatgcactggacttttgggatggtgtcgtccaaaaattcattggagcttgtaaaaacttagacgtgtgaagagtgtgtggagtgtgagattgtat

SEQ ID NO: 415667 - DNA, 170 bp, Homo Sapiens
gtccctgtgtgccccatcctggtctgcctcactggacagcctctccgcggcttcctcctccctgctccagaattctacttggtgccccccaaccccactcgactcattgtccacctggcctctgaggccaggcaccctcattcccctctaaccaacacaaggcaggaaac

SEQ ID NO: 415668 - DNA, 614 bp, Homo Sapiens
  misc_feature (50)..(177): n is a, c, g, or t
  misc_feature (253)..(332): n is a, c, g, or t
gttcaacatcatcagtaagaagaactatcaatgccataactctgatggannnnnnnnnnnnnnnnnnnnnnnnnnnnnnnnnnnnnnnnnnnnnnnnnnnnnnnnnnnnnnnnnnnnnnnnnnnnnnnnnnnnnnnnnnnnnnnnnnnnnnnnnnnnnnnnnnnnnnnnnnnnnnnnggttcaagatgtcacggttatgaaagataagcgaacccattgacgaactgtcattgcagtcctacaaaatggcgannnnnnnnnnnnnnnnnnnnnnnnnnnnnnnnnnnnnnnnnnnnnnnnnnnnnnnnnnnnnnnnnnnnnnnnnnnnnnnngtcggctgaacactccgaataacggtcctttcacgctctaacccgaactaacgtcccatcacaaacctcacgtcccagcatgagtgtgtatgcgtcatcattcgcaaaagcaatcaacaatcgcacaactcactacttgcaacacccactaacgttgtgggcgtggtagtacgtcccaccaccaagactgcagaactcggagacgtcgcggcacaatcgcccgtcggccagcaacgcgcgagcagcgccacacaacgaaaccatccgaacgacacaaggacg

SEQ ID NO: 415669 - DNA, 752 bp, Homo Sapiens
  misc_feature (167)..(190): n is a, c, g, or t
  misc_feature (362)..(370): n is a, c, g, or t
  misc_feature (424)..(480): n is a, c, g, or t
ccaaaaccaccaacctctcatcttctaagtgactccatcaccaccggccaccgggacctgcggcctcattgctccagcccgccccactcgaccgtcagactcgctcatcgaactctttttgattaaccctttctgtgttcatcccacggaaaactgtgtgtccggcnnnnnnnnnnnnnnnnnnnnnnnncagttgctacctttcctccatctcctcccaccagcccatgcctccacagacggcgccccgggcatgcatgaatcgaaaacgaaccatcacctgccccacagcgcaccccgccgcacaggcacacgccgaagctaggccacacccagcccctcgtccacgtccacaactccannnnnnnnngcgatcgccacggcgccaacccacggataccccacttacccacactatcatgannnnnnnnnnnnnnnnnnnnnnnnnnnnnnnnnnnnnnnnnnnnnnnnnnnnnnnnnacaccagcccaccacaacccagcagacaacccccccacttaaccaccatcacacaactaatccccctcatttcttcaacataacgatacacctccccatcctcagccagcataacatacatacaaacaaaactaaccaccccctatacacaaccacacactacctccactcacccctccaccttactatctcaccctacccaacctacatctacccctccccacacataaccacttccatccctctaccatcccactaccctccctacccca

SEQ ID NO: 415670 - DNA, 855 bp, Homo Sapiens
tttttctggaccattggaattcccccaaaaccaaacatttaggttataagagtgttcgtatcctgtggtgtggaaaggctctgaaacaagggtcctcgatttctggggtctcaaccggaacttgcgtctagatggattctcgacacattatatgaagtgtacattctaggggcatattggacgctggtaaaatctagaaggcttaaagtaccggggaattattgttattccagcccaatcttaacaatattgtttgggtctctggaacccaaaggcatgccttatcaacagaattacacccgtggtgggattttattacgccctataggaaagcgagctaatacagtctttaacaacagcaccaacataatatacaggttttcacatgacgcgcagctgttgggacacaaccgctggtggatcacccttctaataccaacgtcgcgtggagtcatcagggaacgttgtttcaaacacataagtctgatcagcacatcactggtgtgcaaacaaaacactagcgtccgtgtaacaattctccctctccagagagtgcgccttaaatatacccgcggcgacggttatatattggggcgcaataaacgactcaagggagcatatgtgggaatttaccccaatacgggagaatattatttaacgcgccagacggaagagacatattgtctaaaaggcggcgactataatatctgtacaagtactcacaaagacgaacacttgtaatatttgtcgccacgagaatttgttttgacaaataagaggaaggataaattttagttcccaacttaagagacaggaccaacaaacaagcggcggtagaataaacaaaatagccac

SEQ ID NO: 415671 - DNA, 871 bp, Homo Sapiens
attgtctctccagagatgctcacatggtggcataggtcccccctacactcaaatgcagataatctgcattctctgctgaaactactgtccatgggaagtgtcttggtaaaaggaataggatagtggaaaaagttggtagccaaagaaggacggaagtagagagcaaagaggcagcagtaaccgggctggggactgcctccccaagagttataacagtgctggagaatgagcacaactgtcaaaggataacacaggttgttctcatacttcctactctcactcactttgtagaggaatcattcatataactacagggcattcagcaagaaggaaacccatatgagatcctaatagtacaaaggccagcaaatgcttgcataggttctgcccactcccagctgaaagacagtcataattaatcaagtggctcttttctactaagcgcaactgtgatctcagagcctttcctgtccagtgctccaggcaacctctaagaatcaactggcattggtatgtgggacggctcctatttaccagtcctggctgacactgtagaaagaattaaaacatatgtaagtagccaaaatgcaaggcaggtagcactaaatagtttcataaaataggtacatataaagtttcctaactttccaaaagaaaagagaagatttccttacttaagatgatcagaggagacttccaagtggagatggtatttgaccatgagcagaattttgaaatcaggaaaggggctagtcatcaaggtgatttgtgtgtaaaaaagcttggctttacagatatttattgtagaaagcaaggtgtaaaaactatttaagctgatacttcctgcctcttatttgtttcatgtggaata

SEQ ID NO: 415672 - DNA, 345 bp, Homo Sapiens
agaatgaccgacccggagggggaccaccctccagcattgagtccacgtactgagacttcgtagagaacaacagcaggggacactacccaaagggggagagagacgggaggacaaaataagcacaggaggggacagcaggacccatagtgaggaagagcataacaaaaaccagaagcccgtggacaacatgagagagtgaagtaaaatccacaagggcgacagcgagggcgtgtacgcacacaaatctgtgagacagggagaaaatagccaaggtacattaggcgagaaggcggggaagagtccacaaatgggcatgggcgaggacgagaaagacagagggagcaa

SEQ ID NO: 415673 - DNA, 1125 bp, Homo Sapiens
  misc_feature (226)..(234): n is a, c, g, or t
caaagaggggggggcgccacaaaaatattccccgcggagggggcaccgaatttacagcgcaccacccaagttttgtggacaaagagggggccccctagaaggagagaccgctattaaatacgcgagagacgagaggcgacgaggtaaaaaacacgcgcgagagacgggagaaacagctgagcagcacggggagaaccgttgggagaagcgaacccccaacaacgcnnnnnnnnncgaacacatagagtgggaacaacagccacccccacgagaagagatatataagagacgcgcgaagaaggaaaaaaaacaaactacttgagagggagataacaggtgggggtacaacacaccacggccgcgaataagctgtggagcgtacagagcgataaaaaaaacttttcggctcacaacggggagatttatacattatcacttaaagcaacactttttttatccacagcggggaggcctcttgtatatagtaaattacgcagagtagaaataacagcagagaactcactaagccaaccaccagatcacagaagagatcggactagagatgggttcgagtagggtggggaggtaagatagatggaagacgttagtaaacgtactcagctaaagtcgaagtgtcagataggacgtggagtagcgtagtagaagaagactgcaggacgagaacgaataaaacggagagtgcgtgagactgagctacctgctataggaggaaaaggagatgaacactctagtgaaggaagaacgaatcagtagaaggtgggacgggagcaagagaatatagaaagaatgtagaaaaaaggaaaaaagacgaaatgctgaaagatgaaggatagaggagaggagacatgagaagaagatggaagatagatacaatggataaaaccacacgaactaccagacatcactataagcaaagaagtatgactgataatataatatagcacaaccacatcatcctcactctatcgtttatcctatgttctatactttataacatacgatttaactcactccataaaaaacaggattatttattctaaatatagataccatctcataataatgcttgtgacattagacaacttctactcttcgttacaacca

SEQ ID NO: 415674 - DNA, 964 bp, Homo Sapiens
  misc_feature (66)..(89): n is a, c, g, or t
  misc_feature (175)..(197): n is a, c, g, or t
ggcatggaagttgaggaccacagaagaggaattattctttcctctgcacttatgcagtattctacnnnnnnnnnnnnnnnnnnnnnnnnggaaatggattctcctctctttgtggcccagggttgagatggtaccagtgcgactgggccggggtgacaaaccaaaactctgtctnnnnnnnnnnnnnnnnnnnnnnncttttggaaatggattggcaatatgtctgctacttgggctggggcgggacagtttatctaataagcagaggccagctcctgggttgtgctagggtaataagccccttcttaacgaaggctaagctcccctcataaaaacgtggtgggtgttcctctttttattatttttgtggtaatgggtatctggatggggattctcgggttgtgtttggattctggtattctataaattcagcttctccaagtgtgcttttaataaggggggccaaggggtttaaccttttggcaccatattcccctgtgctgcgcgtataacggcgcccagcgtgaaattttcttcgcatacgagttgagacaaggggctacactgtgggcatgtgcgcttctgtgggcccccctttggtccctccactcctcgtcgtccctttccataaaccttcatcatatttaacccctatatatatcctctcccctcccctcctttttccgccctcttcttttttatttcccgcccccgacattatttgccggctcctgtgggagtgcgcccctcgactctactatctggacgccgcgtgccacgtgtccccccgcaagaacttgcgcgcacctctcgggctctgcgacgcgggggcacttctcccaagggccatctcaaaacaagtattgtggcgccccctaagaacctctcagcccggggcaacccccccggtgggcgtttgcccccgcgcacaccacctctgttgtggtgaatatctccccccctt

SEQ ID NO: 415675 - DNA, 900 bp, Homo Sapiens
caaggaagaggtcaaatcaggcaaagacccgaggatcaggcagcactagatagggaccagtgtgtggggtgcaagaagaaaggacactggaagaatgaatgtccagagggtgatgagggagaggtggaagtaggggcctaaggggccataactttaagcctgccaccatcctgaatatatggtgttaactcttgatgtcccacaggtggaagaatggaggctgtatgcagaagggttgtcaaagctggggctagatgagctgtatgggtgcctagtaaaattcgtagagtgtgggctgaagataatgcccctaccctcgctgtgaaccagatacaaaagatagtagaactaaaatcaggagaaacactggttcggtttcgttattacccacttccctgagaagcaatacatggcattcaagggcatttgaagtggcaattagaacacaggatcttggcccgatgacagtcactgtagaacactctccttttgccagtgcagaaactggggactaatgaatatagactggtgcaggacctacctgttgcaaaccaagcccctgaggattcaggaagtggaagctacacatagcttacttggctgcatagctaaggaaaagtggagcacatgaactggacactccagcagctattaaagacactatagccaagaaacacatctaagatgggatcagatgcatgaccatggtcctcctctgaatcaggtgcacttgcaacaaaacatgggtattcgaccgctaagagaacatggtacgggacgggcactcccaatcatagggtcaaattaacgggtgatctctgtgagctacgaacaatggccgtaaaaaggcaaatggaggacataggacaggcacgcagacagtcaagctgcgaaggaaaa

SEQ ID NO: 415676 - DNA, 1081 bp, Homo Sapiens
  misc_feature (227)..(573): n is a, c, g, or t
cctccctctgggagcccccactgagtgcctctgaggacctcattccttggaccctggtgtctagggcaccccaagccccagcagagctcctggtactcctacaggctccttgcgccaacctccacatagcttcctttctcaggggctgcctgacaaagtatgtacttaactcttctgtttattccttgccctccttccgtccataacctctttagaatgtcagctcnnnnnnnnnnnnnnnnnnnnnnnnnnnnnnnnnnnnnnnnnnnnnnnnnnnnnnnnnnnnnnnnnnnnnnnnnnnnnnnnnnnnnnnnnnnnnnnnnnnnnnnnnnnnnnnnnnnnnnnnnnnnnnnnnnnnnnnnnnnnnnnnnnnnnnnnnnnnnnnnnnnnnnnnnnnnnnnnnnnnnnnnnnnnnnnnnnnnnnnnnnnnnnnnnnnnnnnnnnnnnnnnnnnnnnnnnnnnnnnnnnnnnnnnnnnnnnnnnnnnnnnnnnnnnnnnnnnnnnnnnnnnnnnnnnnnnnnnnnnnnnnnnnnnnnnnnnnnnnnnnnnnnnnnnnnnnnnnnnnnnnnnnnngacaagcaagaaacacgataaaacgacgaccaacccacacagcacctagacatacgccgccgaagagaacgacagccaacacatgcacacaccaacacagggcgcgccgacagcccaaaaactgtccaccgcgcgcggggaccacacgactcacacacaccacaccttctctcggcgaggggaggccccaccccacacgtgcgcgaggacgtctcccaaccacaccacgggccggcgtgtctgcccgccacgcagcgcgccggtccgcgcctaacacaagccgggggccagacttaccaccgacaaccaaccatttaatacctctccgtccgtctattctacactcatcacgcactcaccccccctacagcacaacacatcacccatcactagacaaaaatacaacctcccctcccgcctatcgtcctcaaaagaacaacacgcacacatattacccacccactcatcatccccccaaccatccactcacactttcaccctaactaac

SEQ ID NO: 415677 - DNA, 848 bp, Homo Sapiens
ggtggggggtgcctcttaaagatttcttattcgaaattgaagtctgagaatgacaaaagtgtgcccccacaagtgagctagagggaataaaaacctgggaacccgggactcaggtgaatgggggcccacgagctcaaaatataccacctgatggaggctggtgcaggtgggatactcacactgcctaggcaaccacccactccagatctttgctcaggctctttcctctgctggggacaccccctcctctgcctggcttattctgacttttccttgtgtctcagcttctacacaacactcccggacaccttcctcaaacatgctgcattgcttcaaatcctttcctgaccagttacgctccgcacatgaattgcctggcaacccataaccagatcatagactctttcaaggaggaatctgtgccttgtcccggtgctcagcccacccagtgcctggtagaccgtaggtgctcttaaatctttgtggaatcaatacatggattcagagtcatagataaactcttttcttccctggacagagctgactcccttagcaccaattttagggagcccataaaaaatgtacagtcgtgtgatgaggctaacatggaaaagagaatatagcttggcaagcaaggaaacctcattagaataattaaagggactattaacccaaaccaacctagacataacttaaaatgtgttatgaactactgtggaacatttatttgatggctcaaacatttacgttagtacctcaatatgggtctacacctcaatttaagcgtctcatttatgtgcatgtgtgtttcaatcctaatggaatctgaaaggatggttcgaaatgac

SEQ ID NO: 415678 - DNA, 504 bp, Homo Sapiens
  misc_feature (273)..(351): n is a, c, g, or t
gcttactccttagttttctgccttaatttctaagtcataggctactttcaggctaagagttttcctccagccatggttttagtctcattctgtaagtctggttttagttttattcatttaaaattaatctttaataacttttttgactcattggtgacagagtaattccctctcttcccaccacaccaccctctgtccccaagattctggaagtttgttcttccccttttgtgatcattgttacttaaaactttgagtttttcaaattagaannnnnnnnnnnnnnnnnnnnnnnnnnnnnnnnnnnnnnnnnnnnnnnnnnnnnnnnnnnnnnnnnnnnnnnnnnnnnnncgcgcggagtggactcgccgagggcaaggagcaccgagacgcatacctggcgtaacatgcgtgaaaacgcggtctctaaccaaaaaatacacaaacactacgagccgggcgagagtggcaggcgccggaggaccccggctgccgggaggctga

SEQ ID NO: 415679 - DNA, 814 bp, Homo Sapiens
aagctttctgactgctccaaaaaacgaagaaaaagattcaggagagtcagaggatgaagagagctggtgaagcagctgaccaaatggcccgaggtggtatgcagccgcggtaaagcagggcccctccgtgaggcacagccgcccgggggttccctaggggaagcaggggctgcggcagacgcctctcgggcaggtcagggtatgcaccctcccgcaggggctcccaaggcctgggcgtgcgtgaggccaggtccacgggcacaccactgtgaacactgattaaacgtggcctccacggcttccaacccccaggacaggaccaaccctctgcccccggctcaggccagagctcggcgagaccgtcgctgtttaacaagcatttgctatacgccaccttgcattatgacagcatgtgacccacacagccatcctaggaagcaggtaacagccctactccattttgcacggaaagacttgcctgaggtcacagagagcggcaggcctgggatttccatccagggatccgactgcagagcacgactctggagggtcttccttcttgctcctcccatccttccactgtccttggatcccccattttccccctgcacaatctcctaattcctatgttcaacttctcattttcaactggatctttcccaatggcattcaacacacttggtgtcccccagcttagagtagaacattcaagcagcacaggctcctgaaggccctcactcatccctttcccagcctgtctgcgaaatgctttgtcaggactcagagttaagtctcacttccgtacaattcccaa

SEQ ID NO: 415680 - DNA, 882 bp, Homo Sapiens
ggatgctttcgctttcgctctcgctttccaatactcgggactggggaaaccgggagaatagaagcaggcaaggaccgccgtgggcacggggtgtccccagcgcagccaatcggcttccgaagtaggtgagttgctgcctgaagagaaaagacaaactccagtatctttcattccattggccagacgcgccattccccaagtgagttctgttctccaaccaaagtgctggattccaagggactggaagggaaagtccctaaaaatcacgagttcaggcgtctgagacttggtgggaacggaccttcctcttagtgcccaagcctgttctaatttttaaaaactgatgtctattaagacccaatgttaactttatgaaaatggttcctaaggagattcacatctctgtgtccgaattctgtgtgcagcaaacatcatctcaagtgcgttttcccaactacgcttctttccaggataaaatactctaagtgacaaatgttgagtacattatcaggtatgttcactattgtgagaactgaagccatctacactcacatagcttgccaactacattaacctgacttcttattccattattttcatcaacatacatttactatttcaagaaacttttgccagggaccggaaagttgcaaatatctttattgcttaatccagtatcttcttcaaagatccaaccatcttcaatggaaaacatcaaagaacagtttacattctaagaccttgaacctatacctcaaaaatcctagccttgtatatctaccaatcctaaacttttacccgtagctgactcaattctaaccaattcccctcattaaatattagacttaccaaggggacttcaaatctcaatacctatagcca

SEQ ID NO: 415681 - DNA, 428 bp, Homo Sapiens
acggccacccagctggccctgcatcccccgcgcctctccgtctgcacgtcctccctccctgcgccgctctcgcgcgctgtaccggtccccacagccgcggtggcccccacccgcggccttccgcgcccctcggctggcccttccgtcgcctcagtcctccatccctcgcgctcttcgtgctagtcgctacgccaactcgctacttgcgttggtcgttcgacggtctggccctcgctcgctgctgcgccgcttgctgtgcgccgcctctggttcggctggccttgggcgtctcgctgccccgtgccgtagccacatgggcataggcctctgctgcacagcgtgcgtccgcgcgccggctccgtccatgtcgcgcgagcattctcgccccgcgccacgtgtttcgcttttcgggctcgcgcctggggcgc

SEQ ID NO: 415682 - DNA, 625 bp, Homo Sapiens
gagtattggtgtgctatagtggaaaattccgccgtaagtttaccaagaaaacttgaaatgtgagaagagtgtatcttggaagaaatatctagggtgttatttcacaggggggcgtgctaaaagtacacccaatatattttcacccctgtcacaacccgctggggggaatcacacggggaaggggtggtcatagagaccatctaccaagcgggtgttttattatctaataacatttaacaaaatctgggcgcctcttggtggtggaaacggggtttatatacggcgtgccacaaaaaacatcgtagggcggaaatactgctgtggacaaggacaaaccgcgggcggaaagaaaacaacagggggcgattgtgggcaacaaccccttttgggggggacagagggcggaatagaccaccacgagtgagaaactgcccactgagacaggagagaatatgttggacgagcacaccgctagccccgcggtgggaaaaatctccacacaagaagtgggtcctcgcttgaaaatgcgcagcgcaactcgcccgttaaaaagggggccgaccaaagaggagaacaattgtgcggtgaaaagagggcaggaggacaaaagagcagcaccaagaca

SEQ ID NO: 415683 - DNA, 720 bp, Homo Sapiens
  misc_feature (192)..(201): n is a, c, g, or t
  misc_feature (314)..(328): n is a, c, g, or t
  misc_feature (676)..(676): n is a, c, g, or t
  misc_feature (686)..(686): n is a, c, g, or t
cttgacacctactacccagaatttggaagtagaattttaaactgaggtcagccccttcactttcatagtttaagaaagttagtgccccaaaggggatcattttctgccagagatcacatggggatggagctgaatctaagacccaggttcccctgattctcactctaattccctaagctgccactgcaaagnnnnnnnnnntcaagttgggatctcattctgggggaaaaatctcataattcctcgttggagctatggaatagctttatattatataattttattcaaactgatatgagccaataaatatagannnnnnnnnnnnnnntagctgttttaaaacattttaatgtttaaaacatgatttactaatgctgctggggatgtctagaattgatttactgcatattatgagtgtttatacttgttccttacagaaattcttgccaaagagccattttatctacaggaataataaataagtcaatatgtggatggttgtgcacatttttcccatatgcagtgggacttggtagatgttactttgcacacaaacactcagaaggtaaactggagagatgcacatggatccctgaagtccaaggcttggccagtgtcaaaatcagaccattcatcttgacttaaaccaaaaacacggtcagcaagtctaggtctnaggtgatatngggcttgggaataatggatctacatgttcccata

SEQ ID NO: 415684 - DNA, 136 bp, Homo Sapiens
ctgaagcactgaggggctaatggcttctaagtagacatcttacatttttgagcatcagaatgcatgcatgtttctgggcccctcatccgtgttcttgggtggctagaggggaggcagtgggcgagaatccttgcat

SEQ ID NO: 415685 - DNA, 882 bp, Homo Sapiens
gtcttttttgaaagatagataagaaaacttcaataatggagcagaatatcatgcgccatgaatgggaacgtgttatacttgtaagacgaattcatttgaactcctgttttaaaactctcaataggacttagagctagtcaaactgattctaaaattcatgtgaaagtgtaaattcaagaatagccactacttaaaatggtacacattagatatgcccccatactatgcttaggaacttatacggacataccttagagatattgtgggtttggtttcagaccacggcaataaagcaaatatcacaataaagcaaatcacagaatttttagtttcctgatgcatatagaagttatactgtactgtagtctatagtgtgtttcaatagcattgtatctttaaaaatatacataccttaattttaaaatattgtcagaaaatgccaaagatcttctgagcccttagcaagttgtaatctttttagtggtagagggtcttgcctcaaagtcgatggctgctgactgatcagggtggtagtttctggaaggttgggtggctgtggcagtctcttagcataaggcaatggactttgccacttgattgactcttcctttcacaaaagatttccctgtagcatggcatgctgcttgatagcatttttggaccacagtagaacttctttcagagttatgagtcaatcctctcatactctgctactgccttacaaactaaattctatgggaatctccctgacatcttcgatgggtcatttccaaccagagatcacacgcatctcccacccattaaatcagatcccaatactcaaagaacaccctcctccctttactacatccatacagaagaaccgcacttttacgcctccat

SEQ ID NO: 415686 - DNA, 478 bp, Homo Sapiens
gaaacgaatgtagttctgcaacaaatgactaatgaagacaaatcatttggtggtccatctggtgagagagcaaaacaggagtatgtctgcaggtacagtgtactgtacccttaggcccatgatttgtacaaataaagaaagagaacttagagacagatagtaaacataaatacaaacctaggcagtggcagatagccgattccattaaataagtaagagagtattaacatagacgagggtggtcgaacctagtgtacagaacaggacggagttgcacaaatgctcgtaactgaacacagtgacttgctaagtttgactagagatccgctttcctctgtaagtactcactccaggaggacactaggcgacttcacactccgttgtcatagttggcgcaactgcgaagtctactgctgaatctactcgcactcgcctatatgctcctcagtgtatgactccgatggtttgcattacacgt

SEQ ID NO: 415687 - DNA, 766 bp, Homo Sapiens
  misc_feature (136)..(158): n is a, c, g, or t
  misc_feature (166)..(421): n is a, c, g, or t
ctcaataacaagaaggcgtggggaagtacgggacctttgatgaggtggaaagatcagtcactgttgggaacctgtaagaataagaacatgcagctcagtcaggaaggaaaccccagggttcaagagatagagctcnnnnnnnnnnnnnnnnnnnnnnngagacagnnnnnnnnnnnnnnnnnnnnnnnnnnnnnnnnnnnnnnnnnnnnnnnnnnnnnnnnnnnnnnnnnnnnnnnnnnnnnnnnnnnnnnnnnnnnnnnnnnnnnnnnnnnnnnnnnnnnnnnnnnnnnnnnnnnnnnnnnnnnnnnnnnnnnnnnnnnnnnnnnnnnnnnnnnnnnnnnnnnnnnnnnnnnnnnnnnnnnnnnnnnnnnnnnnnnnnnnnnnnnnnnnnnnnnnnnnnnnnnnnnnnnnnnnnnnnnnnactgtgagctaccaggcccgtgccaagagatagagctctttagcgaggagatactagtctcactagatccaaacataaatggattgaaccagagctaaaatttccacctgactctcacagaatttacttttaacagagaacattaccagtcatagtggctatcccgtgttaccattttcaccgagaagggtcctctcgggtttcatttaccatccaatgctttaagttccttttctggaagtcctggcacgattgctgttaaggctttagacaaagttttctgcaatgttgaatagcgtgttgtcccttacattttccgtgcacatacttcttgtaaagcattct

SEQ ID NO: 415688 - DNA, 761 bp, Homo Sapiens
  misc_feature (314)..(314): n is a, c, g, or t
cggggggggcccgacgataagcagttccccctcaggagggcgcccagcactgacaggctcgaccccacacttctttagtgcaaaaaagagagtgccccacaatagagaaggacccgcttattatatatcacgcgaggagagcgcgtgggccgcgcgcttgatttatacacacaacacggagtactggtcatagcgtggagagaacaccagccgtcagcacacccctcggtgggatatcatactttctgcgtcagaaacgagagagcacaccctttttattctctccagtagtggatgaatgcgcgacaacaacnaactatctgagtgtgggcagacacacacatcttcacttccttcacacgacgagaattgatttataacacaacagagcctgctcagcgacggagagggggacatcaatatactatcatgagcacacatagtcctccaccccacgtgctatactatcacgcagcagaggtgcaacacataataccaaccactgataaccccgcgctggaaatacaatgaagcgacaacgccgaccaggcgcggatgcactgtaaatcaagtaaacatgttgctagtgacgccgaccacagaactggagaggagcaggaactcatgctggtcaataaacaaatcaagatacgagaaacacacaatatgtatcattcatctatattacgcaccacaccgaagacggaggattagatgcccctaggtctgacacgatacataaatacatacaaacgcacgcc

SEQ ID NO: 415689 - DNA, 1029 bp, Homo Sapiens
cttcaggaccggtttccttggagcttgtccctccagtgcctgtgcacttgcacctcttctctggcattacttgttgcttgtcatttcacctccctgctaggttttaatctagaaggcatgggccacagtgtctttcttctctgtgcatccccagctccctacacaaagctggtgtacagcaggggccagccatctccaaattgaattctgtcagcttgggccattatgtatcaagatgggcgcttggagaggtcacagagctttccaaaaaggctggtgcgaaaattacactgaaaagggggcatttccatcttctgggtccttccctggtttttctgccaccaccaaagagcattgtactgacaggttctgcccaattttggaaggtggttcagttattcggtgactgagtcaaatgagcatcatctctcttagctgccttgctcagacacacaggaagaagcaggagaccaccggagtcctgccccagggacagcctttctcacaccatagcacggcagctggtgatcacggaggctcgctggagactgtcagcaggctagagactgtgctcggctcagcctccaggccccttggaagcctctcgggctcagcttactccaagtacccaggaccaggcctcagaacacaacagctcgatatcccaaatgcttgttgtcaggcacgcatccaactaggcgcaatgccataaacatggtactcggaacccacaactgcgcacaacggtcactgtcaatcctgccacacatgcctggcgatactcgcgcagaatgcgccttcacaaaccgtttttaaaccaccttcgcaacactcacatgaaaggacaaaactggctcagccagcgcaccgcgcaatcgctaaccaccacacagcacactccggctcatcccaactacaccaagactttatgcacatccacccctgcacactaacagaccgaatccgacccacaaccgccgcaaacgaatcccccaagcgactaccagcccaaggccccatgaggatcaa

SEQ ID NO: 415690 - DNA, 882 bp, Homo Sapiens
ttagaatctaggtttaagcaaattgaaactaacacagcgatgaatcatatcagacggcaaattatggaagaacttgcaacttgcacctatataatatatactgttttatatactgttttattttaccagttagtttctatataaaagataagtaaattataaggcattttcaaggtaactggtacatagggtcaatggatctgcaagcaatgacttaactgtggttccatgtcacagtgatggacttctcagcatggttaaatctggaaagctttctatgactccatccttcccaccaccccaaattgcggcgacacaaagggtgaaatgtatctattaataaaaacaaaatactctaaacattgtataaaagaggggacaaaggagaagccgacttaatggtctaatgaggctatcttccagagacttcttgtgtgtgaggctcactttgacctttcgctttgctcaggagcccagcgcctcatttttcacattcttgcaattacgttaacgcttcaagcatttctgactccaagtcagctagcaacaccaggcataactcaacactgtgagtttttctcctctctgtagattcattaacaggtcaccaaggtcccaactgaaatttaaaactgactggttctgttgggttagttgagttatggcaagggagatagcaagaaagggccagagagaagaggaggtgggagaacggaagaacccaggttttggcagtggggattccttgtaataacgagcaacagcataaagttaagcgtatcggatagtaagatgggtattacaggaaagagaaaattctgagactgatatatagggtaagaccaatcaacaaacttctggtcctgggggtagatgccccat

SEQ ID NO: 415691 - DNA, 280 bp, Homo Sapiens
aggacctgcactgattggtgataggcagcatgggctcaggagagcaggagagttaggggagacacccacgtgcctggaatagtggagggccatttggagcaagcctcagatggagagccacatatcgaggtgttcggtcaatccttgtgaaccagagagtgttcctacgaatgctagagtctcatagaagtaatgtctcttttacgtttttttgcctgattaatattttcttcccctcccggtgccttcaagtatgaatgacaataaataccatacatat

SEQ ID NO: 415692 - DNA, 867 bp, Homo Sapiens
ggaagggaaggggccttcactaaggaccaatgagcataagcaggagacaaatgtcacacagcacacatgaggcagaccgagggttatgaggactggcaagcgttggatgaggagtcagtggagggagaggagtaagagagggctctgagatgacaagtgcaggtaaagtgtagagatgtgtgggtatgtgttgcgtgtagctatggtaactaaagggctgggatgatcacagtatgttgggcaccatatatttggaatgaccatttgattttcagggacatcacaaccttgacagaattacctcagctgtgaggtcctagcatattccagcatgctcctgctccctttgttcccagctacagaaatacaagaactcacgggctgtacttcccatttcacaatcctctggcatctcattaacatccaccttgtattctacacagatccactcttcactctgagagagttaaataaatacattctcaccaaggtcattgcagagcttacatagaaaccatcctatatcctgaagatcctgcagtatgcagttttaggaagcttgtttttgtcttttcagggtcattatgaccaaagaatttgatgcttggtagctaattttcaaaggctacttggattctgttactgcgaccacacagagagatcaggaggatgtacttcccttgcctatcttttcatttctatgtgtatatctgggctctggagaagtggactttggacttctcttccctgctgtgctccggggcttgtgcatttgaattgaatggtataataagctcttgaaggagcgggtgtgctgggagagtttggagttcctgatgaagcgtgcacaaagaactgtagggggtg

SEQ ID NO: 415693 - DNA, 821 bp, Homo Sapiens
ctgcaaacttacaaggactagagcagatgcttgcaagtagttttgaaacctaagcttggaactggaacattatcagttctgctgcattctttaggtcaaatcaagtaagaaggccaagagggtgaagaaatagattccatctcttgagaggaggagcttcaaagtcacattgcaagggcatggacccaggtagggaaagaacttgtgacacttttgcaatttatcacaggtggtaagagtaacagggaaagctacctagatctgccttcaagagagaactatcctttgtaaagtttcaaatcaacaatatgtctactctgagctgaaattcttatactagtataactgttactgatggtttcattacactgttctaggtagcaaaagttcaggggttgtgatgctgtgatttaaaacaataatattagggttttctgagcttcttcctgaggggcacggagatctgtggtctcatttttggcatttccacacaacatggccccccaaatcccatgatttctatttctgcttcaaaagaaaaaaccaagagcaccttctgccttgaggctggaagagacatcagtctgtctgggcttgctgaagaagggagaacaaagaacagcaagaagcaactgaacatattgatgaagtacaaaatgaagtagacttaataagccaatgaggagactttgaaaacagaacagaaatataacaaactcggccaactgttttttcagatgaggtctgaattgatagccaaaatcccaaactttggggtaaccagcatttgtcaaccatccacaagatgtctgcactgcttg

SEQ ID NO: 415694 - DNA, 397 bp, Homo Sapiens
ggacatagttgacctgaattgttcccacctatggcattgatcagacatttgctgtttgattattctgtgtcaagcaccgtggagatattgaagaataatacataatctttgcttccaggagctgatgtcttataggaaaacaagaaataaattaaaaacatgattagggcttgccacttgtaaataaggggctgggaggggactaaacccaaatgaaggctttctgaagtaaaagacatcccagtgtttttccatggtgagcaggatttccagctaacgaggaaatgacttaaagaggttatttgaaaaacaagtactgggtcctagaactctagacatggaaaggacatttaaaaatatccagtcctgtaaagttaaaattgtgcaggtgctatgg

SEQ ID NO: 415695 - DNA, 483 bp, Homo Sapiens
  misc_feature (326)..(398): n is a, c, g, or t
gagagggccgcgaccacccagaagagagtaaccccctaggagagggcgccacaaatagaggcggaacaccaacgacaaacaggatacacaaaagagagggcccacataaatcagcagccaggaataaaacaacaaacaaaaccaccagagacaaccagcagcataaccacaacaaaatacccgaaaccacgcgcacaacaaaagcggagcggatgcggagacaatcgggcacagagaaccaaccccgaacacccacagacggatgcagaacaccaagctacgacacaacagcacccctaggacgacactaccaccaccgctaaagnnnnnnnnnnnnnnnnnnnnnnnnnnnnnnnnnnnnnnnnnnnnnnnnnnnnnnnnnnnnnnnnnnnnnnnnntccacacgcactagcacacaacaaaacacacaaacccctaacccatctaacctaatccacccccccacaaatacttaacatcaca

SEQ ID NO: 415696 - DNA, 725 bp, Homo Sapiens
  misc_feature (264)..(376): n is a, c, g, or t
  misc_feature (477)..(592): n is a, c, g, or t
tgactgtttgcatccttgacatctctggccttggtcccacacgcagcctgaggctgtggcgagacactaggccaggactcagaagttcttggggctggtcccagtttcacaaattttgtcagatcacaccccctgtctgggcctgatttccttgatttgcaaatgggtgcctccgtgtctgtgctgctcagctctcattttgctgtgatgctcaaagaccatgcagcttggtgcttagcacagtgacccagaggctctaggagnnnnnnnnnnnnnnnnnnnnnnnnnnnnnnnnnnnnnnnnnnnnnnnnnnnnnnnnnnnnnnnnnnnnnnnnnnnnnnnnnnnnnnnnnnnnnnnnnnnnnnnnnnnnnnnnngggatgaccttaatgcataatgatgcttttaaccccgagactggtagtatgtacttgatgaagtggcagcttttactatttgccactggaaatgaatgggnnnnnnnnnnnnnnnnnnnnnnnnnnnnnnnnnnnnnnnnnnnnnnnnnnnnnnnnnnnnnnnnnnnnnnnnnnnnnnnnnnnnnnnnnnnnnnnnnnnnnnnnnnnnnnnnnnnnagaacaacaagaaacaatgagaaaacttagccaagaaccagcaagcaataggaaagtctttcgtcaactgacacacatgtcacaacatataatcggtgctgcttctaaacccctctcacccgcccacccacca

SEQ ID NO: 415697 - DNA, 685 bp, Homo Sapiens
ctgccaggacgccgcgcctccgccagacgcgcccgggggcggggcgggtgatgtgccgctgcgcccgcgctttcctgctctcccccgctcgtctgcccgcggagggcggcccggggtacccctccccacctgatggcaccgacgtccctggccttacgcgccccaccccgactcttcctcatggcgggcacctgtgtttatcaaactagccggaccacaggtgccctgctgagtgcgcaccgggcgctgaaaccagagccgcgctctacagggtccagagtgaggcccacagagtggatggaacccctgagccacacagctggtcagagaatggcacagacacaacccaggcctccatctactcgacagacctcaccacgagcctactatgtgctgggtgtggtccccaccctctgggatctcctgcgaccacgctgagtgccgaggacaggagccctgtctacacctgtgtgtccccttctcccctccaggaccagcccagcagaggctcaggagcccagaggacaacagtccctgcagtgcgccttccatccactgggaggcacaagaccagtctgaacagcagagggagcaggaggatggggctacagggaaagggtcctggctggaggcctgtgggcaggcagggctgttctgggccctctggagaggagctggttgacag

SEQ ID NO: 415698 - DNA, 1182 bp, Homo Sapiens
  misc_feature (125)..(148): n is a, c, g, or t
  misc_feature (469)..(491): n is a, c, g, or t
  misc_feature (885)..(930): n is a, c, g, or t
atgaaaaaagaggattcatgtccttagatatagatggtaagcccactgggcaggtactgtgtctaatgtttaggtgtggcacctgtcacattgttgagagctcaataaacgttcaacgaacaacnnnnnnnnnnnnnnnnnnnnnnnngagagggggcgagcgcatacgacgacagaataccgccagcagggtgccaccagaattatagacgcgacgagacgcgcaagcgttatgctgtgtgaacgacaagggggcccacaataagagagagagcaagcgacgcattataaaagagacaaggacagcggcgccagaagatgataaaacagcgggttgtgagacagacaactggtgaaaaacaaaattgtgggtacaccctgtggagaacaacacaatattgtgcaaaaggcgacacaccatagaacatctgtgtgtgagaggtgaatcgaccatacaaaagctggtcgnnnnnnnnnnnnnnnnnnnnnnncgagacagaagtataaaaacagacctacatctataagcgcggaaacatatattagttcacacatcttctttcatatacgagatgtggtatcacataaaggccgcgtccaacaacccaccagcgcgaccgtgccaacaaacatgacgcacagtcgagccgcgcacagtcaacgaaacaaagatgcaagatgagccacaccaaccgagcggagccacagccacgacacctctaaaccaaaacgacgaaccactcactgaataaaccaccacgcggcgcggaccctcccacaagcagcacaaacacaaccacgcagccgacaccgcagccacgcacacgaccaccaaccaccaccacgaaccgccacgaacgacaacaacagagcgcacgaaaagcnnnnnnnnnnnnnnnnnnnnnnnnnnnnnnnnnnnnnnnnnnnnnncgacaacacaacgaaggacggagacgaacacaagacaccgagacagaccggaagaaaacgcacaacgaacaggagaggacaaggaatcggcaagacaaggagccacgagaaggagacacgagcagagcagcagacgacgaagaacagagagagagaaagcacaagaaaaaaggagcaagacacacaaaagaacgaccgacgcaaggcaaaggtagcgaaacaacaaaatacagaacaacagaacaccaacat

SEQ ID NO: 415699 - DNA, 777 bp, Homo Sapiens
tgtggaagattagaacgatactggatactatgatgccagtccagattcctacttcaggaccaaggtactcatattccagattgggaggaatgtagcgtactgacggccatggctgagtacctcttcaggaattatcctccacttgaggggaagtgctttgttcagagttacactccctctatagtggcagcccacacatggttgatgtggggtacaaagtcctggaccttgtcttagatgggatagttctgaagggctattccagctccagaactcctcataggattggctgaggtctcctctgcaactggatcacagttcaactttttcttctgcccagtccttcttctctcatctgttgccagttatattcgtgtgagcatacggatcaccaacgctgtgacctcgctgtgtgaacgggagctactacaggaaggaagcttacacaatgagctgcatggatcccacatttagctaaaatcaaataggacctttctccatcttagacgaatgccgtaatacacaagacctaagccagcaggatgctcatgtccaaggtataccactttatcataccacacgagttggcatgaacacaacttctggggttcaaactcttctgaacacagataccagtcttggcaaactacccaagactactcctaaacgaggacattcaatagccttcaagtcgtaacttgcgatacaatcatctcctattggctcacaagcttcatgccagcggtatctccacagagcctgggccatattaactcc

SEQ ID NO: 415700 - DNA, 685 bp, Homo Sapiens
  misc_feature (202)..(218): n is a, c, g, or t
tcattattttattagaagaaaagtggcagaagaatcacagcaatgcaaccatgacagatcctggtagaatgatctagcaatcaaattacactgcaattttattacaagtctgacatttctgtgcgatggatgtgtcttgagggtgaatactggactccctggaaagtcatcctcatttccgggatgctgggcaggtatccannnnnnnnnnnnnnnnnattaaagcaaagatatccattttcaagaagcaaagagaagggaagaaagcatacaaagggacattaactccattccagttggcttctcaccaggctctacgacagtggattgaacaaaactcaaaggggcactttactaagaaacggttctagagaaactttggggggaaaacactaggacccttaaaggtcttttttgtgcccttatagcacagccctcacagggcactgtagtgaagattcatactattacgtcaaagagaatatactgagctaacacttaagatcttcgaagtcctaaggcgcgctgctttgggaatcactcacctttcctttgtccttaattcctcagttaattaggacaagtaattcctaatgtcagctccatctccccaccccagggataagagaggcaatgtgtgtcaccacagagtcctccaaacacagcaaactgtcaaaggcaattt

SEQ ID NO: 415701 - DNA, 699 bp, Homo Sapiens
cgaggatgaaaaacaaaggccttctaagacctacaggaaactaaggacctggagcgtttcgaagaacccaatccacccccacccttaatgaattactccttgttagcgaaaaatgctgttcgccagctgctaagaacacaccgaaagggtcaaaatcacttaagtgtgcgtgcacctgcgcaactaagcggcttccgaaaggtcctccgccccggtggcgctttcccggacgacctccggcccactgaccagtgcaggcgcaacaccccatcatgtgagactaagagtcaatcgagtggtgacaaggaacgtctacacttgtggaagcctctcggaagcccaaatggctcctcaatcgaaatagagagcgagagaagtgatacactgcaaccaagcaagctagccctatatgcgtgtcacacttcgaacgaatgtatagacaatggcttgactgacattccgactccatcgagaatgcagattgattttatcacccaccgaggacagtctgaggaaatactccccttgagtcaaagtgcgaagaaagcgagtgggccagagtttatagagtgaaccttgtatccaaggttaaagaccatgaaatcatgcctcgtggcacaagccacaacgaacatagtacttgcaattgtacccggaccaaggcagtatacggggacaagaaactcttgcaccagaatc

SEQ ID NO: 415702 - DNA, 714 bp, Homo Sapiens
  misc_feature (62)..(126): n is a, c, g, or t
  misc_feature (305)..(352): n is a, c, g, or t
ctccctcctcggcctcccgagttggctgggtctacagtgcgtgtgccaagaggcctggctannnnnnnnnnnnnnnnnnnnnnnnnnnnnnnnnnnnnnnnnnnnnnnnnnnnnnnnnnnnnnnnngggctcaaattgactccctccttttattgggcattgacgccaccattgccttatgcctttaattagaacgacagatttaactcacagaggtgtccactttcaaaggggtagcctcttgaaagagtagactcctgtggtggtaaggccctccgtgagcatttgcagcctcttggtgcccnnnnnnnnnnnnnnnnnnnnnnnnnnnnnnnnnnnnnnnnnnnnnnnncgactgcgcatgtggtatagacaatgaagaacgggcagcggcagaagcaaggtacaggaagcccccgttagggcgaagaaagaatttgtgcacgtttctaggatctctacttttccctcgagggccccccctttatccatatcatgtgccacgatgtgggccaccctgtggcctcttgcccgacatatatgacccgtggctctcttgtgggttttaccaggggcaaaccgtggggctctcatacacaaaccgctgtgtgccatctctattttaaaagagtttagcacgaaacagtaggccgaagcattggtgtggcctcatacccctgtgtttagctccccagacaccttgtgggaggccaa

SEQ ID NO: 415703 - DNA, 667 bp, Homo Sapiens
ttaacaaaagattctccttaaaaatgttagataataaactgcattttatgggtctggtttaaaaaggttatttgtggggaaaggaccaacaagctgtattgtggttttctagattgtttcctcaagccttgtaacctcctagctccttacattcctagtgggaaatacttgctgcaaatgccttgggctgcactgtaagcccaagtgtgctgcaccagtgtgatgccctatactaaaacatccagaaatcatcatacatatgaggaagaagaaataaagcctcaaaccctttggaataataggatataaaattgccttttgtaactgaatcttaaaaatggaaggttaccatgacttgtcctattgcaacctggttatcagaataacttattttttttaagatagctattctcaaatactgaacatatttgcatctttaaagacactttattctattcaattataggtaaagtagcctatttctaggtggttaggcttgaaaagatagactgaaaagataggaaattttgtatgcctttttgcaaattgtatttacttctaagaccgatgctgttttagcttaacttttaaacaaagtgttcttcaaataacttgtaatatttttacacggatcttgaagcttccttcaaatagaacaggagtttag

SEQ ID NO: 415704 - DNA, 722 bp, Homo Sapiens
  misc_feature (103)..(122): n is a, c, g, or t
caaaacacagtggctttactcagaccttttaaacagctacaaaagtgaaaaagctgaggatggagtggaaaaagagaaaggatactttgttttagggacctgnnnnnnnnnnnnnnnnnnnngtatccattgatcacaggacatcagtggctgcttcagggacttgggttagtagtctccagggtttactttactctgtatctagggcaaacctgacagtctggagtagagcaagaaaaatatgtaatacagtcaactagattatttaaaaagccacctttctgttattcttatggggttgaggaaattgtttctctatatgagtataaaatttatcaccaatgttcaaggctttaaagcagagttgaaggcaacctgagaatcactcagtattctttcttcccttaagttttatatctgctactgaattattagtgatggctcactgtgcttccagtgagggcagagggtgttgggctcctcctaaacagggagaacaaagaacaacaaggatatatatttgtttcatgctgcctactggtttctgaatgtttcaggctatttaattggaccagaagaaggaatcgtcaaagttactttacaactctacaattgcttgattaacaaggaggagaaaaactattggcataaaacatacagttatttaaactaaggttcagcaattcagcaacatctatcaaaatctttattattttcatgtt

SEQ ID NO: 415705 - DNA, 145 bp, Homo Sapiens
taatttgttagacgttttcattttgtacaaagtatgaagactctcaggaggcaaagtaattccccaccgtctagtttatccctagactccttattcagctcatctgagtgttcggtttttctataatttctatcattctcaattt

SEQ ID NO: 415706 - DNA, 750 bp, Homo Sapiens
  misc_feature (635)..(683): n is a, c, g, or t
ttccatgggaattccccatcgtacgtctatgtgcgtgcgggcacgtcgaaactgcacacgtgcacacacgctgctctgggccctgttggtgtggtgtggtttaattgaggcttacattatgctgaagagtttttctaaaggcctactgtatttattttagtaatgtgctacattagagtagaaaaaataagaacgtgaagaagaaatagcaaaaggagaaaattaccacagatttacagaacaatatgttttaagagagacgttgagaaagattcacgtggccgtcctcagcgtctcaaactcctttgaagggagatttgagcttaggctgttgatgacataagatgcaaaagcaaaataatatactctctttattacccagaaaatcaagttgccagtcaaaactgagaaatgagaaagaaaatcagatttctttattcatctctgttgaagcctagaaaaccaaaacaagctggttgtggttcagcatcatggtttaggaatcaagctgtcagttgtgagtcctactgaactgtgggttttccactgtaaagctccactgtgtccattaggaatcaggctgccagttgtgagtcctactgaactgtgggttttccactgtaaagctccactgnnnnnnnnnnnnnnnnnnnnnnnnnnnnnnnnnnnnnnnnnnnnnnnnnagctaaaatgtaatagagtttaaaattgggttccttggttgcactggccatagttcaggcactccaa

SEQ ID NO: 415707 - DNA, 756 bp, Homo Sapiens
  misc_feature (254)..(300): n is a, c, g, or t
ggctcacttggggtctgggacttaatgagtgcttttcacttaagtgccaactgaaggagtgaggctgggagagtagaaatagcttgctcaaggtgacacaggtcaaagttatcaaacctgtcatcctcactccaaagccagtgatcatcttgagggccctcagcatttcagagctgagttcctgctccctcttgacctcagacttgtcaggggaacatttgtcctgccaaactcatttcttttccatttttgannnnnnnnnnnnnnnnnnnnnnnnnnnnnnnnnnnnnnnnnnnnnnnatgcgttgtgtatgcacaggggggctgttgaggtcacagatagtatcacagagttgtattgtgggattgccccccaacccaatgtacgtaccagagcttctaagagaagcaggggctcctcgtgatcgtgggtgctcaccacgaggcgccacctcgtggtctctcagtggccttcgtgtgcgtcgctcccaaccagggtgcaccccaagatagtgggtcgtcatcctcaatatttcgtgtaggaacgacgccactacccttctatgatggcagtgccatagggcgctgctctacccctcactgctctcttcccaagcaccgtggagccttgggatcatattacttccagggacgcggatctccatacgagacgcctgatctacagtctcccgtgctcctcctcgtgcccttttctccctctttcttttcccctccacacaatagagcaaaaaagga

SEQ ID NO: 415708 - DNA, 264 bp, Homo Sapiens
gttaaggaggaggatggcgccgttcctgcagatgtgcggggacgcgcgcccgccgcaacggtgaggctcataggccacacgcaactctgagcattggccaggacctgtagtagccaacaggacacttaataactgatgtataggtgcgcactgtgtgtccagagctttacgttaaccacctcactgtgtcatctcgctgaggttgtgtggtttactattactgctattagcgcatttttaagcgggaaacctgaggcatgagga

SEQ ID NO: 415709 - DNA, 190 bp, Homo Sapiens
  misc_feature (135)..(135): n is a, c, g, or t
tctgaatacagaggggttgcacgaggcaattctttgaggtgtggaatgtttgtatcctgcttgtggtcatagataaaaaatctatgcatgtgtaaaaaatagaagtatacatacaaaaaagtgaattcgtactgntctgataattgtgtttaaaacttaaattaaaaaatcccctaagctcttgctttcc

SEQ ID NO: 415710 - DNA, 638 bp, Homo Sapiens
cagctgatgaatactgagtgggattcaaatccaccattccggctccaggtgctcattcaccacactgttctgggtgctataacacccattctggactttactccagcaattgctgagggtctgcctgaggtagcaacggaagagatggaaaagagaggtcgaactgaaagcccgctggtgagacttggcaatgattcaatgagagaaggtggactgcagaccaatggcccgctttctggtttaggtggcagagtggctgatgatgccacatttgaaggtaggatacaggagaaagactggggccttgggggtgcacgaggataagttcagtttggacctgttgagtttgtagggcgggatgccaccgaggtgcatatacaatggaagaagcttgctgcaaatcaagatttagaaggtattcctacaacctccaaactgaacgaagacagttctgtctttggatttcaagtgaataaggatcagtgaatcgggctatcctactgcataaatgagtctactctgtaagtgagtctattctcagaacagtttccgtaactctagggccctctccttcatgcttaaaagcactaatctttcagaaatgctgtagtggtgttctgtgcctggacgtaactgac

SEQ ID NO: 415711 - DNA, 734 bp, Homo Sapiens
  misc_feature (165)..(211): n is a, c, g, or t
cctcatttggcagcagaagcatcgagtcacaaggaggatgaggttctagcccagaagcagctgggctatgtcattctaaaggtggtgagtaaaatggctattcactggggcatcaggttttctttcatgctatttccctgagtggagaatctgggtctagaaggnnnnnnnnnnnnnnnnnnnnnnnnnnnnnnnnnnnnnnnnnnnnnnnagggtacacgtgtgtggcacttacttatttttcacatgagcagaaactacttgcaaagtgtgtgatgtgcagataatctaaacagaaatcggggtgtgaaacagcgcgggaggggggatcgagaaaatcagtgtatacaacccccgtcgttgttgttcacagagagagggacttcgtgagggctttcaagacgaggggtaagacggccgagaagaatctacaaagcgtgtggagtgcgccatctcataagaaccgcagtggctgcaggactgctcgcggggtagcaggattttctctcctagtcgctactaatcgtgggatgaagagcaagatgagctgtgctgttggttggccgagaggagcgctgtgtgccgcgcgggttgaagagaggctgagaatgctgtgatgtcggcacgcatgaggtgtgcagtagaagagcaggtctcgtatgtgcacgcaggtaaatcggtggagaaaggaccatttggtgaatgaaggtgacggatgcggggtgtgaccgaag

SEQ ID NO: 415712 - DNA, 661 bp, Homo Sapiens
aatttattctatagagcctattctgtctctccccgcttcctatgtgaagtcttccctgactcaagtggtctcagttttccctgaactctgtgttgacttcatcttccttaactgtcaaccatgcatggtcttccagctggctggtatatcttcttggtccatagccaaggctgatcagcataggacaatcaggacaatatgaatgatgctcaaatatgtgctaacagtcatttggctgactgttctggagactcccattccttttgaaaacaaagatggacttttcaaatgaagttatagttcagggacttggtttggaattatttggtaagacctgaactaataaaagccctatacagagagacattcggtagctattattatgggttatctttaaggtgtacaaggctttgagcgtgatggctcaaaattactattcttagtatttataagttctactggactagattttcaatctggtcatctcagttcatatagtatatattcataacatggaatcaataagggtaaggctcattaggagattattggccagtgattaaggatggtgggacagaaagaaattcatattttttccacatatttcatcttatttaatagtaaggtccttaaactttactatcaaagcaatataaggtcc

SEQ ID NO: 415713 - DNA, 312 bp, Homo Sapiens
ctcgcgactacgggaacaaacgcgccttaagacgctgaaggttggcacccctgcgctgcagccaaacgtcgtgcctatggtacacgcctttcacaatggcttaaatggtagtaaggcagatattaaagagagggcaacccaggacccatataaactcacctttaacccatggatactatagcatgcgaaacacccctatagggtaccacggaatgatatggacatagcaaggacaccctactacccccaacatactataggacctatagtagaaccccttacatcaacaatcccccccttctcagaggaaca

SEQ ID NO: 415714 - DNA, 226 bp, Homo Sapiens
ccgcatcccgtgcccactgcggggctctggacaggtgggcgccgcgccaggccgcagaccccgcccttccgcgtccccactccggctgccctgtgcggctccggacgaggcttcccgggggctccgggccggggcagccgcggcgccctctccccaggtccaccgcgggcgctgctttcaaacaaaggcaggagacggagcgggagacgctgccgtgactgctccg

SEQ ID NO: 415715 - DNA, 511 bp, Homo Sapiens
  misc_feature (386)..(433): n is a, c, g, or t
aggataggctcaccacatctggtgaggcaggcagggcctcgctgcaacacagaatgatcccgtaggtctcaaggcctacttgtacctgttgtacataatgtatataattgacttttattcactcgacaaaatttcctaaaaatacatccaaatgattgcattaattaatattttgttcctttgatgactgagtagtatttcatggtttctggtataaattcatcacaaattaaacattcacctgggcttattgaccttttcaactgtaacaaattaagctgttgtagacattcgtgaacaagtttttgtgggaccacaagtttcatcactccaaattaaacacccacaactgcaattgctgggatctatggtctatgcatatctgnnnnnnnnnnnnnnnnnnnnnnnnnnnnnnnnnnnnnnnnnnnnnnnntgtgtacactgagtgcccacagaagctagtaaggatactggggcattggagaggaggtagagaaggttaatcagcagc

SEQ ID NO: 415716 - DNA, 1249 bp, Homo Sapiens
aattggggcacgaagcggggctttgatgacccgcaaagggcgaggtcatgcatgtgacgtgtggagcgaattaagtgaaacagtgcaaggtagttagacagcaccgatgtgtggcgagtgccttaagggtctgtggtccttgtcttgtgctggtggtcttttggtgcgtcgactgaggccttggttctgttgtaggctggtggctactactgtgtggcggtgcctgctttgtggaaattgccttgccctgctgcgctttcttgcccagtgccgcattggggtgcatctgtaactactaaagcctacctactacctagcccctagtttgtgggccatacaccatacacactgtaagcgcctacagactcctagataactagtcggccattgggacactagtgataacttagccattaacttaggtaccagatactatttcctgggttgggaagtgtggaggcaataatgttaccttaggcaacaacttgtgtggtagtttgcgtaggtaaacattaaatagctgtgaagtacagaacggtaacttagtgaccaatcctaagagcttacaaagacaacttggcatatgaaatgaccaggacttccgcgaactattggacaaccatttgatatgtaaaccctggatggagcaggaaacgacatgagaagccacaaaggggactaaggaccatgtggcgccgcaagcagcccgagggaacctagaacggccttatgtggaagagtggacctgattgccatagcaagaagagataccctattccgccagagccgtttacagaagtttgttcaaacccgacataggtagagttccaaaacacgatgatgttaattacgagcagtcaaaacatcagcagtgagaggtatatcaccaggttagggcgaaactattcagcacgaagcgattatactcgataaatggaaatggtcgtttggctgctactccaatagtcaaagacatattatacgccgaagtgtgggtgttggtatggcacggaaccattgtcgttatgttcgataatcataaagggaaatcacccgccgaaattaccgacagacaattggacctcctatataagatagctttgcgtttgtattagtatgatcgtatggcgatccccattccccataaggatagagtctcagaacgcaattacaggtagcccaggactgatatacaactattgtgggagtatatgtgagttgctgaagtactgcgcagctaggttacaca

SEQ ID NO: 415717 - DNA, 855 bp, Homo Sapiens
  misc_feature (174)..(252): n is a, c, g, or t
ctgcactcgggcttctgggcgctcggctttctcatcgcgctgttctcagccttgccggcttgctcctctccgatgggaatggcgaggcgagatctagcctttgggtgggaagagaatgcacagaaagcgctaaggatcaaggaggctgtcaataaacgggagttgttgctgtgnnnnnnnnnnnnnnnnnnnnnnnnnnnnnnnnnnnnnnnnnnnnnnnnnnnnnnnnnnnnnnnnnnnnnnnnnnnnnnncacaaaatacacaatgcaaacatacgcccatgcacagtatcaacgacccaccacagcaatcaacgaaacagaacttccaatactcatcgaccaatctcgacctgacttcaaacacatactacttcaacagaacctatacacatcacacttatcctacacactcccatcaaaccatgcactccgatcctacatcctccttatctctatcaatagctatatctataacttaaataccaactataacatatatatgaataacctgcactaataagcacgtgaagatccgacagagacccacaccagaacctgcataagtacactatacgaccccaatatctcccacgcgacaatgacgtacaacctcagcagcacttacactaacagcaaagacgccagatgatctaagtatacgacgaacatcatccatcgctatacaactactaaaattacattattacttccacgatcattccttcaccatatttcacaaccatagcacacgaaacagacaaaccctactgacagaccacatagtcacgatcacttactcaatcacgaactgcatacgcaatctcacactcactacctcacacagcaccttca

SEQ ID NO: 415718 - DNA, 849 bp, Homo Sapiens
gctggggaccaggcggagatccgtactgtggtggcactcatgcacctgttgttggcagtgaacttctggctgccattcagtcagcagctgttaactactaaggtgccaggacaaaatgaaatgcaaccaagaagtcatgccccatcacaaagtgcaatttgaggaaaacaagaaggcagatgttttgccattgagccagaattaagttttcttctaggactatcaaggactatgtggatctgacaggcacttctgctcagctctcctctagagactcctagaacatcatcgtttcctgatttctttgctggctgcttttataaccaaactccaaacatcaaaattatcatcttagtcctgggtgttctgtcctaatgtgttaactgcaaaaatgacctcaattcttaggaacttctgccatcagtagctggagtctattgggtttcaagtctgggcctcaagaggcattgcaaactttcatcctctcttttgagatttcagcaccatcaccaaatgaacaagtcccaggtagcctgctggaggatgtacaaccatgtggaacgccgatgagccatcacagctgagttgttttggacctgctagctctaaaccaatgtcgcagctgtctgtagaagcacgaatgagatatggccaagctccattgagcctggcccagataagcagaactgtttcacggagcccaggacaaattgccaaaccccagtatcgtgtatccaataatttctagttgtcctaagcccactaagttcaggggtgacttgttaagtggtttataactacctaataagtacatttggtattcccttttattatccatctaccattagc

SEQ ID NO: 415719 - DNA, 719 bp, Homo Sapiens
  misc_feature (365)..(377): n is a, c, g, or t
tttatggttttcatagaattggaaattggggggcattttttcttctgttatggttttctctctgctcctctcatgcttctcctggggctctgatgacttggatgtacgttaggcccctcagaattttctcccagtgtgctgattctgtgcagctttttaaaaagcctttttctctctgtgtttcatgttgggtactttccagtgctgtgtcctcattgtttattaatctttctgtctaaagtatctaatttccttttaatcgtatccaggtatttttcacctccgacatatttttagtctttagaatttctatctgggtctttatctcccatgtgtctccttcacatgctcatgccttcctctannnnnnnnnnnnncaacatctggagtgtatggataatagctctttcagtgtgcttgcccattctgtcatctggcatcatttcgggtctggttcctattggatggattcccacccttaccccaagccccaccctgcccagtatcggatctgtactcttccttcattaacatgcctggtaattcctgtcttaatacttagggtgctgacacgttcctttgaacataatctcagaaacctctgttggcgggcacagtacacggtactctgtacgaacaagtccgaacatttactacgctgctcccactctccatagcacatgacggcgacaccctttactttagggctaatttgaccc

SEQ ID NO: 415720 - DNA, 805 bp, Homo Sapiens
gcacggcgggtatagtggttccgcaacttgggatgttcggctgagcgcctgcctaacatgggagcgcctgcctaaccctcctgactggagggtcagcggcggggagtcctggccttcaatcggccatcgccacggcagaaactggggcccgggctgcgtccaggcccttccccgtccgtccacaggtctcatgggcgcccggactggggctgatgtagtttcccgacctctgacacataggatctggagattaaagctgctctgctaataattaggttcccacctctcaagatcattaggagcttcttttccaattcctctgtttgcatgcatggaaggaaaatggtgacgccgagggtgactgatttccaggtttacatcggttgccccaggggaagtgcctggcccccatctggtccttgctgctctaactttgccctgttaattgaagaaatgcaggatctggagctcaggacccactacctccccggcccactgcaagcttgaacatttgatggtggacacccctccctgactttgtattatggtccagattttggatgaatctctatagagattgaacagataaggctcacctttcaatagttacaccaagaaaggcctaggtggtgacttaagctatggttttgggcagcacgagagtggtcaggtggacagtagggaagtctacatgtaacccaaacggaaaagagaaaaggcccctgagacatcagggcaaagtccacagtgtctctttccccatagtgtcactggtgtgggggttaccttcccactatgtctccca

SEQ ID NO: 415721 - DNA, 851 bp, Homo Sapiens
cgtggacagaggaagggcgccgtggtctgtgattccgcgcgcacgtgtaagcaccgtacaggcgctgcggcgcatgcagcgctcgagggatttctgctgagcggctcggctacatcaatgggcatctgtcaaggacttcatccactgacccgggtgacctgcggagccgcccctctgccaaggtggtcttccgggatccgtatcggtataaggaagcgagacggagcggttcatagccgttccgagggcattcacgacggggccacgttctgttgtattgctggcaacgaatggcccagctcaacgagttggcaatgtgctcccgtgtggagcaaccattgccatgtagggtacaatcagtagttgcttgcccttgagaggcagaagcctggatcacctgtggtcaagctggctccggggcatcagggaactatgcacaacgcagtaatcgtcacctacatatccctgtagactcgagagaaatgaccgcggtgtggaatgcgtgcgccatcgcgggcttcgcaatgagagggttgatctcccatcgaggccatagcagagcttgtaggtgagggatgatggtggcgtggagggctggcctgcaattggaacaagagccccagtctttggacggcttgagccaggggcagttaccacaaaactattaagggctaaagaagggacagctgggatgtgacacagcagagtacagggggatgttgggcccagtgaactttccctgatggcatgccacttgcgttactagatgagagtgagcacaacgcaccagggtattattcgggtcaaagccccgctcccggccaatccaggcagcgaagcatgtcccccgt

SEQ ID NO: 415722 - DNA, 751 bp, Homo Sapiens
  misc_feature (34)..(34): n is a, c, g, or t
atgccaaacgcgggctgtactgccctgggagtanggataccagcctctcggttctttgcatggtttctttgtgcgtagcgccagcctctcggttgtgtgcccggtgtttctttggccatagcacctgcctcttggttgtttgcacggtgtctctttgtgcatagtacccgcctctctgcttgcacggtgtttctttgtgcgcagcacgcgcctctctgcttacacggtgtttcttagtgcacagcaccagcctctcggttgtttgcccggtgtttctttggccatagcacctgcctctcggttgtttgcccggtgtttctttggccatagcacctgcctcttggttgtttgcatggtgtttctttgtgtgcagcacgcgcctctctgcttacacggtgttctttgtgcatagcaccagcctctcggttgtttgcccggtgtttctttggccatagcacctgcctctcggttgtttgcacggtgtttctttgtgcgcagcacccgcctctctgcttacatggtgtctctttgtgcatagcaccagcctctcggttgttgcacagtgtctctttgcgccatagcaccagcctctcggttgtcctgcatggcgtccctttgtgcacagcatccgcctctcagcttgcatggtgtactttgtgtgtagcaccagactcttggtgaggggagcagctgccctcctccggagcttctctctgactttagctcatgggatgagcctcctgtagtgacc

SEQ ID NO: 415723 - DNA, 914 bp, Homo Sapiens
gctggtaccggtcagaggtgtctaggatgttaatgcccagttcaagattttttccttctccaccttcccctggggttgactttagatgggggaggtttgggatttagggagaggcttcaggctcctgggaggtgctctgtcctaccctggtgttcttcctggctagtcctgggcatggctttccctccaggtggcttctgtataagcatcttcagtcccatttggtccctgtcccgtggtccgagcctgacatatgtgcccatcccaaggcctctccagccttaccatcctccaagacacatcagtgcccctctctgccctgtgtgaaaatctttggtttctccgttgaaactattcagggggctgcatcaagcccagcttcctagggccagtgggtggtcctccctataccacaccttaggtgtggtggcaagaggcattctcttttcgtgtcatctcccaggccattcaggggatacagctcatgtgcccttcactcttggttttctaccctccccaggagttctgccctctaccccgaggctctgctgggggccaggcagagagctcttctccaggaactcaatagtgtctgccatcatcctctcctctcggacttctcttccatagtccaaggagttactttctatcccaggctaggaaggttaccactggaaactctaaaagccaagaattaacttctgtatcaataacctctataccaataagtgcaggaaaatacatcagacacagtccaatctcattcatgataaaagtgctcaacagactgagaataaaaggggaaattttctcaagcctgatactgagcatttatgaaaagtccacaggtcacaatccatattaatatttaatccgtgaatgactggaatccttttcccactaaaaatccggac

SEQ ID NO: 415724 - DNA, 800 bp, Homo Sapiens
  misc_feature (292)..(301): n is a, c, g, or t
gataggagatgagactatttcaccccaaaatatggctgtaggtggccagaatgtgtaccccgagagatgcctctttaaaataaggatcactttgagctgattatttggggagacagtagacacaggagaagctctgaaaacagagtagaagttaagcttttgtaagagaaatttgcatctataaaggaaatctccatcgtaagggtgtctcgtctctgtagaagaaaaagaatgagtctaagttactaaaaactcttatcaatagagaaggcaacttaaacacaagtaaggnnnnnnnnnngtatagttacccttgtttaaggtgcttttcctccctctaactgggtaggaactttctttgtttcagagaatagtatttaagcttgaagtcaaagctatgatacttctgagatttattcaaaagctttgagatatttcctgtattatttcatttatgttgctataaaggaatacctgaggctgggtaattcataaagaaaagaggtttgtttggctcacagttctgcaggctgcacaagaagcatggcaccagcacttgcttctggtgagggtctcaggctgcttcaactcatggtggaaggggaagggaagctggcacgtgcagaaatcacatggtgagggaggaagcaatgggggtgggggaggtaccaggctctttttaacaaccagttctcgagggaactaatgagcaagaactcacttattatgacaaagatggcaccaagccattcatgagggatctaccccatgatcaaacacctcccattaatccctactca

SEQ ID NO: 415725 - DNA, 801 bp, Homo Sapiens
ggctggtactggcccgggagtttgggatgcacagaggaaataatgtgtcattcaaagctcagcttacagacacagccttcataacatagtaagcaaccatgggctgttctgtgctcctgacaacttcaactgttaccttgaagttgggtgaaatagcagaaacaggctgcactgaggtcttactcttcaatagcttttattgttatgcctgtcagaagtcaaaccacaacccccgagccttcacccaccttaccccgcgagaccgtcccacgatgctcacgacttagaaagctttcaggtaatggccgaacagtcaaggcactgtgataactgagaagctgctaacagagaaatggtacactccataagaatgaagagcatcctcataatcaaacatgactgacccttggaagccattccgtgaacacaccaggctctgagtaaccagcaaggactacatctgggccatccaataagcagatcagcagataccatttagaaagtgaagcactcaccagatagtgatcagcgatggcgaacgtacagtcactaaaggaagggcaatacatcacaaaagtcacaccccagtaggggatacaggtggacacggtaggctcatgcatacaagggcataccagataaagatagagagaaaacacgaacatagaacagaaaggacaacaaccggcacagcaaagaattagaagacaggggatacgggcgcagcaaatgtaccgaaaggagaatgcatgaagcgatatgtaaaaggcgataggcgtgacattagcagaaagcgagaga

SEQ ID NO: 415726 - DNA, 1120 bp, Homo Sapiens
  misc_feature (47)..(142): n is a, c, g, or t
  misc_feature (449)..(532): n is a, c, g, or t
  misc_feature (602)..(639): n is a, c, g, or t
  misc_feature (851)..(859): n is a, c, g, or t
ttacggcatcttcagggtgaggacgtgttctcgggacgaggtccgannnnnnnnnnnnnnnnnnnnnnnnnnnnnnnnnnnnnnnnnnnnnnnnnnnnnnnnnnnnnnnnnnnnnnnnnnnnnnnnnnnnnnnnnnnnnnnnataaataggtcaagctggctgcagggcccaccccaccgcggccgtggagcagggtcttctggggtgtaccacctcgtgccctcacccagtgttccaccacgaccagcttcgtccagcccccaggagaccatgaaggcccacgtctgaaatcctcactaagccctacccttctcccatttcctttcccttgaatttacgtgtgtaagtgaatcaaactactgtctctattcttctttgttacctctttctccctattcatctttcaatctctcatagcacatttctcttatgtcatttcttttatctnnnnnnnnnnnnnnnnnnnnnnnnnnnnnnnnnnnnnnnnnnnnnnnnnnnnnnnnnnnnnnnnnnnnnnnnnnnnnnnnnnnntacttatattcacatagtaatttctgttattctatttttaacactctcttttactctatctatattctannnnnnnnnnnnnnnnnnnnnnnnnnnnnnnnnnnnnnttctgcccttctctacaataacaattcttcattattctttattccctcatctcatccttcttctatatattcttacatttccacttcctttttattattcttttcatattcataatctacatctatatctcatatatcattcgtattttattatctatatattttcccttcatttcgcactgtctgtctttctcttacttctctctacttannnnnnnnncccttcttcttatacttttctctctacctagaactcaccgctcactatatctaattacctccttactttcttatactataatgactcctcactcattcattccatcttttatcttatcatatcaataatctcaatctctatatttactcttgttataactactctccacattttctccacctcgctctataaacatttctcacatactcctctatacccacaccaccctctcagcatctttaacctctccacattccatcc

SEQ ID NO: 415727 - DNA, 804 bp, Homo Sapiens
agggatatagaatcacacagtatgtgtcttttcgtgactggcttattttagttaggatgtcttcagaggttcatccatgttgtagtgtccaaacttccatcctttttatggctgtataatattgcatgtgtatatagaccacgtggtgttgtccactcaggttgctgtcaccttttgggtattttcgaaaatggttaattttggctaccatgaaacatgggtgtacaaataactctacaaatttctgctttccattcttttgagtatatacctggacgtggaattgctggatcgtatggtaattctatgtttaatttttttagaaactgccattctgttttccatagtggctgcacaattttacattcccaccagcagtacacaagagttccaatttctccacatcctcatcagcacttattctttaataatagtcatcctgaggggtgaaaaagttatcttgtcgtgattttgatttgaatttccctaatgactgtcacggctgagtgctatattcatgtgttatgggccatttgtatatcttctttagaaaaatgtctattcaagtcctttgtccatttttttaatggagtcatgttctgtcgagttgaagttctttacatattctagatattacttatcagatcataatctgtgattatcttctattttgcggttgccttttcattctctatggtgtccctttgatgctgaaacgttttcaattgtgatgtagtgcaacttttggcctttgctttgatgtcataccgcacgatattatgggctaaatccacatcatgaaca

SEQ ID NO: 415728 - DNA, 723 bp, Homo Sapiens
  misc_feature (80)..(89): n is a, c, g, or t
taagggatggcgagtgctgcagctctatcagcagaacctttctctccgtgtgaggaagagcttttttccggccctttccnnnnnnnnnngtttacttttccccttaatcaggaagcactgattgaaagccaatcagagagagctcgccccgcttttccttcggttcccgtggctgtccagagtaaaaaggtgatgctgagaaagagctgagttagatggaagttaaaactcttgtgatagaaaataacagccgaaaacaaacaaaagggggacatagtgacaatttctccggggtaatttgggcgtggaaccaatttccattatccagaagcgtgataaaaacgcttggggaaccatgaccaacaacatggattgaaagtgtgggaaaccagttgaaacacagtaaaaaccaacggggctaaaattaggaccacttctcttcatctacaccggggcatggtcacgaacgttgacctattgacaattatatctcaatattttggcatacgtgtttcataattcggggatatgcctgccaacatttcgtgctatcctccagaaataatgtgttcacgacagcgaccgccggggtgcccacaggcaacagcaacttttcacgtttccacggtgtccccagggcagttgagggcaaattctctaccttcgtcaaacatcggtggtgggcatgtgcgaattcaacttttcctttcctctgacgacctt

SEQ ID NO: 415729 - DNA, 634 bp, Homo Sapiens
  misc_feature (66)..(74): n is a, c, g, or t
  misc_feature (77)..(151): n is a, c, g, or t
  misc_feature (165)..(336): n is a, c, g, or t
aatttactccccatctagattatgtgcacaattttagttaaatggattatgtgctcaattgggggnnnnnnnnnggnnnnnnnnnnnnnnnnnnnnnnnnnnnnnnnnnnnnnnnnnnnnnnnnnnnnnnnnnnnnnnnnnnnnnnnnnnnccgggttcacgccnnnnnnnnnnnnnnnnnnnnnnnnnnnnnnnnnnnnnnnnnnnnnnnnnnnnnnnnnnnnnnnnnnnnnnnnnnnnnnnnnnnnnnnnnnnnnnnnnnnnnnnnnnnnnnnnnnnnnnnnnnnnnnnnnnnnnnnnnnnnnnnnnnnnnnnnnnnnnnnnnnnnnnnnnnnntacagggtgtgaaccatcggcgcccagacccgtggtgctcaatttcttaactaaggtgcacaatgggttcgtggtgaaaaacaagcaacgtgggctatatgctgggtagccagactaaggagagacttagatttttctggtcaagcagatggtgagggtaacatgtgtggggccaagcttcaggtgtaattactctggattgttactcttttctctttcatcccaagggttcagttcatattctttcttcagtactacaaagataccagaataagcgggcatagaaagcaaaggtgta

SEQ ID NO: 415730 - DNA, 738 bp, Homo Sapiens
  misc_feature (82)..(98): n is a, c, g, or t
gagatgttaggatcttgggactgaaaaatctagatatgcttcctgcttcaaaatgtgttgggttgttttcttgttttcttgnnnnnnnnnnnnnnnnnggcccttagtctcttccacatattataataaatgggggttagatactctacaaacaagactattatataagatttattatatgactcatcctaatggtttaaatctggaaaatttaaaattagactatttacacattttatctaaaggctttcccttcatttcaaaatatgttcaacatttctagcactatttaaaattgaattgggtttacttcttctctcctgggatttaaaagagaaactatttgctatgtatcaagataaaggtttccatgtaaatcactcttatatttctcaagcctacaaataccttaaccaatgagattgaaatgtgagctactttttatactagtggggcttcggattgtgcattcagcattaaaaaacaaagcgattatgccaaattatagcaagaccctcaattaacaagtaaccattaaccatgtgagcggagacaactaagacgcaatagcacagaccaattcagtgtgccagtctttttaacacagtgagcaccatgggctgtgaatgggactctcatataaggccacttatttccccttaagaaccgtgcgtgtttgtgctttacggctgctccatagaggcctgaacctttcctacccgtgtaagcctattgccc

SEQ ID NO: 415731 - DNA, 822 bp, Homo Sapiens
  misc_feature (387)..(397): n is a, c, g, or t
accatggtcagcccatattaatttaaagtaggcttcaaatataattattcactaattgggaatgcctggggatgtatatgaatgtattaccgttttgtgagtagtagtgtgtgcttgtgttcatggatggcattcatcagaatgtttgcaatggtgtagccaggttacactgccatcttcctgttctcctttgtgcttacttgctctgcctgtatttgctgcagtttctagcgagtgtatgtaggtgttggcccagaacttgcttttgtagagatcatacattgtgctaatttatcccaaatcagtttttgtgtattatctgtgggcccaatgtgtaatttgaactttaaggatactacttcagactgcagtgtagcataacctttnnnnnnnnnnntgctagttttgccctaatctgtgcatattccagttgttcaatgggtattagtaatacatgaattacttctgtgccctttttggtgtagagtctcatatgaataattactgttatttaaaacccacgactccatgcattgttttggtgggagagggtagtttcccatcatgttttacatatatgttagcattcagattttcctttttagcccactccctactgaactgaagggaaagggcgtatttgagagaaaacatatgctttactcaagttccaataattaagcccatgcactttgatttaagtttatacactttagcttcattccttaaaagtggtaataaaagacttttaagccctccctggcctccccaaatccagtggcttttttcctactaaaaaatttcttttccgggccttggctt

SEQ ID NO: 415732 - DNA, 1335 bp, Homo Sapiens
  misc_feature (71)..(119): n is a, c, g, or t
  misc_feature (151)..(185): n is a, c, g, or t
  misc_feature (961)..(969): n is a, c, g, or t
  misc_feature (1123)..(1123): n is a, c, g, or t
  misc_feature (1186)..(1186): n is a, c, g, or t
  misc_feature (1214)..(1232): n is a, c, g, or t
aattcccgggatcgcgccgctcctcagcaagcgggcgggcggcgttcggtctgagggagcggggcggtctnnnnnnnnnnnnnnnnnnnnnnnnnnnnnnnnnnnnnnnnnnnnnnnnngcaggcgagtgagggaacgaggagcggccggnnnnnnnnnnnnnnnnnnnnnnnnnnnnnnnnnnncaccttctgcattatgaattatcttccatatctctttgcaacgcatacgccccacctaacacccccgaactcttattacctacctaacaacatctaaaattaccacacccgcctatctagctaaatagcgcaaacatttataggtataggtgataaacctatcgaacctcccgctttctctttctccaatataccaatcttaccatcaccttttcccctcccccacataaccttcctacttccccttgtcctttcactgttacttcatctaggaactcttcttccctaaactacgcaaactatcttcgaaaacaccgttccaaatgtgaaccccccattttacatccgtaaaacttttcgtttacctaaacaccccctctcttccctctacatctccgttcccataataatgcctccccacccgtataaaacccaaatttcctaattaacccccacttcggccctaaccccctattacctcccccttttcccttgcaaccttaattgcttcatcccctcccatttaatttcttcccttaccccattttattccctccctttaaatattataattcccccttcacacaacagcctccccaagcaccacaccctcttaatttacttctatcccaccatttataataatcccaccccccaccaacacagcttttattctttccactcgtcctatatatccccttcccgcgtatatccccacaccccccattatcaattatcccctttatcctccgccccacacataccaccacgtattnnnnnnnnntttaaatcccacaccagatgatgacacgccatcacaccacttgttataacgctccgtccctacccctttacaccaatatacctttatgtcgcgccttttctatataccctccctgttttcacgctcttattttttctccctcatattctttatngcattccgcctacatctgccaattatattacccactatttcctactgccctcagcatatactntttacaccgcataaataaatacatcttnnnnnnnnnnnnnnnnnnnttttttcccattcaacattattaccattactttttgtgttcccagcctacccaacaccccactattttattatttcacactctcctccctcctattaccttac

SEQ ID NO: 415733 - DNA, 1002 bp, Homo Sapiens
  misc_feature (900)..(900): n is a, c, g, or t
aattcccgggatctgtgcccagccacttcttttattttcatattcttcaaccaccagttgatttaaaatattccaaggaatcaagagctaaagaaaatatcattatctttctatatataatagttaatattaatgcttactgtgagcttgatttttgtttatccttacaactttagtaaaagaggataataataatctcgtttacagttgaagaaactgagatttggagagattaagtacttgtttaaggtcagttagatagtaggtctgggacttataggatctctttacccccagaacatgaactcttgaccacccagctatgtcacttctccagggtttagactagtggatgttaagattcaggccttaaatttcatttccctctaaaattaggcttatagaatatttcatgctagaagatgcttttaataattcctgaggactacaaaaagtttaagatctggtgcttactttccctaaatctacatgcttgttgaatagttaagacactattgtaaaaagatgaataacccagggcaatatgtaattgtcaggcattaagtggcagagaatattaaagcaagaagattcatgtccatggagagatttgagccaggtgttgaaaatgaaactctagatagaaagtgaaaatgtaaagcacacgatacaaaacttcactggggaagagggaatagataacctgactgtagctggatggatattgtccacagaactccttaagaatagggaccttgtcttactaaacggaatcgttctctttgtctggctctgggccatgtgggttctcagtaggtgcttgtttaagtagaattgggttttatttccattatattagggattttaggaacctccaagaaaacccattgtaaaatcaanctaaacctgttttgtttttaaatacccactttggataaaaatccttcctaaaaattaaattcaccccccattttttgggaattggccaagttttttttcccc

SEQ ID NO: 415734 - DNA, 1123 bp, Homo Sapiens
attcccgggatgcacagcctcctctagcagaagcccagagacaggcacttcaaaggaggaggggttggcttggagctttatgctgaaaaagttgtctaaatatgcatattcagtaggttacaggaagagctgtgaatgttcataaagttggtcctgatgaatgcatattaaacaagtatgttacatatgacccatgttcatctcacagagaagactcgacatttaaatattacaatcaggcccagtacatcaaaaggtttttcaggacaggaaggcactcaagtacgcaatctctgtaaacccactagaaccagtccatggtcggtgggcttcttaacaggagaaagttactgaaatcactctcttgtccagtcaaagctatagttatggctggtagagttcagttagtcagcatctggtagggctgcaagtgttttattagtgtttatggtgaggccactgcttgtttagctgctagagagaaagagaatccttgttgcagttagaacctagtttattctttaagcgtaggggtgcataacttaacccttgcctggcatggtaatttgttatgttgctgccacaaagaatctgttctgtcaatcttaggatctctattttaactttaatgcgggtcaattgtctggaaacccaaaaaagggaagggaagtataacaaagcccaggctaaacccggctgtcctggccttgggttgggaactcccgtttttaagaaaatttctggggtcccccctggccaaagaggggggtccaattcactctccccagggcaagagagccttacgggttttaatttcttggcgtaacagatcccccgccccttaaaaccaaaaagggccccacaagacaacccctggatggaacaccgcactgttattttgggggtgcaggcaccatgacaaagaggaagagcgagacgactacctcccaccgaaataccagctgcgcgcaatcaggaggggcgaagcacggcgcccccacagcaactatacatatcactaccccactcggaagggtgatcctcagatgttgtgagctacgcggctgcggcaagaccatagaattgcataggctacaactcgctccattgatatccagctgag

SEQ ID NO: 415735 - DNA, 1151 bp, Homo Sapiens
  misc_feature (142)..(171): n is a, c, g, or t
  misc_feature (264)..(311): n is a, c, g, or t
  misc_feature (362)..(891): n is a, c, g, or t
  misc_feature (1012)..(1012): n is a, c, g, or t
  misc_feature (1072)..(1072): n is a, c, g, or t
tcccgccatggctgattgacagcgctgggtgaatgagcgcgcgtggaggcgcccggcaccgaggtggccgcggctccgcgctgctgtgagcgcctgcctgcccgcccgggtgtggggggaccgcgggtggcgggctgggtgnnnnnnnnnnnnnnnnnnnnnnnnnnnnnngcgcgccagcgagggccgccgaacggccagggccgtccgagccggctgccgcttagccccggcctggccaccttcgccggcactccacagctnnnnnnnnnnnnnnnnnnnnnnnnnnnnnnnnnnnnnnnnnnnnnnnnttctctctctaccctcattcgccccctactacttctggacgcgcgcgcgannnnnnnnnnnnnnnnnnnnnnnnnnnnnnnnnnnnnnnnnnnnnnnnnnnnnnnnnnnnnnnnnnnnnnnnnnnnnnnnnnnnnnnnnnnnnnnnnnnnnnnnnnnnnnnnnnnnnnnnnnnnnnnnnnnnnnnnnnnnnnnnnnnnnnnnnnnnnnnnnnnnnnnnnnnnnnnnnnnnnnnnnnnnnnnnnnnnnnnnnnnnnnnnnnnnnnnnnnnnnnnnnnnnnnnnnnnnnnnnnnnnnnnnnnnnnnnnnnnnnnnnnnnnnnnnnnnnnnnnnnnnnnnnnnnnnnnnnnnnnnnnnnnnnnnnnnnnnnnnnnnnnnnnnnnnnnnnnnnnnnnnnnnnnnnnnnnnnnnnnnnnnnnnnnnnnnnnnnnnnnnnnnnnnnnnnnnnnnnnnnnnnnnnnnnnnnnnnnnnnnnnnnnnnnnnnnnnnnnnnnnnnnnnnnnnnnnnnnnnnnnnnnnnnnnnnnnnnnnnnnnnnnnnnnnnnnnnnnnnnnnnnnnnnnnnnnnnnnnnnnnnnnnnnntcctttctcctcgcccgcctcaccactctgctcctccttatttcctctctacccccttctccctatcccctctcactctacgctccctttaactcctctactctctcctcccaccgtattntctttgtctccccgtctagcacgttcgtgttcctcgcgcttctatgcccccgtctcctcngcctcgctatacttcttcaaccattactcacgagttgtccggaccgcaccgtcttcctccgccgctaactcaaacgtat

SEQ ID NO: 415736 - DNA, 1856 bp, Homo Sapiens
  misc_feature (75)..(219): n is a, c, g, or t
  misc_feature (976)..(976): n is a, c, g, or t
  misc_feature (1298)..(1298): n is a, c, g, or t
  misc_feature (1412)..(1412): n is a, c, g, or t
  misc_feature (1635)..(1636): n is a, c, g, or t
  misc_feature (1638)..(1638): n is a, c, g, or t
  misc_feature (1651)..(1651): n is a, c, g, or t
  misc_feature (1690)..(1690): n is a, c, g, or t
  misc_feature (1729)..(1729): n is a, c, g, or t
  misc_feature (1754)..(1754): n is a, c, g, or t
  misc_feature (1774)..(1774): n is a, c, g, or t
  misc_feature (1838)..(1838): n is a, c, g, or t
gttgggttggtgtttcccccctctctctctctcggtttacaaaccagctggtaccggtccggaattcttcggatnnnnnnnnnnnnnnnnnnnnnnnnnnnnnnnnnnnnnnnnnnnnnnnnnnnnnnnnnnnnnnnnnnnnnnnnnnnnnnnnnnnnnnnnnnnnnnnnnnnnnnnnnnnnnnnnnnnnnnnnnnnnnnnnnnnnnnnnnnnnnnnnncacgcgcgtgccgggcgggatcgcgcttatgtcgcccaggccgcgtctgtacttttacataaacttattaatgtaggatgataaagatccactataagaaaagactactatctcttacttcgccgccccatctaactacaccgccgggcaacctagcgatgcgtccgatctattctcgcccaccccgcgctagactcggttccacgagatggccggtttcccccatccacccttctccaacctccggttccccgtccgccttatctcaccgttcgtaactttacgcgatacatcccttcacccaaactcccctctgcattacttccctaccctacacaccctcgctcatcccgtcacccctcccccgtgtctgcgcgcgcccgccggctcttagtccctagcgcctatacgtcctttacctctccttccgatttaaccaattctcatcccgtcctcccttatttcgacggacccgcagacacttgtaccctccgtcatacagtcgcagccaacatatatataccgcacacagtacccagtaagaacactgcactagctctctggggctattcatatccatcccccgttccatccccagagttcacgcaccgtctacacctgctacatctgcactctccatactactctacaccatatagtattccgactattgcacctcctacgacctacgttcctactctctttgccatgggtcacggctccctgctttattggtcgtgtccatttccgccgtctntatcctgtgtgacaccagacccacatcaagctttctccatccacaccatctcctctcctctcccgcgccccctttaccgtactagtaatatatgtgtgctgtgccactgtgacgcgcgtgcgctgatcgccaatcgcagggtgtacgctgtccttcatggggtgcgagcgctgcgctatttacgctgcggctgtctactggtcagtcaataacccatacgacgacacctcatactcacgccgtcgccccacgccagccccatattctatctccacgcttgtgtctccccgtcttataatacgtcatacgacaacacgtcacncccctcactcaacgtcactcaccgtacacatataaatttacacgctcagtctccgctcctcatcgcaccgccctctctgctcccccacagccaacaccacgcgcgaaaacgctnacttccacaccccctattcgtccacctttgacctcccaatccatgatttaatggccgtgaccactacctaatcaccagattgcgagcggctgcgacggtattaccgaggcacgcatcctatatggtatgccagctatcgtctcgtggattctcaccctggttatgcatacgccggcgatgtgtgagtggaaccgaacggccgctgtcatgagatggtatttanngntaggctccgcgtnttgtgtgcgcgtaaaatgattgcagtaaggtatgagacnaaaccctaaaaaaacagccgctaaccccggttgacccantacgaccagcccaccacttccgtcntgctttgtacctcaacccanccagtcgcggggagcgcttttatctctcctccctgacatggaccctcacctcccgtgcgccggncatgttacacgccgcgcc

SEQ ID NO: 415737 - DNA, 1335 bp, Homo Sapiens
  misc_feature (106)..(106): n is a, c, g, or t
  misc_feature (678)..(735): n is a, c, g, or t
  misc_feature (1217)..(1258): n is a, c, g, or t
aattcccgggatacgaggcggcgtggggagtgggttgcagcccccacagtccggacccctatggtgggtctggccccctcctgagcctgcgagagtgaaggcctanccctgcgagtcctggagctcggtccaggcttcgtctccctccgcccccagcaggcgccgctcggacaccgctgacaccactgtctggatcggcgaaccccaaagtcgaggaaccgccggtgcagccgcccttcacctcggggacctgcccggggaccagggggacgtctgggcatccacccccaggaagcgggcagcgcatatcacacctcggatccttcttagcactcccaaacccaaagccaccagcccttctccactgcgaggctgctcccggcagccacacggtcacagcagccagcggctgccctgactatcgagcgaataacgcacgctggaccgcggcgccgggatgctgggcgtgggtgactggcgccgaacgcccttacgcctgaatccccccttcctcctcttccggctccccgcccataatcaccactccccgcgcacgcgggggggcaacgttaaataacgggcctatcgcccccttcccccacctaacctccccgaaccccctccacaacgcgcgaatacgcccccctgccgcccattttcggcactgccgacaaatannnnnnnnnnnnnnnnnnnnnnnnnnnnnnnnnnnnnnnnnnnnnnnnnnnnnnnnnnacaacaccccgccgtcctcgccccctttgcgacgcacgcactagaacccccccgctattcgcgcatcccatttcgccccgttcgccccccgccgtcgaccttttcctttgtttattaccccgccaccgctcgcctcgtataaaatcgccgcgcgacagcgcgcaatataacgaattcacacccgccactcaatcccctaccatctttgaatcccccctatacccgccccgcgccgttttcgcccacatccagcgacgtctcccgctgacttccccacatatcgtcgtcatatcgccccggtcgctataagtaaccagagccgcgagccaacctgtttacgtcattccgttcttccgttatctaccgccttacaatatcccgcacccccgccgcataccgctctatcgcgccgcctgatcatactattatcactccccgctaaccccatcccaccccctgattcgccgtattacgcacctatnnnnnnnnnnnnnnnnnnnnnnnnnnnnnnnnnnnnnnnnnnacgatgcgctcttaatgccaagccgccccggagggaaaaaatagcgcgtctgccgcccaccgccctcgtagcgcagt

SEQ ID NO: 415738 - DNA, 808 bp, Homo Sapiens
cggtccggaattcccgcggatgataaattttagaagctgttaaccacatggagatgctgggttccagacacaagctcttgctccctcagaaatctatagcatcccttcaaagttgaagttcagttccacttagaaaggcattatttccattctcaaccctattttaaaatgaaacagcagaagtgaattctactgggttctgttcacatcgcagtgaccctaaaaaagtccacagaaagtacacttctcaatcaaatgtttagttaccattgactgcgaagaccccagagagagcatgacatttttcaatgattgcatcaaaatatattgctagggaatccagaaaaaatatacaactaaagtcttgcttttcaaaagcatcttcaaccagagaggcaagaaatattaaagaatgcttcattataataaagaaaaggatgacccgtttttaaaaagaatggaattatggggatccaaatggaattcaaataatcctggttgcgtcctgcactccagtattttggatgcatttgggaatgctgttggatcactctggatttgccttttctctatattctacccgacaagtttatattcagcagtatccctcacactgtgtgaaaattagcagtggttcaaggaagaaatttgggggtttatataaagtaagtgatgaatcttcttggcttagaaatgtggttcttaaaatacaaggcttatagatcattttgagaaacttattaaagtcaagtacaagaaaacatgcataccacatacacattgcattttgcattcagttccagggtct

SEQ ID NO: 415739 - DNA, 1058 bp, Homo Sapiens
  misc_feature (573)..(582): n is a, c, g, or t
  misc_feature (923)..(923): n is a, c, g, or t
  misc_feature (945)..(956): n is a, c, g, or t
caaggcatggtagcggtccggaattcccgggatagtagataatggctctttccacccttatctgtgttctggagcagtttctctaacatagtctttttcttaaagatttggtagacttacttataaactatctacacctgatgttcttttcttttctagtgaactttattttagaataattttaggtttacaaaaaagctgtaaagatagtagaatttctatataccctttgcacagcttcccctgttatttatatcttatattaccatggtacatgagttaaatttgttaaaattaataaacggtggtagatcaatataactaaacaccagactttatttggatttcattagtatttccaatactgttctttttctatttcaggattttgtctaggactatacgtttcatttagtcactatgtccccttggctactctctggcttgagacagattctcaatctattcttgtttttcatggccctatcggttttcatgagagctgggcgacgccttttgcagagtgtctctcatttggggaccccctgatgacttgacacatatttataggannnnnnnnnncaccaggattaaccccggggggggagtatactagtacatggagtggggaataccactagaagttgtaaaatgcggccttttaaggcgcaacatccaccaatcccgcaaaatagggtgacgcactttagtggaccctctgagtgcgtccttttgcgccaacaccataactcgggcttcccgcccagctaatatccagcttctgaggcctggttacaaaaaaccgcgaggaggagacacacaagactgggtgttgttgcgtacgccaacaatttgtctcctgcttggcggccgaatatagcgcacgaggggctttccatttccccaaataaaaagcggcgggncgggcctcgtttcgcggctggnnnnnnnnnnnngaacccctatccgtgaattaggcgaatcaacaacaacgagggggcggggttccttaccagaaggcggcattttctcccccagggagccggtttgctgcggag

SEQ ID NO: 415740 - DNA, 1370 bp, Homo Sapiens
  misc_feature (65)..(127): n is a, c, g, or t
ggtccggaatcccgggatgccagcggctgctggacgaagagcgggcgccgggagctccgagagcnnnnnnnnnnnnnnnnnnnnnnnnnnnnnnnnnnnnnnnnnnnnnnnnnnnnnnnnnnnnnnngctgccctcctgtcgcgggccgggtcgcggcgccgagcgcgagggccgggctccccgggctggtggacatggacacgaacctgatgctgcactgccacctaatggtcccgcgaactctgtaaaattatcggactcggaatcttgagatgacagagcctccttcaaacatctaacctaaccatataaaattagaaactaaaggatgatggatagtaaggtgggagaagataccgaaatgcgtgctaagagatggataaatctagctgcgtaatgaaactataaataagcagtgactcaccctctgacctcattcattattccattctctaatatattaacctataggagtaaaccccgttagcagtttgtataataccgcacaaaggtatacccctctatttaaaagaactatcatccctcccaataaaaggaatattccacataaaatatcattaaataatatataacacggcgcttcagaaccaacgtgatgatgtattagtatttctcataaaaataacaaacgaatgaaaacttacccacgaataaactgatctcccattaacccactatcgctaatcttttcttgtgaagagtgggacaaaacagaaccaatagtttgtctctatacacgcactaacctatcactgcatttccactttccatttagagggttaatatttctatcatgttcccccatattatcgtattacaccaaaattaacgcacattccaaattgtttactccccatatcaacaatacaaaaccataaggaagacttataagaaaatgttcgaatagagtagagagacaacatagtggaatagaattgagaataatagtatgatatgtaagtacttacactttcgttctcaatctaaacaatataatccacatctgctcgtcagaacacgcatagataacaccagaccggataaactatacttgagtagtaagttgtctgcagatatcaagaggaaaagtgttatctatgtcctgattatataaagacactcgactgtatcacatgcgtttagcgatattacgatcacgggtaccaaaactatctaattataccccgtactctaacacaagtatcatacatcattactcatacgcatcaacatgatttatcataaaaagataacattttatagacttaatacacgcactaatgattttacacaactatccacaactgtataactatatcagtacacgacacaattgcttatataagtc

SEQ ID NO: 415741 - DNA, 1342 bp, Homo Sapiens
  misc_feature (909)..(910): n is a, c, g, or t
  misc_feature (1017)..(1017): n is a, c, g, or t
  misc_feature (1044)..(1044): n is a, c, g, or t
  misc_feature (1180)..(1180): n is a, c, g, or t
  misc_feature (1200)..(1200): n is a, c, g, or t
aattcccgggatgggcgcccggctgggcccagctccgcgggcgcgcccccgtcaccccctcccaggccagttcagggcagcgccaaggggccgcgggctcaggctgaggcctcctcctgcctaggcgtctggcgtccgtttgtctgtccgaggcctcagcgcaggtaaagcgcggggctggggggcgcagagctccattgggctgggaaccagcgcgtctcgtgcccttgggggacccgcctgcccgagccgcctgctaagcctcccgctcccctccacgctggagcgcgcggagcccggtctgctcggaactccactctgcgggagcggaggccggcgccagcccgggaagccgcgcagggggcgggaggccgagcgcgaggcccttggcgccgggcctccgcggccaggccgggcaggtgagcagtctccgtgcctcccggttggcgttcccctcaacgcgtgcggacccgccggggcccactgtctctccgtccgtctggctctcaacttttcccgtccgttagcttaacaatctggcgcgacctccgtaaatctggcaccccccgcgccaagaacagagccctattacgggcgatgcaccagtagaaaaagtcccgaacccctctgtgagagaacgcgccgcgtccgcccaagagtatgcgcgccgccccggggtcacgtgagagaaggaagaggagccagcttgccaagcgcatgggaagcgccgcgcacacccgctacaaccccgggtttagtgctcaacgactccccgcacgcccctggtggccctgccgttcaaccgcaccaccgtgcatacccccacgtaaggctcgcggcactcataaatcttcctctctctatccgcgtcataataggcgaagtacgcgctacgtggggataagacanntcgagagctgggggggaaaacatagaatcaaacacagtgcatacgagcgcgctacaggcgtcacgggcggggtgcctaccctctccaggaaacattgaagtccgagngagagagcagcggacagacgatccgtnccgagttccctccattgaagcgcatcgcctttgaacgacccagaccgccgcggaggcctaagggcgcgtctgcgcttgtgagcgccattggtgcggcttgatacgaccacgagggcggcgcaacatacaactcccnacctatcgcactcgcagacngtctaatatatagagggaacagctccgcacgctcgtcccactccgacgcagagagctcacgacaggagtggtagcgcatatctagaatgcggagcgtgtcagctcgcgctcacactcactcaccgaccggcgatcatgaggg

SEQ ID NO: 415742 - DNA, 1266 bp, Homo Sapiens
  misc_feature (455)..(512): n is a, c, g, or t
  misc_feature (559)..(593): n is a, c, g, or t
  misc_feature (1198)..(1198): n is a, c, g, or t
aaagaagaaggggggcggagagcgtgggaaccttaaaaaagaagctggtaccggtccggaattcccgggatcacaatgaattggctcaaagtataacagtgccaaaactttgctcttttaatgctgtgttatccagaaataagactcaatagtagcaatagcaaaagtgaacatagaaacgacttacctagactgctgtgtgcaatgtgtgagactacaggatgtatatactttaaaagtggctggtttccattttacggggggtgagtttgcgtgttagggggacttaaggaatgctattgagaaactttctggaaaggaagtaaatggcagacaaatcggatgaagtccgggcagcaaaagggagcggaggggcaggaagccggcctcgatccgggagccgaagctgctcgaggggcgcggcacgcgacccgcgtccgcgaagatacggaatnnnnnnnnnnnnnnnnnnnnnnnnnnnnnnnnnnnnnnnnnnnnnnnnnnnnnnnnnncctgtgcggaggtggcgaggggcggccgcggggggccgtggaagctnnnnnnnnnnnnnnnnnnnnnnnnnnnnnnnnnnnacagccgccggtccgccgccggaggcgcgcgggaggacaacggccagaggcgcgtgaaatggccccccgcgctgcggcgtcccgaagacggcggccggcggggcgggcaagtgtgcgacgggggaggcgacgggggctgggcgccggcgtgaggcagcgccgcgcggtgccccagagcggcgccagcctggccgcccgggcgtgcggcgcggggggcgggctggaggcggcggaggtggacgcgtccgtcgcgacggagcggccagcgcgccgccgcggagcgaggcgcgtggggcgcggcaggagagagtagcggggctcgccgcggataatggggatagatcggcagtcaacgcgggcgacagagcaagaggagccaagcgagcggccgagagccgccggaggcgcccgtgccgcgggaaccggccactccgggcaggaggggccgggcgccgggcagggcgcgacgagagctcgggcagacggcgacctagatatgcggtgcgcggcaccgggcgcgatatctcacgcgccgcgcgagaagggttgtgcgtccgcagtcgcgaccgcacgtgcttgagcgcgctcgaaggacctcgccgcancgtaagagatatgctaccatagccacgtatgcatcgatgcgcgcaacgaggtgcctcacgctactagt

SEQ ID NO: 415743 - DNA, 995 bp, Homo Sapiens
  misc_feature (349)..(357): n is a, c, g, or t
ggaccggtccggattttcgaccggggacccggagctggttttcccaaaaagggagcctcacatacacaggtttcaactgggacggcactggctttgtgtcaacaggaaagtttctcagcttcgcggagtcgcggtcactctggcacggacagggcgagaactccctcgcggctcggggcgtgcggtgggaataacccgcgcctctggagccgggcggagagcagcgccagcccacacttggcctggcgaggaggtgactcaagaccttcgattcttctttcatctttgtgcgccctgtttttcggataagtctagacttgcagtgcctggggttgatcggtatgccgcnnnnnnnnnagcatcgactgttgcaaaggagcctcgtgctcttctcggatggggtggttctacgcctggagctcaacctgctgtggatcctcaggaatgtcactctcttccccgacgaagggagcgccacgatcttttcctccgcctggtggaaccctccctgctgcgggatgggagcaggtgactacccctcccgggtcttctggacacaaaagggggggcagttatggagaaactccttctgagcgtatgaaaaactttgaatgcgaaactggcaaaatcccccagattggtaaaggcgcgtctccgcggcctgggcataccccgcacaggaacggatgacattgaagcgcccaggggacgcactccacctgggacccacgcgagggggaaatgcgcgcctctggttgggtggagccgcccgggaggtggccgacagggccatctatgtgaccggacgcaagttgagcgaactagggagggatctggaagggccaccagcgtcagcaccccccagctcacaccatacctggatacgtgctagtagctggggcccgggatttcgacacataggctcggaacggacaagacgcgcggaccgaaccggttcatcacgatctctcgtgaccgggttgcgattccacgcc

SEQ ID NO: 415744 - DNA, 713 bp, Homo Sapiens
  misc_feature (323)..(369): n is a, c, g, or t
cttgggcactcagcacaccattattagggtccctctggtcaaggacatgcagttagcatgggaatgatgtagtagctgacactctgcccagagtgcctctggtgggttgatgctgcactttctaagaaaagaagccaagattgttcctatatgtgctggctctcctaacgttctatctctagctcgattcatattactattacgaaaatatgagacgagcgggacgacgtttgcaggtcgagtcgttcgtgtagagtgcattatggagagatgtgaccaaatccgtatcatttcctgaggaaaaaaatcttacaagatagaannnnnnnnnnnnnnnnnnnnnnnnnnnnnnnnnnnnnnnnnnnnnnnccacaattatattctcacagctgcgagacagcaatgaacagacatttctaattagtcacctaaaccattggtgcataactagctctgaacgcaggttaaagctgtgcctcggtgataagaacctggaaagccagatgtaataagtggggagtattaggggtttataaggggcgttcaccttaaggattttatcacactgaaactaccttaagtgttacataatttagtgacaaagggaagccacaccaggtgcccacaatgttccgggggacatgtcccaaggtgaaacgccttgttcctaagtggggagccacctttttattgacccatttacgcagtggtgt

SEQ ID NO: 415745 - DNA, 819 bp, Homo Sapiens
cggttccggaatcccccagaaccgtgagtcctcctgaggaagccgtcgggggcctggccctgttaggcactgtctcccagagtccccctttcccactagccgcctccgcgtagcccgagaccgcgtcaggagttgcgtcttcctggctgcgcctttttcgggactgtcccctgcgccgtccgccgcctctcactgtccccggagcgcgcgccacccgcccgcttcccacaggcggtttcacgcgggtccccggcgccgcgcgcggctccggccctggcgactcttgggacacccgagtagttgcgtgatagcggggctgtcctgaggattcggcgtgccaggttgagagcccgtcgcgtgccggggactcgcggccactgtcgcttcccgtccgcccctcttctcctgggatttggggaggtgggcgggaaagagaactggtcggcggccacccttgccgactcctcctcagcaggtcgcagttgaaaggtcatccttctagagcccactcccctggcccggcgggcaacggataggtctccaagtcccaccctctcacagcgctcggttctgttccactttagaacaggtcgcagttgccactacgtaaacaagctccccatagagagagtatttattcattccgattgctccgtcttttatctagaacagagtctggtacaatggctctcgaaatgtggtctggtgacctcagggtcgcctgagacccttctagggaattcacaaagtcaaaacaccattgataacgttctaacgtgttatttgccagttttaccctcattctgttggcacctgtca

SEQ ID NO: 415746 - DNA, 1510 bp, Homo Sapiens
gtacccgatgcccgggccggagccgcgggccagccgacgagtccttcgggcgagtgctgggggctttccggtcggggccgcaggcgcttccggagccgacgggcgagtgtgcgttccccgagcctggttctgctctgcggcgtctgacgcgcaggcggaccgcagaatctcgcagcatcagtagactccggggcgctgaacactggcatgcgacgggagtgattgcgctgtgtgcacgcgtttcagacgcgagataagactaaccctgtctaggcaagtacccgtaggagttggcataactcgagagatcaagttccgatgttgtgattgcagcctgggtgctcttgcaactgctgtcatgaactgaacagccctttatattgcacagaaggcttggatggttccctacacgtaggctcggtggcttttgcacacgatgttcatgctcaagtgtactgggtctacgagtccgtctcgtgaatgcgtcgctgcaatcccgacccctagccgttctcgcccgtctaccatacggttcgcctgcgtggcagtctcactcaagtgcccacttggaagaacgacacatgcatgaacccagagacacccattatggacaaattatctctatagaaaaaccttttaggaacctatagtaagtacgaggacgcaagcaggataagccaaggccgaatccaagatttgtggccttcgcaaaacaaccttcttgtagagcgacgaaattggcactttggaacatcactggaatgccccaaccatatggcaaagactatctgtagggcccggcaacaacccttgggctcttagtagcaacaacacatgttagcgcagtaggcttggacccaccaaggcccgggtggaatccaattatacaggtcgcattggatatcacatatcccttctcccaaccttagcgagccctgatcgctttaaatgcatagagttctctttctccaaggggatacagtgcacacggaccgttttctatcttaggggcctaaaggcacagttccaacctgtaccgccacccaagtgctataaggcactatattctccttaggcaccaaaattccttaacgcggttcggcaccggaactttaccaactgcggcaaacacgattggcgccactatctactgtgacacccatgttccatttgcacatgcactcacttctatgggctataggaacaagccgggaagacatcacaagcgtgtgaacgcaaaccgatcgaacaataacttaagctcattggacgagctaaggaacaagaaaagggagactgcggcctctatcgcccacttgggcccttaacagatgtggtactcccccaccaaacccaaccatccactcatagatcaccctgtcggacaatttaaccacatcagtgctcctgcaggtacccgccacttaatagagaacatgtaacggaacaccgacaactgcgacatgatatttctgctattggcacttactacagcgatagtgaggtcacc

SEQ ID NO: 415747 - DNA, 715 bp, Homo Sapiens
ggagatgttcagctgtggattcagaccattccttactagattcttccccacctgttcttggtcaccctcccatgctcaccaggctgtgagcagaagagcaatgtgaacatctatttaagaagaaaggcgtgagggaaagcatgaaaaatccaggataaaatcatcatcagggaaactcctatgatgctggaactggacaacagtgttttagatccctagtcatgcccattccttcctgtcctggaaaagttaaaatatgaagtgcctgtgttcactaaagcaaaaccttctgaaatagcttacatggatggattctttagaattggatgaaactctttggttacccccaaatttcttgaaacactcaaaacttccattagctgaggtgaagcctctagtggttcaggactgggttctacagcaagggttcttaactcagtccatgaatcttcccaggaagtctccaccaacaaaattcaggaagttgtgaatatcctgaaattttatgaaaagtgattggcttgtgtgaacatgctctttaactgggaagggaatctttagctttcagtaaatgtataaggtcttacagtttgctctgagggtactactgctccacatttctcaactacaaaattgaggtaatggatcctgaatcactttagtcacgcagagtagcctgtctttctgatcacgatgagaaattcaaaatgagccc

SEQ ID NO: 415748 - DNA, 851 bp, Homo Sapiens
ggaggcctcacaatcatggcagaaggcaaaaggcacatgttacatggtggcagacaagagagaatgggagtcaagtgaaaggggaaacccctcatgaaatcatcatgtcgtgagatttactcactaccacaagaaccgtatggggagaaccacccccatgatttaattatctaccagtaggtcccttccacaacacgtgggaattatgggagctacaattcaaggtgaggttgggtggggacacagccaaaccataacagcaaccaaataacctaaattccaaaaaggacaaccctccccacacaaccccctcaaaggcatagatcatatgcattgtttcacttttggcagaacacaagagaaagagacggctactgtaaaagtgagtaagaggaaaactcctagagttttaactaaaaggcctttaactgcaaggccaacgatggcctaatttggaatgtctgggggcctcagacagaatgggagtttacactttcttgcaaacacttttccttggggctccacagagtactcccaattaagaggaggcaaaagcaggagactacagaaagccatctctgtggtgtagggatgaaggaagtgatgatctgcagctgcagagagagaatgatgcagagaggcctttgtgcctgggagacaggacaaaggccttcccatttactcagacccttctcctttaagcctcaaaccagtgggggaggggcagaaaaccttctgatttcatacgtttctgaagggagattagaagtcagaccctggtgctggttagagggaggaaccctcctgtccccaggattgcaggcagagactcattgatgccggggaagggg

SEQ ID NO: 415749 - DNA, 1387 bp, Homo Sapiens
  misc_feature (435)..(558): n is a, c, g, or t
  misc_feature (597)..(606): n is a, c, g, or t
  misc_feature (691)..(1041): n is a, c, g, or t
gagggggggcggcgcacaccgacaaattacctccgagaggggagggccaacatacacgacacacgacccatatcgtttatgagagacagagagtggcgcccaacaagaagggaggagatgattctatatagtagagagagcgagacgagcggacgcagacaaatctaacaagaacgctgagtactcgagagtggagaagaacagaatggtagaaacgatggggagatattatatgtttgagaggaagaagaagacaccccacattcctttatgtaggagatggtgagaaactaagaaatattgtaggagggagaaaacaaaaaccccatctgagacgatatactatcagcgacgccctacgtgaaacggggtcaagtctatcgatgaagattattcgtaatgaaggtacgaataaaaaaggcggagggagagaannnnnnnnnnnnnnnnnnnnnnnnnnnnnnnnnnnnnnnnnnnnnnnnnnnnnnnnnnnnnnnnnnnnnnnnnnnnnnnnnnnnnnnnnnnnnnnnnnnnnnnnnnnnnnnnnnnnnnnnnnnntagagcacgcagagagcaggagagaacgaagaggaaggnnnnnnnnnncaagaagaaagagcaagaagaacgcgacccagagaaaacaacgacgatgagacgcaaaaggaacaggaaaacaagacgggagacnnnnnnnnnnnnnnnnnnnnnnnnnnnnnnnnnnnnnnnnnnnnnnnnnnnnnnnnnnnnnnnnnnnnnnnnnnnnnnnnnnnnnnnnnnnnnnnnnnnnnnnnnnnnnnnnnnnnnnnnnnnnnnnnnnnnnnnnnnnnnnnnnnnnnnnnnnnnnnnnnnnnnnnnnnnnnnnnnnnnnnnnnnnnnnnnnnnnnnnnnnnnnnnnnnnnnnnnnnnnnnnnnnnnnnnnnnnnnnnnnnnnnnnnnnnnnnnnnnnnnnnnnnnnnnnnnnnnnnnnnnnnnnnnnnnnnnnnnnnnnnnnnnnnnnnnnnnnnnnnnnnnnnnnnnnnnnnnnnnnnnnnnnnnnnngagaagaggacaaaacacccagcgacaaaacgagccaacgacaacaggaaagacaacagcaaggacaatagaacaacagaaaaagaagagacagaggatgagcagaatgaaaaagagagcatagcgagagacagacaacgagaagaaggacagcaaaaagaaaggaagaacgagaaaacaagaagacagacacaagggtacgagaagaaaggaaaagcgaaaagacgcaaggacacagaggaaaacacagaacgaggacacaaagcaggaaggaagagaacgagaacagacaagcgagacagagaacgacaggagcaggaaggaagagagaaacgaaaaagaacaa

SEQ ID NO: 415750 - DNA, 971 bp, Homo Sapiens
ggtccggattcttcgaattttccatttggttgctttttggagaacagatgtgagtgtcctggaggcctgagacataccaggggaccctcggctcctgatagaacagaacagatccaagcctgaagcaagtgtctgaggactcgtagtgggatgctcccgctcctctcaaagatcgatatcggggtatatccccaccaccacatacactcacaggtcccgggtacagacctcactgccctcagggaagccccacccctcctgagacactgggacattctcttctccccattcattctcttcccagctgtgttgtgaagaaagaggacttggcagagcaggaatgcgttctggctagtctgaggattgctagagtgtgccaagctcagatccatgtgccagggaccaacggtgagtgtgtggtgctccatgggagcagggagcatgtgggtgctccatgggagaagcagcagcactcttctatccgagcttcgtgggaatcctcccatgagcaggcagggcagcccctccctcaatgccagacctggacaggtataaataatggagccgctcctggtggggagccaggcaccagcaccactgcagctcgggagagtcccacctcagcctggaatttcactgtggcaggaagggagggattgtgttaggctcaccagggagctttcctgctgggcaccccacagaggcagttcccagggcttggtgggacatgttgctcagcttctcctctgggtgctgctttccttgtcagcagaaagacagtgcagggccccgccctgctgctctccccctcagaagaaaggacagtaaagctggctgcccctgacctcttctggaaaagcttgtgcagggaaatggagggaccttggtcagccatttcataacatggaagaaacccttttacaaaaccccctaggaaaaggggtgggtaatcccctccgggggaacacagg

SEQ ID NO: 415751 - DNA, 380 bp, Homo Sapiens
  misc_feature (135)..(135): n is a, c, g, or t
cggcaagtgttcctcccctccttaagggcggggaaactcgccacaaatggcagaaaaaaccttggtacacccagcgaaaagcggaaaacatccaaaccatccgggggtcctggtctgccgcgagaagggggggtntaagaaggcgactgttacaacactaggctcatatcaacggacatccgcccttccaccagtactatactcataccaatcatcttcactcatacctctccgccacataatacatccccccagcttaacactgcccgctccccctcagatcaagagccacactccgaatattatattctgctagtttcaactgagatacttccacccttgcgcgaagacctagagatattaaacgaccggaatgtaag

SEQ ID NO: 415752 - DNA, 1095 bp, Homo Sapiens
  misc_feature (127)..(159): n is a, c, g, or t
  misc_feature (335)..(479): n is a, c, g, or t
  misc_feature (561)..(600): n is a, c, g, or t
  misc_feature (715)..(754): n is a, c, g, or t
  misc_feature (826)..(837): n is a, c, g, or t
  misc_feature (972)..(983): n is a, c, g, or t
tcctcttctttttacaaatttgccatttattgaagaaaccggatcacttgtcacatacatgtacccacattctggaattttgctgattgcaccctatgatagtattcctgtattctggccatttccnnnnnnnnnnnnnnnnnnnnnnnnnnnnnnnnnaggtacagggaccactgcagtggagtcttgcagtggggcagacagattggcctcaactccctattctggctttccctatgagtcgggaggaccccgaccattgaactcacccgttgcgggaggcgggttcctggctccgccgggacgggcggtgggtcgcgtgcgaggagcggctnnnnnnnnnnnnnnnnnnnnnnnnnnnnnnnnnnnnnnnnnnnnnnnnnnnnnnnnnnnnnnnnnnnnnnnnnnnnnnnnnnnnnnnnnnnnnnnnnnnnnnnnnnnnnnnnnnnnnnnnnnnnnnnnnnnnnnnnnnnnnnnnnatcagtccccgtagatcaccctctgtcaaccatgacaccacatccccccggagacaccctccccgcgagagggacttcactnnnnnnnnnnnnnnnnnnnnnnnnnnnnnnnnnnnnnnnngtgacacacctccgccccgcaggcgcgcggacgcggccccgcctgcccgcgcgcccccaagcagctgcaccgaccacctgcgcaaccccgcagccgggactcgacccaccaacgnnnnnnnnnnnnnnnnnnnnnnnnnnnnnnnnnnnnnnnnacggccagcgcaccacatgcgatcccccactccgccacccaaagtccaccccccgccctctcgttcgcagannnnnnnnnnnngtccctgccgcgatcatgtggcgcgccgggtctcctcgctccatgacgatgacggactcggcctccctcacctacttcttggtagtgctggccctcgtgggcaccgtcggaccctcaaaccacaccacccttctnnnnnnnnnnnngaccacaaatcaccacactcttataactcctccagactgcaccgtcccgcccacctgagccgatccccctcacagtacccctccctccatggtcgccccaatggaggcccgg

SEQ ID NO: 415753 - DNA, 1065 bp, Homo Sapiens
  misc_feature (352)..(364): n is a, c, g, or t
  misc_feature (745)..(745): n is a, c, g, or t
  misc_feature (1021)..(1021): n is a, c, g, or t
ggtccggaattctcgggatataaatctgtgtaagtgagttagcgcacttttgggagggggaggctctcacttagtaggattctcaaaagggtctttaatcttaaaataagaaccagaggcctataggaagagaataatttagtcaggcagacttggctgattatgtgagtttcacaataagagacagatgcttaatacagtgatataataaaatctagtttctgagtctggaaggctgaaagccactccttgccccacagtcaagatactagtatctaaggagaaaaccagctgtcctcaaacagataaaatatacctctcaatgtctccacatggatgtatctggagtaannnnnnnnnnnnngaaatttctacctattatcaagcataattgtaaaaactaaaaagagttaatgtatataaaactataacatgcaatctacaaatcttagtggagttttcttaaactctaaataaatgaccatctactgtaataaacatgaattaaatgaccatctactgtaataaacacaaaataaatcacaaattacaatttacgttttgaatttgtaccataatgtaaagaagcaagaacactaccgtttcttacacatagaactactcctatcaataataaggaatactttctttctaaaggctatttgtgctttcaacatggacttttcagttcaaaattgggctatgagcacaggacagtgaagacacagaaaactctacagcctanatggagcagaaaatttcaagttatccaccaatcacttactgattgaagctagaaaattactaaataaatttcatgtccactaaagaagaaaacaggccacttgtggtggctacacaaacagaaagatgcaaactaccatatcactatggagactatgtttagatagttcttcaaggtactcactaacaattattggtaaaccctaaacatcatgtggtctatgcattatcctatattccaaatccatcccttgtaataatcccaaaatcaatgcgnattgaataattaaagttatccctaccttatttggtttgtgggta

SEQ ID NO: 415754 - DNA, 1095 bp, Homo Sapiens
  misc_feature (630)..(630): n is a, c, g, or t
  misc_feature (766)..(792): n is a, c, g, or t
  misc_feature (816)..(816): n is a, c, g, or t
cggtccggaatttccgggatcggcggagctgggctcccggccctccccaggcccaggctgcctcagttgccccaccatcttgccagggccccgtaaggacccctccagcagcgcccctgtcacccgcacacctctccctattgctcttctgagtgacactcgcccgaggccccacagaggggccaagccagaccctatgcgcagggctgctcctccagcctgttttgcccacgcgagctcccgcaccagcggcaccgtcccctctgggctcagcactctgcaggccctggggctctgcctagagcaggtgcggtctggccagtccagcggagagaggagctgaaggaggccaggatgtccagggccaggtgcggggccagagctggtcacagcgtggcagcggaggccctcgaagccctggtcccctgcctcacggtgaccagcaagcccgagggctccacaggcagaaggcggacccaggagggcagggaagccccgggtgaggaagcggagaggcccgggcctgcgcgctggagtgccaggggccaccctgtccgggcaggtgcggtcctcagggccgcctccaccccgcactgggctgccagcctgtccttcgcgcactcccaccgngacccgtccgtccaccggcctcggccttctgatccgctccgcccgccccgctcttgccccttagagtcacagcgatctatctgagctacggcaccgggcacaggccggagctggaggactcggggccttccccatnnnnnnnnnnnnnnnnnnnnnnnnnnnaaaggcacccgcggggcccctggnacccgcctcccccggggaatcctcccgcgaaggggcccctccccctctcagttccggaggtccctgagggcctccctaactgcggagcggagggagtaccgtcccgggattctccctcccgggataacctggtcgtactctccccctatcgacccctaacgcctacgattctctcgtggattgaagacaaggatggagcaacgaactgtaatgtcataagccactatcgctgcaaatcgtcggtgtgtcaacgactcaagccgtcatccagccaacaca

SEQ ID NO: 415755 - DNA, 1240 bp, Homo Sapiens
ctccaagagggggggagctgatattcgccttaccgacctcagatttggttttgccgcgccactaccaagctttaagacattaaaagaagtctacgtgtactttgaatattttagagaaagctttatcattttttaagatgccaagatgctgcctacgtttgcaaaagttgtctaagaattcaccatgagctatattttcttctggatctttgaccaaggtgatgtcagcttatttctggggaaggtgttgagctcttatacatgaaaatggatataggctattctctgggatgagtgtcatttcaatgctttataaatccatgaagctgcttgtctcataaagtacaactgatacaaattttggttggacatatacagaattttataaatgtattgccttagaatttctgggtggagacccaacctacctgacattgtcatgcaagaactataaagactaattagagctacaagctgcttaaattgtgcccttacatacagcagaacctggagaaggccatacttccaaggccgactttgagtccccataagcaaagacctactaacagataccctcttttttgctcattttcctcctaccaagaccaggcttatgccccccgcaactaaccctactaaaaataccctgacacaaaaaacctttccgtgcctggtctcaccaatgtgcatacccttcaaacaaccttttgttccattgcattataaatgctccttttctccactaaatttagaattctctgacaacttttcattaaacgcaccttggaattaccctccttcctggggcgttcccccttcacaacaggatggtcttttcctcggcacaaggctcctttggtattccaccccgccccaatggtttgcacgacgccttccccccgctttcccgggcagcagcagaaccattcaccccctccaccaggaccgacctaatcacccttcagtccgccgacaaaatccgtggaaaccaatatttccgccccccctcctcgcggccaccacatttctttcccccctcagcgcccctcctttcttccattcacaggcgcgcactccccctgaggtgcgtcctttcaccgcgcgcgactcctcgtgaacacacatgggttctacgaattccttcctccggggactttcgctcgtcgaccgggatcttctttgcccctcttgtgtgttgcgaaccacgctggtcacggaacgtcgccacttaagtggtacc

SEQ ID NO: 415756 - DNA, 1103 bp, Homo Sapiens
  misc_feature (941)..(949): n is a, c, g, or t
ggtaccggtccggaattttcgggatttctgatttgccctttccgagtggtcggtgtgagtctcagtctgcagtcttctgatgtaccctttccgagtggtcggtgtgagtctcactctgcagtcttctgatttgccctttccgagtggtcggtgtgagtctcagtctgcagtcttctgatgtaccctttccgagtggtcggtgtgagtctcactctgcagtcttctgatgtaccctttccgagtggtcggtgtgagtctcagtctgcagtcttctgacgtaccctctccgagtggtcggtgtgagtctcagtctgcagtcttctgatgtaccctttccgagtggtcggtgtgagtctcagtctgcagtcttctgatgtaccctttccgagtggtcggtgtgagtctcagtctgcagtcttctgatgtaccctttccgagtggtcggtgtgagtctcactctgcagtcttctgatttgccctttccgagtggtcggtgtgagtctcagtctgcagtcttctgatgtaccctctccgagtggtcggtgtgagtctcagtctgcagtcttctgatgtaccctttccgagtggtcggtgtgagtctcagtctgcagtcttctgatgtaccctctccgagtggtcggtgtgagtctcagtctgcagtcttctgatgtaccctttccgagtggtcggcgtgagtctcagtctgcagccttctgatgtacccttttccgagtggtcggggtgagactctgcaagcttctgaattgccccttcccaacggatcggggtgagtctcaatctgccaggctcggatggacccctctccgaacgggcgggcgtgagtctcccccctgcaaaacttctggcctaaccccttcccaatgggtcggggggggatctcagcccggcccctttttgtcttacaccttcccaaccgggcnnnnnnnnnctacactacccgcatactttgattccaccattcgttacgggcgaaccctctgcccacaccccgcggatcctggttccccccttcacacgagcgccgggaaacccccccgccccttttctctcttgcggagccacattatcctcgcgtttccggg

SEQ ID NO: 415757 - DNA, 1036 bp, Homo Sapiens
  misc_feature (177)..(526): n is a, c, g, or t
  misc_feature (569)..(623): n is a, c, g, or t
  misc_feature (850)..(896): n is a, c, g, or t
  misc_feature (999)..(999): n is a, c, g, or t
ttaagagaaacaagacatacttgaacaaagggggccctaatagtgaggcgcattataagctttggcactggaacgtcggttttacggcgtcgttgtctgggtaaaggtgctagggttggggatctttgaccaaggaaccgttagcttcgggggggtgacataattggtactgtcttnnnnnnnnnnnnnnnnnnnnnnnnnnnnnnnnnnnnnnnnnnnnnnnnnnnnnnnnnnnnnnnnnnnnnnnnnnnnnnnnnnnnnnnnnnnnnnnnnnnnnnnnnnnnnnnnnnnnnnnnnnnnnnnnnnnnnnnnnnnnnnnnnnnnnnnnnnnnnnnnnnnnnnnnnnnnnnnnnnnnnnnnnnnnnnnnnnnnnnnnnnnnnnnnnnnnnnnnnnnnnnnnnnnnnnnnnnnnnnnnnnnnnnnnnnnnnnnnnnnnnnnnnnnnnnnnnnnnnnnnnnnnnnnnnnnnnnnnnnnnnnnnnnnnnnnnnnnnnnnnnnnnnnnnnnnnnnnnnnnnnnnnnnnnnngttaggattaggggatggtatttcaaatttccccactaaacgnnnnnnnnnnnnnnnnnnnnnnnnnnnnnnnnnnnnnnnnnnnnnnnnnnnnnnnatcctggtttgggtcgagccctggctttaatggatggggccccacctttcggcggaaaaggtttcttttttctttcgatctgagaccgggggggcggggcgccccccttcttgcccgtgggttctcccctgcggggcgggcgcgccccccttctgtcttagacgagcaccgccccccttccctcgtgccggtttgcctctttccctgcgtctaccccggcctcctannnnnnnnnnnnnnnnnnnnnnnnnnnnnnnnnnnnnnnnnnnnnnncgctctctcgctgtttcggtggcttgtgattacgtgactcatctcattccgctgacctcccttctcgttgtcctcggtgcggcttttctgcgctccacttttncgcctctcgcatatttgcgtctgccgcacctcgcctg

SEQ ID NO: 415758 - DNA, 1045 bp, Homo Sapiens
  misc_feature (56)..(70): n is a, c, g, or t
gtgggggcggccaccgtagcgccccccccgccactaaacccctggaattggcgcgnnnnnnnnnnnnnnntgattctcgctggcacggtccggaattttccggaaagctcttcagcaggcatcttttgcggacatgcacatcattctacacaaccattacaccggaatagcacctaggaatgtcagaagagctccctgatatttagtagctgacccataaccacacttccccagcgatgcctgaaagttcttacagagctttttttgttttcctagataaggatgaaacaggatccaatgtgataccttttcccccatgacatggacttattgtagggccaggacccattttcctgtagaaggcccgagtcctggaaccgtgacgtgggctggctggcgctgggtgttttctgtcttgttcctttctcccttgtggggtctttgaactgaactgtgatctggaagctcagcgggaacacccggttcctccacgggaccacagccttagtgccgtggggggggcgtgaggactgggtctctccaatgtgaaggttcatttcctccctctgcaattagtaagtagtctgtaggggtgatcattccacacgctcgaaataaactgccccgcacaactgttcacctgatggttttagcgtccatcaatgatctttgcctgagttggcgatatccggattgtcaaggtggcccgcaaacccgaacaatctttctgtaagtattacccagtggtctggttaagagcagcattctccccactccttatcttttagtgtccgccccttgtggtcatgcgattttggttggttcacaatggtataaaccccgtggacaaaacctagccagaaaatggaaattaacattttcctgggggccataaaagccaaggagggacccccctttgccatggccacaatggtgcccccgaaaaacactggcttttgccggggcccccccttaattaacaaagaaagcctcccctctcaaattttaaccaaacaaccccacttttgaaaacaaaccccctcgg

SEQ ID NO: 415759 - DNA, 1338 bp, Homo Sapiens
  misc_feature (417)..(512): n is a, c, g, or t
  misc_feature (564)..(572): n is a, c, g, or t
  misc_feature (675)..(684): n is a, c, g, or t
aattttcgggatggctgcggggttttattagctgaggctggttgggcttttgattgtgtgtgttctgacgatgcgtggagcggtgtctgcatggcaagcagctgtttgtaaacagattgttggtgtgttcgggtgctgggggaggtggctggtgcagtggggcggggggttccctgcacagaacaagcactgggggtgggaaccacacggtgaaaaacctgttaagtgttgaggtcaacacaataaacccccctccccacatccatcccgtaacgcaccctagaaagaaatcccacagacgacccacacccacacctgaactctctctgtaatcaccacaccactgacaaccccctgaccaatgcattgccactgtacccccctgcccaacccacctgttcactaactctcaaaaannnnnnnnnnnnnnnnnnnnnnnnnnnnnnnnnnnnnnnnnnnnnnnnnnnnnnnnnnnnnnnnnnnnnnnnnnnnnnnnnnnnnnnnnnnnnnnnaacacctacaatagaatatctccttattcctacgcaccatacgcccaacacnnnnnnnnncccccacacaattcttaattaatacacccacccccccaataacacaacttctctcttccaacactcaattcccacccacctacccattgtttccaccacccannnnnnnnnnaacaacaccacttcaccgaccactccacacacccccccatcatacaccgcccttcacaaatacacatattgacccaccttacttccctcaaaaacatccacctcgtcgccattaccttgaccctatcatcaacgaaacccaaaacaaaaacacctatagactcaccacctttcgacccagcccacaaacaaaaataccactctccaataatataaccacaaaccccctcctaaaaatactgcctacaccatctcaaaccccccactcaaatcacccacctcaccacaatctaaccacctctatctctcacacaacccttcttatattatccacacaccactctaaacattctacattcatctcactctcacttataaaccttcatctacttcctacaccacgattttatatcaaccaccacacgatctattatatactattcactataacaagaacacaaaccctacgcttacatacaatcacatactcacctcgactccctctcctctcatgcacacacacgacaatcctcacacgaatacatcaattttctactctattctagcacatagcgccaactcacccacaccctaataaacactctatccacacagactccaatcttctcctaatcacccacctctcatctacccc

SEQ ID NO: 415760 - DNA, 520 bp, Homo Sapiens
  misc_feature (172)..(172): n is a, c, g, or t
  misc_feature (209)..(224): n is a, c, g, or t
  misc_feature (381)..(479): n is a, c, g, or t
taagccaccgcgcccttttatatttgtaaaaaaattataaaaaggaaaacccccacgtgttcaagaaacagcagattggttaaaatgaattacaaagcacccatattgttattttcagccattaaaaacttgtggagtaatatttagtgacataaaaatgtctgttaaatantaagagggtagaatatatcgtaaacactgatcatacnnnnnnnnnnnnnnnngtgattagaaagatacctgtttaaaataatcctttcaaaaatgtttaaaccggttttcaccggggtagggaaagaaaaattcagaaaccggtttccaattgggccaaaagggggaattttcaaaaaatttctggaaaccaaacacttaccttttttnnnnnnnnnnnnnnnnnnnnnnnnnnnnnnnnnnnnnnnnnnnnnnnnnnnnnnnnnnnnnnnnnnnnnnnnnnnnnnnnnnnnnnnnnnnnnnnnnnnccccccttcccccgggttttttttgcaacccgggggccccc

SEQ ID NO: 415761 - DNA, 1130 bp, Homo Sapiens
  misc_feature (237)..(362): n is a, c, g, or t
  misc_feature (728)..(728): n is a, c, g, or t
  misc_feature (761)..(761): n is a, c, g, or t
ttcaagatgggtgctgcggggaggctggtacccgaattgctgtactcacctttgcccacagctggaaattagtgcttcatgtgttaggccatgtgttttcacttcccctgcaccaggagtctccacacacctgggcgtgcatttatgctgtgggacgtgggagcagtggggaccatgtggacagagccacacctgtacctgggcaggaagcagagcggggaatgtgcttgggagtcnnnnnnnnnnnnnnnnnnnnnnnnnnnnnnnnnnnnnnnnnnnnnnnnnnnnnnnnnnnnnnnnnnnnnnnnnnnnnnnnnnnnnnnnnnnnnnnnnnnnnnnnnnnnnnnnnnnnnnnnnnnnnncaaaatggggctgtggtgatctactctgctagattctaggggttataattgacttcaggatggatcatgagtagctggttgcatctctgacaagctgaccatcctgcactgatccatgcaggctatttctatgacaaattggatttgctcccaaacagcccattcttggggaaatgcactgcatttcttcttttttgggtaaatgatacggcctcagatgtggactggctcctcacctggctgagccgggcgaagatgcaggaggacacgctcttcctggggtggctgtgctgagacctgccaggcccagctcactccagctacttcctcaggatgggaagcccaggtgaaggaggcacatcgggnaaagttttgggcattttatctctttccagagtnaagctccaatattgtagattcaaggaaggaattttgtttcatttcaggttgtggggtttttctacccaatataggtcagctggatctcacaagctattgttgccttctaaggcataaacctgtcgattctaagggaaattggattgttcctcctcatcgaaaaaaggggaaagtttctttgggggaaaagaaaccagaattgctaaaacgggtttaaggaaaggcctactccaaaagttaccttcccctgcctttggggggaaccaaaaatcctttaaaaacctgagggttcccccaagcttccctcttttttaaaagagggatttggttaaaacctcccaaatttaagaaaaaggggggcttttaaaa

SEQ ID NO: 415762 - DNA, 1337 bp, Homo Sapiens
  misc_feature (1002)..(1013): n is a, c, g, or t
  misc_feature (1071)..(1071): n is a, c, g, or t
  misc_feature (1113)..(1113): n is a, c, g, or t
agaatttcacaattccgatttggatagcgccaacaaaaaacgtttagatggctcacatttctgcagtctgtacaggaagcatagcagcatctgcttccagggaggcttcaggaagcttccaatcatgatggaaggcaaaatgggtgcaggtatgtcacgtggcaaaagccagagcaagagacgaagtggggaggtgctgcacacttttaaacaatcaaatcttgtgagaactcccaatcttcgatgacagctagagatggtgaagccactcatgagaaaccactcccatgatccaatcacctcccaccaggccccaactctaacaccggagattaattacatttcaacatcgagatttgcataggaacagacacgtaaactatatcccctatatacttaacagtacaatcactgggggataattctggtttcaccctttgaggaattgcccaactaccttcctccacagttacaccatttaccattcccaccagcagcaatactaaggtggccaagtttctccacacgggcaacaacaccaaccgagttacttcctcctaaaataaaagcccattctaccatggtacaaaagtggggaacctcattggcgggttttaccatcccttttgagcctgtttattggaccactttaacagtggcttttttttagaagaaagggcctcaagaatttgtggggggacaaaaagaaaggacgataccacgccccgttatccccgccgactttgggaaccacctcttaaatgccatgtcaaccccgcttttgccggagttcgcatacatgaggcccggtctctgtgtcctcccggccctataataaccgggcccgacagacctgcagccagacgccctccggtccacatagaggaagtgtgagcccgccatcagtgcgccctcacccttgcaccccccggtgtgtagcacgcgcctggacctgtttcaatcatacgattaccggcgacccacacttaatatacgttgcgnnnnnnnnnnnnttatcttcccaccctctgtgaccgtctgaacccccaacccagctcatgtcgcgcccantattctcttaagagctcctccaacaaccgctaatactatgtntgacacctcgccacgattgtggagccacgactgccataccactcgcttgacgactccctcctctcatataccgccagtcgctgatcctatccccgccgcgctcctcttctattttcaccgaacacccctccttcatcggtcccccaaccctccatctacatccaccacctgccgtgagcccccttttgcccttttcgtcaaacgcactcggcggttgtgccaaa

SEQ ID NO: 415763 - DNA, 840 bp, Homo Sapiens
  misc_feature (393)..(411): n is a, c, g, or t
  misc_feature (418)..(418): n is a, c, g, or t
  misc_feature (420)..(420): n is a, c, g, or t
  misc_feature (433)..(537): n is a, c, g, or t
  misc_feature (564)..(577): n is a, c, g, or t
aaataaaagtgaaaaagctaagattctgagatatggggtgactttctcaaggtaacacagctaggaaatggcagaactcggatttgaacccaaggctgtctaataaaatcaagcttctgtgcatttcatgctagtcttaacttcttccaaccttatgtcctgcctccccacccagatgatagctgcaggcatcctgtccttcgttatcttcaccttgtctcattcctcacccccaggcccagcagagtgctcgcccatgatgtccctagtgactgtggattcagtgggaccctttgcttgggtttctttggtcttccttatctgttcaccccagtaccttgaccgttggctcctttcactgccataacctctggcatcaaacatattcatccnnnnnnnnnnnnnnnnnnngaggcangnctcactctgtcannnnnnnnnnnnnnnnnnnnnnnnnnnnnnnnnnnnnnnnnnnnnnnnnnnnnnnnnnnnnnnnnnnnnnnnnnnnnnnnnnnnnnnnnnnnnnnnnnnnnnnnngaatgtgccaccctgccctaatttaannnnnnnnnnnnnngtaaaaaacgcaattttggcatggtgcctaggctgggcctaccaaacccccaagatttcagcgaaccacccggctttggctttcccaaagaattggggattacagccattgaacaccctgtgccccggcccaagggctttcacccctaaacctggggaaactaaattctgggctgtttggcacgcgctccaggacactttctccaacccccctagccatttttaaggggataaagcccttaccggaggggcacaaagcattgt

SEQ ID NO: 415764 - DNA, 1307 bp, Homo Sapiens
  misc_feature (69)..(115): n is a, c, g, or t
  misc_feature (602)..(646): n is a, c, g, or t
  misc_feature (835)..(925): n is a, c, g, or t
ggtccgaattctcgggatatgatctctctggtttcttctcacctgaatgttctttgagccttgcctacnnnnnnnnnnnnnnnnnnnnnnnnnnnnnnnnnnnnnnnnnnnnnnnctgtactaagcactatgaggattacctagaaagcatttctctttctctaagacttaaggcaaatatgtataaaagattaaatttatgtaacatcaataactaaaaaacatacaatgcattttaaatccaactaaagtacaggctcttcaaaagctattttctgtctctttatatattttcagccttaaccctgaacatctctcaattgcggctaaggtggtactcacctctcaggcggattttataacacttaacacctgcccctatgcctgccactcttcgccccttacaccgtatcttccatttaccccctcctttctacctaccaccgttactcccttcacggccctccttctactccccaccccatttcaaccccccatacagaacatcacccctctatcctacatcgccgccccttcctccctcccctcattcaccccactctaactataacttttccaccctacttctcaacaattacctnnnnnnnnnnnnnnnnnnnnnnnnnnnnnnnnnnnnnnnnnnnnnaaccatccgcctctcacacgcccaccccacacactcttccgaactcaacccaactacattccttctcctatatctcccccctaacctcccgtccccgtatctatatataccacaacgcatacccgaaccaccccccctacctctacccaccatcccacacatattctcacacccaaaccatagtaaaannnnnnnnnnnnnnnnnnnnnnnnnnnnnnnnnnnnnnnnnnnnnnnnnnnnnnnnnnnnnnnnnnnnnnnnnnnnnnnnnnnnnnnnnnngttctcttcgtctcaactttatcatccccccaacctactatacacgaattacccctcattttcatccctactttcaccctcttttaacaccacccttctataacgcaccgaccggctctctaatcaaatttcgaacccaccacttctgtacacgccgccaaacagacacttactcaaacaccccgacttcaaccccgcgatatactatattcccgcccctcccctccccttataacccaaatatcaccgctattctcagctacggcaacccgcaaaaccgctaaccgccccaaccgtcttcccgccaccgcacgtatctaccttttcctccatacacctcccataacgttagcactatgatcagccccacaccccctccctg

SEQ ID NO: 415765 - DNA, 1249 bp, Homo Sapiens
  misc_feature (67)..(67): n is a, c, g, or t
  misc_feature (260)..(317): n is a, c, g, or t
  misc_feature (527)..(660): n is a, c, g, or t
  misc_feature (683)..(782): n is a, c, g, or t
  misc_feature (833)..(891): n is a, c, g, or t
  misc_feature (955)..(983): n is a, c, g, or t
  misc_feature (1216)..(1216): n is a, c, g, or t
tggtaccggtccggaattcccgggatcttcatcctcaggggcccacaggtgccacaaggaggacgancacttctgagacccacaaattccaaccctgggccaggtgcgggtgcagctctcactgggaaaggccgctagtgtggccgcacatccaagctgagcaggtggctgggaggacaggtgggagggcttcctgggggaggcaacactaagcctggaaccactgcctgaggccttacgaaaaggcagcggtgggagtnnnnnnnnnnnnnnnnnnnnnnnnnnnnnnnnnnnnnnnnnnnnnnnnnnnnnnnnnntgcggaggccggtggaggcgcccaccttccaccgaacgcgatggcggcggcatcctgcgccccgaggtcccgacgcagcgcgcggagcagctctgcgaagccggccagggactgctccaccagttcccagctccgatgcgcccacactgcgcggactgcgcacctaatggcagcgacttcccgtaccaccgctgtggccacgcgccattnnnnnnnnnnnnnnnnnnnnnnnnnnnnnnnnnnnnnnnnnnnnnnnnnnnnnnnnnnnnnnnnnnnnnnnnnnnnnnnnnnnnnnnnnnnnnnnnnnnnnnnnnnnnnnnnnnnnnnnnnnnnnnnnnnnnnnaagtccacctcttcacattcatnnnnnnnnnnnnnnnnnnnnnnnnnnnnnnnnnnnnnnnnnnnnnnnnnnnnnnnnnnnnnnnnnnnnnnnnnnnnnnnnnnnnnnnnnnnnnnnnnnnnttatcgtcccctttctagactcgccaaaaaggccactgatcaccgaaatgnnnnnnnnnnnnnnnnnnnnnnnnnnnnnnnnnnnnnnnnnnnnnnnnnnnnnnnnnnngaatacccccttatataaccccgccctctcccgctaagctcccggcaccctcgctcaccactannnnnnnnnnnnnnnnnnnnnnnnnnnnntaccttaatccacaccgactcgtcctattccgctcccgcttccctccgccacatatcgaacgtacaaccctgcatatcctgcccaccctcctgctatgatctccccgcgacatattcccccctcccgccatcatctccgtccgtcgccacccgtcacgataccaccaccccaccacatcctcatcctccccaccaccctcacgccccacgactcatattctcatcactacacngcacatcacacgcgctccatccttgcctcctct

SEQ ID NO: 415766 - DNA, 1075 bp, Homo Sapiens
  misc_feature (231)..(288): n is a, c, g, or t
ggaattcttccgatcgccgagcctgaccgcgccgtctccggcgcgcctggcgctgtctggccggtcgcttggcccgggtggaagctatgagcgcgccgccagcggggctcctcggaggcggcggggcaggcccgagctgggctcctgtggccggggtgggaggagaagaggccgcgcggcacgggtgagtgcccaggtaggcgcgggcggggccgtctggacagctcccgnnnnnnnnnnnnnnnnnnnnnnnnnnnnnnnnnnnnnnnnnnnnnnnnnnnnnnnnnnggccacctactcgagccctgcatgtcagacttgggctggattctcagagagaagccttagcattctcatccaggccatctctgacctgccttcagatccccttccactttgctcatttccttgcaaggtctagggttatgacagagcttgccatgttcgcctttggcttccttagtaacagaaataagcatggaggggcttctgcagtgatctagccctgtcctaggcgccatgggagcttacagtggaaatgcaggaacattctccgctgcagagagtctgataacctcggtccttagatacacaaaaacaccccagtgtgctaatattacccagagcatcaaaaaggcatgcaaggatcaaattttgcatggttcctgctgagtgtaaaggaaagcactaagccattttctctgccctctagaagcttataatgtacagtcctatcacaaagcagaataaaaacatgaaacctataaatgggaatgccataaagtatttttatctctacaggttcattcatgcagagggcatttattgggtgactgcagtactgcaaaaggttgcaaaggaaaatggaagatctggtccctgcagggtggggagttttcattcttatttggaaataccagggcatttataccgtggaaaaaactagaatccccagcttgtagccaaagggatggaccttagtggggaaacacttttttttcttaaaaaagactttgtacccgggaatgaatgggggagggaccagggaaaggccaatttcagttcccattccagg

SEQ ID NO: 415767 - DNA, 1348 bp, Homo Sapiens
  misc_feature (746)..(796): n is a, c, g, or t
  misc_feature (921)..(921): n is a, c, g, or t
  misc_feature (1022)..(1022): n is a, c, g, or t
  misc_feature (1141)..(1141): n is a, c, g, or t
tatcccgccgtagtggcgggcgaccgggccgcgacgcccgcgctcttcctgccgcgcgggagcgggaccgggaattcttgcaaataagggggttcaggacggccgagttcccgcctgcgcttgcaccacccccaccccgccccgcgtccttcaggagagccggaaacgctcctacccctacttcgcttctgcacggccgcgagaacgcacctgtccagccccctgttcgctccgcccactcagcgcgcgcgggagcagctccaactttttcaatttgccgccatctttacggcggccgacttgccagcctgcctcgcgtccagggaggcggagctcaggtcacaccttggctgtaaagtgtcctaacagccacctacttatgattactgctttcctaccaataacctccccagcctgttgtgtggctcctacatcttgaacaacagcgaccaaggcatacatctgtaggacaccataatatgccgccccacaatatgcctccttggcctaaggattattctgagctagcgaccttttgagaaccctaagctatgaaaatagcatatgctaccccctttccaagagaacattctccccgggcaccacccccgcttgtggaagtgagggagcggtctccggcccatgccgtctccgggtccgataaaccgaccgagaccccttccacccccgggatcccgccccggcctgcggcaggggcaccgaatttgcctcccggccctggggannnnnnnnnnnnnnnnnnnnnnnnnnnnnnnnnnnnnnnnnnnnnnnnnnngcggctgttcccccgccgcttcttaccgccgctccgccgttgtccgttggcccccgccgccgaccttttaacccggcgggagccccagatccggcgccccgcggttcgagcacgtagcccacgcncactataccgcccattcccgcgcgctcgcccgcaccccctgttaccgccatcgcgccgcgccgtgttgacgccgcccctatgagctcgcgcgcgccctgtncgctgtacgccataatcattgcaccagtataatgcgatgtccccctctccgcgccccccacctacgcgtcgaagtacctgcccagcagaaatgagagtatctagctaccgcgcccgcgntaagtatgccccggaccctctctattttgccgcctcgcgatccgttgttcccgcttattccgccccccgctactgtttgcaccccgtaaatgttaccggccgaaatatgtcccggcagggaagaccatagcccgcgcgggggtaattttagttggtaccccccccgataccccgccacttcaaccagacgatcttctatgcgcacca

SEQ ID NO: 415768 - DNA, 1148 bp, Homo Sapiens
  misc_feature (656)..(927): n is a, c, g, or t
  misc_feature (933)..(1024): n is a, c, g, or t
gttgacatttgaatttaaatacatagactgcaagtgtcagcaattggaaagaagtactgcaacaatattcgcagatgaagtgctaaatgatttatgtttactagtggtagagcagcaattgcacagtttctcaccggcaatgtagttataaaacagactattctgtatatatagtatatggccatctgtgcaaggctcctgcacaagtatgtctactcctggtgcttcgaagagtatatatttgataggctaaacttctccatcatcacatagtgactgtgactgtaccatgccagaaaatccttgtaaataatctaagtaagtattgcctatttgctgtaaggaatgtgctcctattctagtatttattatggattactactttatgttctttccaattaatcaaattagatgtgctctccacctagatgcctgtgaggatcctttgttaatcaaggtcaattttggcattttgcaatagctcttaaatcatgttcttggacaaccataaaaccatgacaaatgtacacagcgtgtaaaaccgaataatttgcccacccccttgtaattgctgactttcaaatgtataagagaacaccggcacaacatgactctactctctttccaacccttcccctcattaattcccttaccgnnnnnnnnnnnnnnnnnnnnnnnnnnnnnnnnnnnnnnnnnnnnnnnnnnnnnnnnnnnnnnnnnnnnnnnnnnnnnnnnnnnnnnnnnnnnnnnnnnnnnnnnnnnnnnnnnnnnnnnnnnnnnnnnnnnnnnnnnnnnnnnnnnnnnnnnnnnnnnnnnnnnnnnnnnnnnnnnnnnnnnnnnnnnnnnnnnnnnnnnnnnnnnnnnnnnnnnnnnnnnnnnnnnnnnnnnnnnnnnnnnnnnnnnnnnnnnnnnnnnnnnnnnnnnnnnacattnnnnnnnnnnnnnnnnnnnnnnnnnnnnnnnnnnnnnnnnnnnnnnnnnnnnnnnnnnnnnnnnnnnnnnnnnnnnnnnnnnnnnnnnnnnngcccgccgctgtaaccctgtaatgaccattcttatatccggtcgacgacatctcccagatcatccaccccgcactgttttttcacacctcccctcaccatctccctccctttataccccctctt

SEQ ID NO: 415769 - DNA, 1100 bp, Homo Sapiens
  misc_feature (120)..(799): n is a, c, g, or t
  misc_feature (940)..(940): n is a, c, g, or t
  misc_feature (1016)..(1053): n is a, c, g, or t
aattcccgggatgtagtccagaggcctcctccactggcggcccgcgttggcatcagggggtgcaaacagtaacaacaaagcacgcgtgaggttcccgaccgtgtgtgagcagcctggccnnnnnnnnnnnnnnnnnnnnnnnnnnnnnnnnnnnnnnnnnnnnnnnnnnnnnnnnnnnnnnnnnnnnnnnnnnnnnnnnnnnnnnnnnnnnnnnnnnnnnnnnnnnnnnnnnnnnnnnnnnnnnnnnnnnnnnnnnnnnnnnnnnnnnnnnnnnnnnnnnnnnnnnnnnnnnnnnnnnnnnnnnnnnnnnnnnnnnnnnnnnnnnnnnnnnnnnnnnnnnnnnnnnnnnnnnnnnnnnnnnnnnnnnnnnnnnnnnnnnnnnnnnnnnnnnnnnnnnnnnnnnnnnnnnnnnnnnnnnnnnnnnnnnnnnnnnnnnnnnnnnnnnnnnnnnnnnnnnnnnnnnnnnnnnnnnnnnnnnnnnnnnnnnnnnnnnnnnnnnnnnnnnnnnnnnnnnnnnnnnnnnnnnnnnnnnnnnnnnnnnnnnnnnnnnnnnnnnnnnnnnnnnnnnnnnnnnnnnnnnnnnnnnnnnnnnnnnnnnnnnnnnnnnnnnnnnnnnnnnnnnnnnnnnnnnnnnnnnnnnnnnnnnnnnnnnnnnnnnnnnnnnnnnnnnnnnnnnnnnnnnnnnnnnnnnnnnnnnnnnnnnnnnnnnnnnnnnnnnnnnnnnnnnnnnnnnnnnnnnnnnnnnnnnnnnnnnnnnnnnnnnnnnnnnnnnnnnnnnnnnnnnnnnnnnnnnnnnnnnagaaattgggagccacttctcaacatccatcaaacgggttggaaggaaataaaaaaagtggggggacctattgcaccaaggggaatacttactggttccccccataaacaaggcacgcaattgaaacccaatcccccatgngattccggtccctttcccacaaaaaacggcatggcgaaccctgataaaccctttagtcccaaagtgccacctatcnnnnnnnnnnnnnnnnnnnnnnnnnnnnnnnnnnnnnnatactctggggggcgagagcttccaccttaatactcgatcaaatctc

SEQ ID NO: 415770 - DNA, 1127 bp, Homo Sapiens
  misc_feature (789)..(821): n is a, c, g, or t
gaattcccgggaagagagaagggtattccaggagaatattagtttggatgagggcacagaggcaggaagatggagcttagcttgagggaatggaggtcactggtgctgtgaatatttgcagacagccatatccagagctgagaggtgaaagaacagactggaatagttcttttctttttcactctcctaccttatttgcttttggtttagcaaggaggatcgaaagtaaaccaagagaaatggtggggggcagcagagggaggtgggagggaaactccaggatgagttatggtcagccaaaagaagctgttgaaataaaatgaccaagagttaatgcctttatagacgcagggatgcacagcctagatccccttcctctaaaggacttgctgcccatccactgaaagcttggtcagcagccagcccccagctatcggctctttcagggcctgccttgttgcaaagggccgcctccctgcaaagagctgccttgctcaaagagctgccttgcactaggtcatgctcttccccgtggcagcttgcatcctgtcacagagaggcaggggtgtgaaagcacagccatctcatttgctctgcaggacaatatccactccagagttcctgctagactggccaagaccttgttgccattcaacttctttcccattctactcgctccctccttccttcacaggtgttgagccctaatacaatttgcacccgaaattctgcttcattatctgtttctggagaacccacctgtaacattttcccagccagggctgaatnnnnnnnnnnnnnnnnnnnnnnnnnnnnnnnnnggtgctctctcctgaaaaaatggtatctgggaatggaaataaggaatgggtattttttaattacttttttcccattcaaaaaaatactgcccattcattttttaggcaatttggattttccaacccggggggcttaattaattctaaaaattggcccatttttcctttaaagggaaaatttttgttggccaaaagactttttaaaagggggaaaaatcccgccttttttccccccctactccccaaggggaatttttggccccctttttgaaagggggtaaaaaaaccaaatggttcaaaacgagg

SEQ ID NO: 415771 - DNA, 1104 bp, Homo Sapiens
  misc_feature (176)..(187): n is a, c, g, or t
ggtccggaattctcgggatgaaaaggtgtatgttccctgcctctgaagaaacaggtacaatcttgcataaaattgcttgttaacattgatctgtgcgtggaatcagtttgtgttgcagggaaatgaagcgtcctacacgcctgtgatcaaaatgaatttcatcatctcaaccttcnnnnnnnnnnnnaatgatagcaagacagtgtctggcagacaaaggaactggttgggagctgaaaataggtaatggtagcagcagggatttttaattggctggaagagacggcgaagatctggaaggtgaagccctagctcgtgctcctggctgagactaagcccaggtttcaggattaggaaggaaagctaaaccacctattgccacggaatgtagaaaccctggctttatttggcagttgttggcttctacaattcaattaaaaatatccccatcctccagagagttattttattcgtcagaattcataacatgctcaacaaaggtcaaggcgttttggcaaagtgcgatgcggctaagaaaatagaagagaaggaagctgatgcaggatctgccagtgttcctggtgatgtcatgaggacgaagaaactctcttttgagggggcctgggtagggctggctgccactcacaccttgagactcaggtacccaaagaactaagttcaaactacccttacaatttagaagccctgagctgatttttcttttgctgggctcggcagcatccctgtttgctggtgggtctcaaactgagtgatgcattgggattgcgtggcggggtttattaatgcacggattgctggggccccgagccgcagagtctgattcaatggggcctggaacggggaactgagaatttggctttgctaaccagcttcccagcggaaactgacccttgttgccccacgggaccaaccctttttgaaaaccccggcctctatgcccaataaacacggcgcggaaattaacgaataggcccgtggcaacaccttttattcccacctcctaaaggcactgtcctgggtgcgcctccttttgccttcccccttgttccatccgtgtgtcaccccatccctacctaaccccac

SEQ ID NO: 415772 - DNA, 1139 bp, Homo Sapiens
  misc_feature (128)..(276): n is a, c, g, or t
  misc_feature (333)..(415): n is a, c, g, or t
ggtccggaattcccgggatggtacaactccgttttctcaaggcctaggggacctcagcagttgcctctcttctttcctctgtgttcgtcattttatcaaattactggaagctgggagttgaggccaannnnnnnnnnnnnnnnnnnnnnnnnnnnnnnnnnnnnnnnnnnnnnnnnnnnnnnnnnnnnnnnnnnnnnnnnnnnnnnnnnnnnnnnnnnnnnnnnnnnnnnnnnnnnnnnnnnnnnnnnnnnnnnnnnnnnnnnnnnnnnnnnnnnntataaccgtctcataaaatgctgctctttttctgttcgtccagattttaagcattcnnnnnnnnnnnnnnnnnnnnnnnnnnnnnnnnnnnnnnnnnnnnnnnnnnnnnnnnnnnnnnnnnnnnnnnnnnnnnnnnnnnatgagatcctggagctaagaagatgacaggagcacagttactggatttattcagatactcaactacagttctcacgctctttctatattttctacttgcagaggggttttttccgcctctgattactctatcccacctggttatgcaatcacttccacccactaactgtccaaattcacaggagaattttcagacatcaccccacatacctttcctggtctcctaaatatatagaaagtgcattctgcaacacgatatcacatagatcagttgcctattgccacgataaggctacaggacaatcacaaaactacaatagattatagcaacccacattcagcttatgagtccatgaggttaaactgatctggctacaacagcaaggctaggcttcaattgggtaaacagatttgctggtttccgctcggcttgttcacaagtctgggggaccagtttggctggccctgggctgatcttagaccgcccagctccattatccacgaggtttacccaagcaatgcccctcctcggaaaggtgcaccaaaagccaagatggaccccaacccaaggagtgaaggggcctttttaaaggttcaactcctaatcatggcaagctccaaatccggggtgaaccacagcaagttgccctgggcaacccccaggggttaaataggaagggtaacaaaatgtgccttggcccccgtatctcacctgcccacacgca

SEQ ID NO: 415773 - DNA, 857 bp, Homo Sapiens
  misc_feature (325)..(375): n is a, c, g, or t
  misc_feature (472)..(507): n is a, c, g, or t
  misc_feature (576)..(584): n is a, c, g, or t
acagagggggactaaaccatgtttatgttcttgagctctatccctgacaggctctgcataccgtaagatccccaaccgcactctgttgcagcatggaactgcgaccccccttaccaactaacatatccaataatgattaccgaatcaccgccgtggcgccactaacgcctcctcccctgcacctaaccgctttttctcaccagtcctccccccctctagtgatttatcgaaccccctgcctccctcttcgtccccctatacgataccaacgacgagcgttggaagctttattcacacgtttcgccccccccaaaataaaattttnnnnnnnnnnnnnnnnnnnnnnnnnnnnnnnnnnnnnnnnnnnnnnnnnnncgacaccttactctcaatatctctcacgcctgcgctcaccacaacatgacccattagtcatgacccacactggtccgcgactacattttaactaatnnnnnnnnnnnnnnnnnnnnnnnnnnnnnnnnnnnngccactactaccttgtcttcataggccccgtgcgcgcccgcatattcttacacctttttgcgattccannnnnnnnngcataacattgactcattctttaacacccccccctcgagctattacttcattcatccacccaccccactgctcctcgcatcccttctccctccgactcccactatacagcaggcgatttatctattcgtcgttgacatcaaagactcattaaactccgtacgccaccctccccgccgtgcccaacaacctcatagctatatgtcgaatttacccatcttccgtccttacacaaacagcgtttgtgttttattaccccacgcctcgtatctatc

SEQ ID NO: 415774 - DNA, 1190 bp, Homo Sapiens
  misc_feature (156)..(156): n is a, c, g, or t
aggaaagaggcacaacacagatttatagaacctcaatcacggcgcaccgcagtgcgagggggaggagtgccaccattctaatatgcgctgggaccggtccggaatttcgggatcttccctccccaagccccaccccgcttcctgacattgcacatngcctgaaagaactaggcttcagataaaagaatgagaacacttgaatgaaaaaggaagacttggtccagagcccctggtgaatatgaaagaagtattggcctggactatctcccgcataattcacagctgctatcttgtcttcagaagtgaaacatcccttaccaatagtgacctaacttgtgaggactgcttgtgatagtatagttcccacccccaggacataagttttccctttccagttaacatgcctaatcccatgctatctttaagagcttgaaaatccttcctgacctgagctaggcttttattctaagggactgtgtatgtgaacatccccaccatctatgtttcctgttttcaaactcggtgccgttttgagtattttcagatgctcactgccagtaatggtttgttagtagctccaaactattagagaagagctcaggagtcagaatttgaaagatgccccatagggtgatttgagatttggaacaaggttatcacaataagttgggattgggggagttgacacaaccaggggtctgcttgggtggggcagctgtttcaaaaacccttgggtgaactcttaaagccctgaaaaccttaaaaaatgcttctgaaagagatctggaaaatcggcagttaaggacctcccaaaagaacctccaaagaaaaagcccaaccttaagccttttttaataccaattaaacctacaactttggggtgcctaaaactttccaccctttggcacatataacgcccccaaccaaggtcacgctccaaccgcggggccctatgccccgcgcctcttaaccccttacccctgatgatcacgggcagccccgccacttatccaaatgccgccgtccgcggcgatcgctgcaaatcaagcaatagtgatgaaggcactaccctaaaaaatgccaccgtcttccggtgtagccaaatattgccacacttgttgcccccagcatgcccgatgacccatccgaccgaacccctaaccaaacaaaccgacacgcgaggatacccg

SEQ ID NO: 415775 - DNA, 1596 bp, Homo Sapiens
  misc_feature (70)..(70): n is a, c, g, or t
  misc_feature (141)..(189): n is a, c, g, or t
  misc_feature (379)..(414): n is a, c, g, or t
  misc_feature (1060)..(1060): n is a, c, g, or t
  misc_feature (1314)..(1314): n is a, c, g, or t
  misc_feature (1440)..(1440): n is a, c, g, or t
  misc_feature (1519)..(1519): n is a, c, g, or t
  misc_feature (1531)..(1531): n is a, c, g, or t
  misc_feature (1541)..(1541): n is a, c, g, or t
  misc_feature (1555)..(1555): n is a, c, g, or t
acaaaacaaaaaccgcaccactccacggcacccttccatgaacaggacggatttttcaacaccggactgntttcaggcgttactgtggcctctggagtctgacgttggatttccaccctcgctctgccaccggctgtgcannnnnnnnnnnnnnnnnnnnnnnnnnnnnnnnnnnnnnnnnnnnnnnnncaagcagggtacataaaatcattattggaaaactgtgaaaaggatctagctagataccaggcatgtattgctcagaaatgatgaattatgaaccatttgtattataaataacctgaaatttcagggataatttattgttttacagggaattttaaacatataattctaaaaataaatttcgtaacatgtnnnnnnnnnnnnnnnnnnnnnnnnnnnnnnnnnnnngggcggccgcctctagagtatcccctcgaggggcccacagtttatgggtacacctcctttcccgtcgaccccagcagacataagctctacacgatctcgatcccttaccgcaataggacagcccaccctcaaacccgtctacgggcccagtaagagaagacaattaatgagcccatctcttgatacggtgccccgccgcggcacttacgcgcaatcccctttaaccgccccaccacattctcccaccacacatatttcacgaattgtcaccacttaatactactaccgcgtgccgcctcagtcgcatccgtggtatctactacaggatagaacccactacccgccctctttcaagagccacatccaacctcggctcattctcttatactttgcatccgctcacatcgtctttatgtgcgaaaggtagccgggccgcatgtcgttactatgcgagcactactgacacaccgtcatcgacgcccacagactacgcgatgtttacgtattctgcattcccgtcatcactagcagcttccaatattgtaatgtacgctacgcagctactcccaatgcacgcccgactcgcgccactaaccatcctattcttctcaccatccgtgtcctatagattcataagtcgccacgngacataacctctacgacgcgcacgagactaatgcatcgccgttctctcatcactccatcaacgatcttccgccaacctgcactgcgcaggcgctctcagacactagagccgccaatatgtgtgattagaattagctctcccttcagatcgttacactatgaacacgcgggcctcactatcgagattttccctccccgccatactcccatttccacccagctcgtccacggtctctctgtatagcctcacaagcnacgcgtgtcacaaaacgacaacagtatcgtagcctgacgcgtcgtctcataagtatgccactacacaaacacacaacaatggctctgctagcacgtcccacccctagctgcgtcgtagagctaaancaaaaccaaagggacctatcaagccctgttcgaaattataagagagcgcccgcgcgaccagaggcacgaggtaggcgcncactaccaccanaggtgcttangcggcgtaaatccnccttccctgacatagtctcaaagtgactgaacaccgccatc

SEQ ID NO: 415776 - DNA, 939 bp, Homo Sapiens
  misc_feature (400)..(401): n is a, c, g, or t
  misc_feature (481)..(481): n is a, c, g, or t
  misc_feature (736)..(797): n is a, c, g, or t
  misc_feature (818)..(895): n is a, c, g, or t
ggtccggaattcttgggatggagtgcccaccatgagatgctcctggtccacacaatggcatcttttgcctcaaactctccctatgtatattgatcttgtcacctctgctaggcttaagctccttgtgggaggaagcttcttgtctccttctgttttgaccccttgacacccctgataggtgctagtgaatcttgaattatgtctctgacttttgcagtctcagggaactcagagtccttaaagatacggttgggttttcttctttgaccaattttggcttctcctgttggaggaaatccctcccctcttgcttccatctatccagtgtccttcattgtcacagggtttctaaggagcaagagactcctgctcatctctcccagagacttggcttcttctnngaatttctacaagagtcagtctacagggtagtctattctaaggtgtcaagtccctttttaaaaacacatctgcatggtanggtataaagaggagatgagccggtaaagggggggataatctggggggttggatcctgaaaagccctttgtcttcttttgcactaaacgaaactggcctttctttttggggactcaaaataattttttgggggggtaaaggattgggggcccttaaaggggtttggggaaacaaggttgaaacacaagggtttggctttaaaaggcaaaactttgaaaatccccccaaaaggcccaaaccctggagttggggcccnnnnnnnnnnnnnnnnnnnnnnnnnnnnnnnnnnnnnnnnnnnnnnnnnnnnnnnnnnnnnnaaaaagcaccccccgaaaaannnnnnnnnnnnnnnnnnnnnnnnnnnnnnnnnnnnnnnnnnnnnnnnnnnnnnnnnnnnnnnnnnnnnnnnnnnnnncccccacttttctctaccccgggaggaggcctttctctccccac

SEQ ID NO: 415777 - DNA, 1170 bp, Homo Sapiens
  misc_feature (104)..(233): n is a, c, g, or t
  misc_feature (280)..(381): n is a, c, g, or t
  misc_feature (553)..(553): n is a, c, g, or t
  misc_feature (830)..(838): n is a, c, g, or t
  misc_feature (1102)..(1112): n is a, c, g, or t
cggtccggaattcttcgcggatctcggaaaaagcactcgtcactctccagaaaggccatgtggaacaaaagtcaggcctttacagttgtattgggttgaaaagnnnnnnnnnnnnnnnnnnnnnnnnnnnnnnnnnnnnnnnnnnnnnnnnnnnnnnnnnnnnnnnnnnnnnnnnnnnnnnnnnnnnnnnnnnnnnnnnnnnnnnnnnnnnnnnnnnnnnnnnnnnnnnnnnncaagccaagaaacaccatggatttgatcctctccagacccctgaagnnnnnnnnnnnnnnnnnnnnnnnnnnnnnnnnnnnnnnnnnnnnnnnnnnnnnnnnnnnnnnnnnnnnnnnnnnnnnnnnnnnnnnnnnnnnnnnnnnnnnngcacctcaaatcccgggtctgtccccgctggctttaccctgcttagtgatcccaggttttcagttctccatctgtaaaatccttgtttagtctttaagtgttctctgagcacctgccctagtgcccagaccctgtgctgggctcaggaagaagccggctgtcaggcaggatnttggggtggggcctctgcccctgggcacatgaaggggactgtggccttcaccctaccaggcacctatggctgtaccttcagactctagcccttggaaagtgtgtgactcagagcctgcagggcaagaccagtccaccaggggtccaagcacaccctttcccccctgcactgccgctttgggaagataaaaccaagaggccggccaacttggcaaaagcccgttgcttctaacaacccggggcttcctgggcctctacaatttgggcgcttccaaaannnnnnnnntttttccttttgggaaaagggagtggaaattttgtactttttttcccccacaagaaaggaatggaattaagttattggccaaccccccgagaaatcgcacgagggcaccctttcggtcccccttatatgggagaaaaaacgaccggcttgtagcaacccccaccgcgggcccttgcgatacttcctccccccgagctgtgctatgatactcccctctagtatcactcttgccgccctactacaatattctagagagacgttgannnnnnnnnnngaagtggtggccgcgatatccgaggcgccggcgtatctggtgccctgccctccaccaa

SEQ ID NO: 415778 - DNA, 1197 bp, Homo Sapiens
  misc_feature (721)..(721): n is a, c, g, or t
  misc_feature (946)..(946): n is a, c, g, or t
  misc_feature (954)..(954): n is a, c, g, or t
  misc_feature (1149)..(1149): n is a, c, g, or t
ggaccggtccggaattctccggatggcctgtttctcgaggaaacctaccagttagaaggaacccatgggaagaaacggccggagagctgtgaggccagccacagaagagccagttttggaatttcccaccaagggttcagcctactgctcgcccttcagcctctggtgcccggcggctcagctgggttctagggccacgcagggctctgcagtgtcactccgggagagggctgtgggggcagctgcaggcccggcgcgccgagtccacgcagcctgggtaggtcctgcatgggcccagaggtcgtggggctcagagaattgaaccacgtgggaggagtgtactgtggcgggggccccataggaagcccactgtcctggaggcactggggcggcgggggtgtggagcggctggcaggttcttggtagacgcagctggggttctctgctcctctgccctgcagccttggctcccagcgaggttggcaacaagcatctggactcctggaagtcttccagaggctgctcctttcaagtctcttcctaactggatgcacgtggggtcccccgcggtgcctcagcctcccctgcctttgatggctgggtattttgcacccaggctgctggcccctgagcacagggatgggctggagccacaggctgcagggaaagcgcatcaggaaggttcctggggcgtgcggttcccacacaggtgccgtccggngggcttcctggtcccctctgtcaggaaccctgagctccaggggactgtagacaaactgggccagaacctaaccccctgtgggccaaagctcttcactgcccagcagggatcctcttctttcagggaccccctgggaaaaggtggccatggggctcccggcttggggaaaaacttgggcccttggtcaaaggctcccaccaggcccttgagagttttgggaagganccccccgnccccagcgttgattagtcggcggccacccaggacgtcgacctacgctctacctggcggctataaccaccattttcttgtgtctgcgcacggtcgcaattcgcgcccaccagtgctccaccgagtctcgagcaggtcaagccccacgaacacgagtgaggtgactgctcgcataacactgcacaaaatacgcaacnttcagcgtacgacgggataacacccgcacgccgcccggcacctctgtt

SEQ ID NO: 415779 - DNA, 1088 bp, Homo Sapiens
  misc_feature (589)..(589): n is a, c, g, or t
  misc_feature (594)..(594): n is a, c, g, or t
  misc_feature (602)..(603): n is a, c, g, or t
  misc_feature (605)..(605): n is a, c, g, or t
  misc_feature (607)..(608): n is a, c, g, or t
  misc_feature (610)..(611): n is a, c, g, or t
  misc_feature (617)..(617): n is a, c, g, or t
  misc_feature (664)..(664): n is a, c, g, or t
aattcctgcgagacctgccttggcagcggggcttgccactacacaaggatgataaggtgctcagggcaaatgaggatgggttttgcttgctgtagagacttcgctgtgggaaggatcggctggacaggcaggcatggccttaggaccaaggaggccctcccacccttggcctctctctctctcagggatctgggctgcacagccaccccatgccttggaccacctggtctgacctgcacagaggcctggtgtggacattgcctgggtaacagccactgagatcctccagcctggacatgctgcccatactgtgtggaggggactacccagggatccggccagggtggagtgggtgaggcagacatagctgtgtttgggtcaggcggtgtcctccagccttcaggaatggagacgggtccatcgtgttcctcacaaactggagtctccaccttcttgacacttggggccccaccctgtgaagcaaggagaggagagtggtgccacagtagggccagtgcaggtgcgtgggcaactttgagtccttctgcgatgctggcgccccctcccctcctgctgggccgggccgggntgtgngggatgtnncncnngnnccctgncccggccccgcccagagggctgggccccaccccccgagtgagctaancccccctgcttggaactagcatggttcccacgccaccaccacgaaacttcggacaccctacgggaccctgtctcatgccacccaacgtccccgaaactcacacctctaccgccccatccgccaaatacccacaacacgacacaccacatagtgccggaaacctagcgtgtctcccccaaaccttcgtgcgccctacacccccccctcccgcgcctcaagactgataggtctatgagattaatacaacatatccactaacaaaccacacacccaccacaaaagagtaatcctcacagctatacagcatgttctcgcctgcacgtcacgaaccgccaccatctccactcacccccaccacacatcacaccttctattactaaactagcctatatctccaccctcgacacttttcaactattctagt

SEQ ID NO: 415780 - DNA, 1687 bp, Homo Sapiens
  misc_feature (1050)..(1050): n is a, c, g, or t
  misc_feature (1194)..(1195): n is a, c, g, or t
  misc_feature (1271)..(1271): n is a, c, g, or t
  misc_feature (1274)..(1274): n is a, c, g, or t
  misc_feature (1284)..(1284): n is a, c, g, or t
  misc_feature (1345)..(1345): n is a, c, g, or t
  misc_feature (1452)..(1452): n is a, c, g, or t
cccccgccctccgcgtcgcccgaccactcgctagctcacaacattataaaacattgttctctccgcggcccgggaattctttcgcgatcttgaccattcagctaagaggatgaatgtcatgtccacagcgaatacctactgcagcaaggctgtaggagactattggagaggaaggaccctgtgttccaacaacttgaccatgtttcccatccagggacctctgtgcagagagtggtggtgagcaagtatttccaactgggagcccccacagagtcagtggctggtctgtgcacttgttactggactcctagcactgtgcttggcttgtggtgggtactctacaaatgctgcatgcatatgtgcgtgtgccagtggactccagccttgtgatgctaccttcatctctgtgcccttgatagggcggttccagggttgcctctgcgtgagttcaaccctcgggtatttgagcagcacgtagcctcagcccagcattgtgctggctactggggcaatctaggcagcttataaaggctgggccttgccttgaagaagcttagagatgaggttaggcatttagcaccaatgcacgtctgggctcctgaatgccagaggagttcacgagatgggcccctcagtgacagcggcttgccactatgggaaggggcaggggccacccagggccatcctttctcaagcttcttggattgggactctcctttcccggcctgccccaacaaaaaagaccccgccccttgtgcgcttcccccatctctaatcttgtcccatcaaaacaaggccttgggacggctgcgcgcgagacctgctctggtgcgcacaatggggacagcggtccgggtgtccccactaatgcccactctacctgaccccacatgcataaaattggggcccagcgccgcgccccacacccgaacctctccactaacacctaccgcgatccccatctaactatttttaccccccccgaaaggactcccttaaccctcaattgggcggcggtctcgttgccgcaccgcccgccctacccacccnattccttggggggaattgaatagacggggaaacctcacacaccttttttgccgaggcccaaagctcccgcccccgtgtacctaacaaaacaacacaccgtcccctgcactaccttcccttacataccccaaacacccacccccnnccgtacctcccccggacgcgccccgcttcgaccgcgaggaatataatacgcggaggcacttaccatctatttcaanacnaccctgcctngacctccccaattaatacccccgctccactaagcctttcccatcacccaccacccacaatnactctcacacctgatgagacaaccgtcccagggcaattgacctttctcgtaaccccggcgccacatattcgagccggcatacccgtcccaataccccccgaactgancctgcaactaacttctcctattaatgtaattcttataaaatctaacgaagcatgctcatcgagccgctctgcctctgccgccgtaaccctcaacctccttcccctccccatccaacatactcaccacacccgtggcaacgtcgctatgccgtccgagtcggcgtactagtccaccccccgatccaccacccccttttcaaccacccactgctcaccagccctcctccctcccaca

SEQ ID NO: 415781 - DNA, 1219 bp, Homo Sapiens
  misc_feature (168)..(170): n is a, c, g, or t
  misc_feature (174)..(174): n is a, c, g, or t
  misc_feature (183)..(183): n is a, c, g, or t
  misc_feature (370)..(480): n is a, c, g, or t
  misc_feature (492)..(561): n is a, c, g, or t
  misc_feature (677)..(689): n is a, c, g, or t
  misc_feature (1028)..(1028): n is a, c, g, or t
  misc_feature (1092)..(1092): n is a, c, g, or t
aattcctgccatcaggggcccgctgactaccccaacagcctccgccgcgccctcggcgggctcaggtggctgcgacgcgctccggcccaggtggcggccggccgcccagcctccccgcctgctggcgggagaaaccatctcctctggcgggggtaggggcggagctgnnntccncccacaccngaacaggaactctaacccccagaaatagcgaccattctgaataacgagctatttacttcctgcagccagcacaagctgaaaacaactataacccagaaaatctacacaaccgcgaagatgaccctaccaaactaagccgaacaacaccaaatatataaaaacactattaaataagacacactgcacnnnnnnnnnnnnnnnnnnnnnnnnnnnnnnnnnnnnnnnnnnnnnnnnnnnnnnnnnnnnnnnnnnnnnnnnnnnnnnnnnnnnnnnnnnnnnnnnnnnnnnnnnnnnnnncaccacccaacnnnnnnnnnnnnnnnnnnnnnnnnnnnnnnnnnnnnnnnnnnnnnnnnnnnnnnnnnnnnnnnnnnnnnntaaaactaaagacaactcaaaacaactaaacacccctagatccactcatcaacgcaaaaaacagacactgaccaagctcacagcaccattaaaacaccccgagacaaatcaacacnnnnnnnnnnnnnttataacaatctacacaaccaaacaatatcaacacaactaccactacaaacaaatcatcttaacaaaacttcacacaacacacggaataaaccacaatccagtcataacataaacccaacaaagatagacccaacttactgtcacaactagcactaaacctaacaaccaacactcgcaaagcgacaacacatccccacaaaaagacaccactacaactccctagcaaacgaatcgtagcacacccaactcaaaccacacacaataacctccataacaccctcttcaaacatgaagataccacgttaaatctcagcacaaaccaaacaactaatcactcncaacataacaacatctatccctccaacactaaatacaaatactatcctacagtaaatacaatangatagaaaaatatatagaaccaatcaaaccaccattctaaatcaacccacacctcaccactccccaaaactccaccacaccatcgaataatcacaatagacgacatagcacaaaccaaaaataacaa

SEQ ID NO: 415782 - DNA, 1436 bp, Homo Sapiens
  misc_feature (247)..(247): n is a, c, g, or t
  misc_feature (1395)..(1395): n is a, c, g, or t
gattttcggatggcagctcgggagctcggccgtgccggtctggactgaccgcctccctccgcgcggccttggggacaggcgcccatctgctggggcctcccctccgtgcagggaggcgctcacgcttcgccaggccgagacctgaatccaaccccacacccgctctcccggagcggtgcggggtacgttccccgcgggcctgcgctgcctgcccgtaccgaaaccaggcgagaccccggggcctggntacaggggttcatcttcattcattctctcacccaaccggaggtgttttcttgtttccgaaatctctattcaaagcttcactataggaggtcattcaataaatttattctcgtccatggtaagtcatgttaataataccaaaatatatttattgccatcgctcacgctttataaataaactatgacagtaagggatgaatgatactactcgactccttgtgcctccctcatattccctatgccggcgctttgtgaatgcagaatgtacacttatatcgtcccctattattcaacctcaagaacagcgtttcaatgcactatccaattacccaacatcgaataagttctatacctaacatgatcgcaccaatatgaaagacatgtgtctcctcccctcttcattataactgaggtattcctacaccccttctattcactcaacccgccctcactgttatcaagttctgtgtcccatactcccccccctccttctagttgtgatactcactgaaccctgtacttcaccctcacttctcactcaataggatttcagatactatagatcaatacaccttcatggcccgatgatacagccacacacactactgcattatactctccacagacgacacaggtatttatatgagtttcccgtcctgcgctcccttcttcatctctactatcttctatcatctcctctatctgttattcgatgactcgcgcctccttattatttctaataactagaccgcatactattctcgtacgctcgatctaatatctctctttatgcagcggtctgatctcgtacatattacaaagctagcgtctatgtattcacataacaacaacatgttttacctactatactaccatactattcctacgcatcacccaccaaccgtgatattcccagtctacactgttcttattatctgcacgaaatatatactattcgtcattatctccgtcactatgtttatatctaatccatactttctagagactcttttatgtgatatagatgatcgacatctcttctttattctgcacatattcaacatgatatacagtatcttacattccgtctcggctcatcgtagtgtcttgtaataaaacgcgatgtgatatctctgatatccactctgnctatccgtcgctgtcacgccgtagtctctcactctcaacgg

SEQ ID NO: 415783 - DNA, 1507 bp, Homo Sapiens
  misc_feature (50)..(222): n is a, c, g, or t
  misc_feature (441)..(457): n is a, c, g, or t
  misc_feature (690)..(737): n is a, c, g, or t
  misc_feature (783)..(792): n is a, c, g, or t
  misc_feature (1005)..(1035): n is a, c, g, or t
  misc_feature (1077)..(1077): n is a, c, g, or t
  misc_feature (1357)..(1357): n is a, c, g, or t
  misc_feature (1460)..(1460): n is a, c, g, or t
ggtcccctttcggaaccccacctggtcacggagcggaattctttccatcnnnnnnnnnnnnnnnnnnnnnnnnnnnnnnnnnnnnnnnnnnnnnnnnnnnnnnnnnnnnnnnnnnnnnnnnnnnnnnnnnnnnnnnnnnnnnnnnnnnnnnnnnnnnnnnnnnnnnnnnnnnnnnnnnnnnnnnnnnnnnnnnnnnnnnnnnnnnnnnnnnnnnnnnnnnnntgatgtgatagaggctgttggttgttcctcaatatccaaatatccactctttccttcttccatgataatgagccttgacttttaggagggcacgtactcattcaatacaaagaccacattctcagcctcttttgagagcagaggtgactctatcattactttctggacaatggcatgtaatcataaacatggggcagtgctaaggtttggatgttccgnnnnnnnnnnnnnnnnngtatgaatttttacccgccaagtaacactcctcaccctgtcgcccccccatcgaattccatccctcttgcgactagccccgctctcactgactccggcctccctcccactctcccccgcctcatgcagcgcctgtatcttcgcgctcccccaatcaagctattttcccctaggccggccgccgtcgccgtctgtctttctcttcccggctccttcgtcgaccgctttctcgannnnnnnnnnnnnnnnnnnnnnnnnnnnnnnnnnnnnnnnnnnnnnnnatcgtctccactgtcctcccccctatatgttgcacacagaacccgnnnnnnnnnngcacgccacgcgcgaaccggcgctgcccccgccctacgtccagccccgaggcgtgcgtcctgtacgtgcctccccacttttgatcacaaacagacctgccccttctccgactagctacccctacgctatcgttctccagatccccccacacccatgccgcggagttatgatctactatccctccctcccgccataatattatcctaaccacannnnnnnnnnnnnnnnnnnnnnnnnnnnnnnaacataaccgactccctctccgcgacacgagtgatataattngaatcaaacatccatcccgcgccccctctccttttcacattcccctcccccgcccccacactttatcccgctgctccctcgtccctgtttatatcgtactgaatgcacagccgaccatacgacccccatccgtacatgcttagtcatagcagtctcccattaccctcatatgtctcctaatttcccggactccacacacatactaccccaatgctcattagctgccacaccacgcaccactatttgccgctcccgcaaaagtccgccaccccccccgctnttctaatccccttaggcccctacctaccgactaattgccccccaaaacctaattcccatacaacatacacatgcgcttaccaaatcaccctcctctccgaccnttgcccgctcctaaccgctgtgctaccttcttaaacctacccattgt

SEQ ID NO: 415784 - DNA, 1266 bp, Homo Sapiens
  misc_feature (257)..(511): n is a, c, g, or t
  misc_feature (513)..(575): n is a, c, g, or t
  misc_feature (810)..(818): n is a, c, g, or t
  misc_feature (833)..(891): n is a, c, g, or t
  misc_feature (995)..(1003): n is a, c, g, or t
aattcccgggatggcttctttctcgggggaaatgtttctgtaactgcctcattcaggaatgccctctgtgaacctaactttggaggcttaatctggcttggcgtcatcacacatatgttatatgttatattcaggagtaagactgactgcagatacagtcaaaaccattgtgatttgctaattctatttgagtaatcactctcaacagccagccacaggtcctggccacacttcagcctcatcagctagtgccactnnnnnnnnnnnnnnnnnnnnnnnnnnnnnnnnnnnnnnnnnnnnnnnnnnnnnnnnnnnnnnnnnnnnnnnnnnnnnnnnnnnnnnnnnnnnnnnnnnnnnnnnnnnnnnnnnnnnnnnnnnnnnnnnnnnnnnnnnnnnnnnnnnnnnnnnnnnnnnnnnnnnnnnnnnnnnnnnnnnnnnnnnnnnnnnnnnnnnnnnnnnnnnnnnnnnnnnnnnnnnnnnnnnnnnnnnnnnnnnnnnnnnnnnnnnnnnntnnnnnnnnnnnnnnnnnnnnnnnnnnnnnnnnnnnnnnnnnnnnnnnnnnnnnnnnnnnnnnnccagtgtgccagccactggtcatccaatggcccgccagcgcggtcagccagaccagtgcccagcccagccccattgcggtcctaccccccttggcggtccagctcaaggcccaggtttttttagccccacttgggtcccagttcaaagggaaaaggggggcccaaactctcacaacccccaacctgggtgtggttctaaccccgccaaaggggtgttttccagacgttccacaannnnnnnnnaagaaggggcgccannnnnnnnnnnnnnnnnnnnnnnnnnnnnnnnnnnnnnnnnnnnnnnnnnnnnnnnnnnccattcccctctaagctggggtcccctctcgcggtccccaaaagccttaaaacacccggtgtggagaaaatctctcgggggcccctaaaaaaatcccaaacttnnnnnnnnnccccccttgggcctcaccccctcttaacgctatgggggttccacaaatctaagaagggggggcttcaatctccccaccctttatacccatctctcgctaaaccgtgtggtccataagtatctggggctagaaaatccacagggggagccacgcgctccgaatccccaaggttaccccgtgggtgtagatctcacaaattcgtggcccaacaaagcacacgggggtcccacgtgcaataccccaaatggcgcaacgctcccttc

SEQ ID NO: 415785 - DNA, 1097 bp, Homo Sapiens
  misc_feature (696)..(696): n is a, c, g, or t
ggaattcctgggataagcagcattaatgagttagcggtggctacatatgccgtggtgatagctgctgtccagttgcccctccatgggcagaaacctgtgggagggtcagaccagactctttaagtcattcttgaggacaagtagaagggacgtgggcccccccaggatgttcaggtaactggcccatacccggagtcatcctggtgaaagtcaaggggagcaccatgatgtgtgcttcgggacggcggaggatctgccgtgttccctgtggcatgtccagcacctgctcactaccagtgctcaggagaccctcacgagtaagggaatggacaagatgtggtgaagaggagtccctgcaatctgcccttggactgggtgagccaccccagctcgctgagctttactttccttaggtttaccatatccaaagccaactgcagggctgtcaggaggatcagaaatactgtaacagacataatgcaataacatagatgactcttagaggtaaattaaaacagcactttatgcacagtacgatagcatattataaagctcaaaaacaaaatgaaaccatctattgtttagcaatacatgcccaagatacaaccctattaaaaaatcatgggaaggaacagcacaaaatctgagatggtcgtccctgagaggagtgtgggatgggataaggaaggagcccangaatttttaaaggtattggtaatatcttagctctcaggtttggtggtaggttcatgggtatttaagttataactcagttcctaactcacctaaggtgccacacatcccttttggatgtatcaaatattatgtccataaaattttaatttggggcatgcgggttccatgtttggaatccccagcactttggggaaactgtaggcaggaagaatcccttgaaaccccggaatttcttagaccaaccttggggcaaacttgaacaaaaaccctgtcctctcacaaaagaattcccccaatttatacctgggcacatggggggggcacttcccccttgacattcccccagtttaccttctggggagggtaaaaggggggtggaagggaatttgtcttttgagaac

SEQ ID NO: 415786 - DNA, 1065 bp, Homo Sapiens
  misc_feature (189)..(484): n is a, c, g, or t
  misc_feature (492)..(791): n is a, c, g, or t
  misc_feature (793)..(796): n is a, c, g, or t
  misc_feature (799)..(799): n is a, c, g, or t
  misc_feature (801)..(801): n is a, c, g, or t
  misc_feature (805)..(806): n is a, c, g, or t
ggaattcttgggatctaacccgatgactgcaggagagaaagagccaacaaaggaatgaggaagctcttcctgcaccctagtgaacaggctgactttctaattatctgtggactgtgaatctctgcctttgtagatctggagtcaaagctgccacctaaacaaccagaaggaaaggcaccatcttacacnnnnnnnnnnnnnnnnnnnnnnnnnnnnnnnnnnnnnnnnnnnnnnnnnnnnnnnnnnnnnnnnnnnnnnnnnnnnnnnnnnnnnnnnnnnnnnnnnnnnnnnnnnnnnnnnnnnnnnnnnnnnnnnnnnnnnnnnnnnnnnnnnnnnnnnnnnnnnnnnnnnnnnnnnnnnnnnnnnnnnnnnnnnnnnnnnnnnnnnnnnnnnnnnnnnnnnnnnnnnnnnnnnnnnnnnnnnnnnnnnnnnnnnnnnnnnnnnnnnnnnnnnnnnnnnnnnnnnnnnnnnnnnnnnnnnnnnncccccagnnnnnnnnnnnnnnnnnnnnnnnnnnnnnnnnnnnnnnnnnnnnnnnnnnnnnnnnnnnnnnnnnnnnnnnnnnnnnnnnnnnnnnnnnnnnnnnnnnnnnnnnnnnnnnnnnnnnnnnnnnnnnnnnnnnnnnnnnnnnnnnnnnnnnnnnnnnnnnnnnnnnnnnnnnnnnnnnnnnnnnnnnnnnnnnnnnnnnnnnnnnnnnnnnnnnnnnnnnnnnnnnnnnnnnnnnnnnnnnnnnnnnnnnnnnnnnnnnnnnnnnnnnnnnnnnnnnnnnnnnnnnnnnnnnnnnnnnnnnncnnnnccncnccanncaccgatgttggaatcagaaaatgtacgccggggaaaccagggataaaagatttctccttgcccctgaaagctccgcctcttccaaagttccgggggaaccttggtacaaccacggcccgaaatggtctcccttcctggcctgcacccccaaccctgtgggccaaaagggtggctctggaagagccccccttctctttaacaggccccaccgaactcagtggaaacttgcggccctttggctggtttttggagaacctc

SEQ ID NO: 415787 - DNA, 993 bp, Homo Sapiens
  misc_feature (607)..(607): n is a, c, g, or t
  misc_feature (772)..(772): n is a, c, g, or t
  misc_feature (780)..(780): n is a, c, g, or t
  misc_feature (786)..(786): n is a, c, g, or t
  misc_feature (803)..(803): n is a, c, g, or t
aattcccgggatggagcagagctttgtggcagggctgggggttggggtccactttagttttgtggcaggatgaaggctgcagtggttttattaatcatgattggcctggccgtagctccaggctgagagggacaggtttgtcagtggtggtcccccagatgtccctgtgcccagccctggcctgtctgccctcaggcccagcaggaggcgctaccacaggctctgactggcgtccctactccctgtaccccagatggacagaaccttcgggtctacagtcggaatatatcattctccccattttaacctgagctgcctgacacacggagggtgtgctgggtaaggggcctagggagccagggttgaatcatggatcctggggaaaggttgcagacacaggaagggttgtctcctctctgtggagccctgctgcttaccacacagcaccttctgcagagactagctctgagggtggcaggggaccccacaggccatggccactccctctctgcacctgtccgtgcctgctgtggaagcctggactgggggaggagattgctaccctgtgagcctgagggagccacgtccagctgtgacctctacctgnggctttacagagagttgtttatgggtaacagacaccttgtttcagagggaatgggcatgagctggcaagtgaagcacccccacagcttatcaggaactctttctcatttttaaccatcatgtcttcatttcacattggaataaagtgacgttttggaacctgccntcgccccncctccntcccacctttattacanaccggccggcatactccagaagctcccccgcgggccactaatctctcccggcgaccacccttccccggtaaaaaggggctctcttacccataacaccgaattataaggggtgggcccttgtcatatcactttcttcccgcggccgcgcccgttttacatccctttccccttcggtctctttctcgtgcag

SEQ ID NO: 415788 - DNA, 702 bp, Homo Sapiens; identical to SEQ ID NO: 231380
  misc_feature (50)..(308): n is a, c, g, or t
  misc_feature (313)..(470): n is a, c, g, or t
  misc_feature (478)..(516): n is a, c, g, or t
  misc_feature (535)..(653): n is a, c, g, or t

SEQ ID NO: 415789 - DNA, 1068 bp, Homo Sapiens; identical to SEQ ID NO: 301383
  misc_feature (407)..(463): n is a, c, g, or t
  misc_feature (823)..(832): n is a, c, g, or t

SEQ ID NO: 415790 - DNA, 981 bp, Homo Sapiens; identical to SEQ ID NO: 231384
  misc_feature (701)..(741): n is a, c, g, or t
  misc_feature (790)..(839): n is a, c, g, or t
  misc_feature (928)..(928): n is a, c, g, or t

SEQ ID NO: 415791 - DNA, 919 bp, Homo Sapiens
ggtgtttacagcgccttgtgcagccttagattttaatattcttttgtcattgttacatctcatagagtaaagctcttattaccttgatcctgagtcaaaaatcccacctgaaatcaccttttttcccccttgatcaaacatcccatccttcagctaccatactgttgctacagggattttgtggactgtggcccctgtcccgaggttggcaccttcagttcagcacagcctgagcagtgagaatgtctgaaaggagagtatataggtaagatccttgagaaagggctgactgaggaactgacctcttagagatctcaggatctttacgacaacaagttaggttcctactgtagttacctgccagaatgcgcctcttaattaactcaggtaatgaagagctaactgcgttataatcatcttgcttttgcctgaatttggagagagtattataattaagttcccagtatcagagatgtccttacataagattaaaatatcttgatgactaataccattctatgagaaagagtatttatatgccccgactgtattcatttacttttagaaactagtggtttgaagtaattgcaaaagacttttcaaattcataaaagctaagggtgcgattaacattttgcctactttaatttactaggaattattttgaaagaatttttggtttcttggaaggtattggcttttagggagggattaagacttttccccgaatcaaaattaagaacttatcacaagtgggagttttatatttggaaaagtttggaagcccttaccccccaagatctgttttttatagggtattggacggcaaaaaaacaaagttcttaatagggcaatttctccgtgagacggggtatccgttatatacacccctcaccaaagagactgctccctcccaaaa

SEQ ID NO: 415792 - DNA, 727 bp, Homo Sapiens; identical to SEQ ID NO: 231385
  misc_feature (118)..(133): n is a, c, g, or t
  misc_feature (163)..(167): n is a, c, g, or t
  misc_feature (202)..(202): n is a, c, g, or t
  misc_feature (233)..(241): n is a, c, g, or t
  misc_feature (247)..(266): n is a, c, g, or t
  misc_feature (273)..(273): n is a, c, g, or t
  misc_feature (281)..(285): n is a, c, g, or t
  misc_feature (298)..(299): n is a, c, g, or t
  misc_feature (303)..(306): n is a, c, g, or t
  misc_feature (310)..(322): n is a, c, g, or t
  misc_feature (328)..(338): n is a, c, g, or t
  misc_feature (344)..(345): n is a, c, g, or t
  misc_feature (347)..(348): n is a, c, g, or t
  misc_feature (350)..(351): n is a, c, g, or t
  misc_feature (369)..(369): n is a, c, g, or t
  misc_feature (409)..(411): n is a, c, g, or t
  misc_feature (444)..(444): n is a, c, g, or t
  misc_feature (450)..(450): n is a, c, g, or t
  misc_feature (477)..(489): n is a, c, g, or t
  misc_feature (493)..(493): n is a, c, g, or t
  misc_feature (496)..(496): n is a, c, g, or t
  misc_feature (528)..(528): n is a, c, g, or t
  misc_feature (531)..(542): n is a, c, g, or t
  misc_feature (556)..(556): n is a, c, g, or t
  misc_feature (585)..(659): n is a, c, g, or t

SEQ ID NO: 415793 - DNA, 289 bp, Homo Sapiens; identical to SEQ ID NO: 301387
  misc_feature (138)..(156): n is a, c, g, or t

SEQ ID NO: 415794 - DNA, 208 bp, Homo Sapiens; identical to SEQ ID NO: 301390

SEQ ID NO: 415795 - DNA, 1114 bp, Homo Sapiens; identical to SEQ ID NO: 231395
  misc_feature (362)..(362): n is a, c, g, or t
  misc_feature (729)..(729): n is a, c, g, or t
  misc_feature (810)..(810): n is a, c, g, or t

SEQ ID NO: 415796 - DNA, 212 bp, Homo Sapiens; identical to SEQ ID NO: 301394
  misc_feature (159)..(167): n is a, c, g, or t

SEQ ID NO: 415797 - DNA, 919 bp, Homo Sapiens; identical to SEQ ID NO: 231402
  misc_feature (183)..(183): n is a, c, g, or t

SEQ ID NO: 415798 - DNA, 1092 bp, Homo Sapiens; identical to SEQ ID NO: 231405
  misc_feature (60)..(242): n is a, c, g, or t
  misc_feature (554)..(554): n is a, c, g, or t
  misc_feature (667)..(667): n is a, c, g, or t
  misc_feature (692)..(692): n is a, c, g, or t
  misc_feature (849)..(849): n is a, c, g, or t
  misc_feature (880)..(880): n is a, c, g, or t

SEQ ID NO: 415799 - DNA, 741 bp, Homo Sapiens; identical to SEQ ID NO: 301397
  misc_feature (142)..(166): n is a, c, g, or t
  misc_feature (181)..(410): n is a, c, g, or t
  misc_feature (572)..(572): n is a, c, g, or t
  misc_feature (655)..(655): n is a, c, g, or t

SEQ ID NO: 415800 - DNA, 883 bp, Homo Sapiens; identical to SEQ ID NO: 231406
  misc_feature (342)..(494): n is a, c, g, or t

SEQ ID NO: 415801 - DNA, 507 bp, Homo Sapiens; identical to SEQ ID NO: 231410
  misc_feature (231)..(244): n is a, c, g, or t
  misc_feature (341)..(369): n is a, c, g, or t

SEQ ID NO: 415802 - DNA, 746 bp, Homo Sapiens; identical to SEQ ID NO: 231413
  misc_feature (91)..(273): n is a, c, g, or t
  misc_feature (481)..(564): n is a, c, g, or t
  misc_feature (574)..(575): n is a, c, g, or t
  misc_feature (661)..(661): n is a, c, g, or t
  misc_feature (667)..(672): n is a, c, g, or t
  misc_feature (687)..(702): n is a, c, g, or t

SEQ ID NO: 415803 - DNA, 1313 bp, Homo Sapiens; identical to SEQ ID NO: 231416
  misc_feature (136)..(177): n is a, c, g, or t
  misc_feature (768)..(768): n is a, c, g, or t
  misc_feature (1220)..(1220): n is a, c, g, or t
  misc_feature (1225)..(1225): n is a, c, g, or t
  misc_feature (1296)..(1296): n is a, c, g, or t

SEQ ID NO: 415804 - DNA, 610 bp, Homo Sapiens; identical to SEQ ID NO: 301403
  misc_feature (126)..(154): n is a, c, g, or t
  misc_feature (595)..(595): n is a, c, g, or t

SEQ ID NO: 415805 - DNA, 550 bp, Homo Sapiens; identical to SEQ ID NO: 301404

SEQ ID NO: 415806 - DNA, 443 bp, Homo Sapiens; identical to SEQ ID NO: 301405

SEQ ID NO: 415807 - DNA, 867 bp, Homo Sapiens; identical to SEQ ID NO: 301406
  misc_feature (614)..(668): n is a, c, g, or t
  misc_feature (688)..(712): n is a, c, g, or t

SEQ ID NO: 415808 - DNA, 435 bp, Homo Sapiens; identical to SEQ ID NO: 301407

SEQ ID NO: 415809 - DNA, 300 bp, Homo Sapiens; identical to SEQ ID NO: 301408

SEQ ID NO: 415810 - DNA, 323 bp, Homo Sapiens; identical to SEQ ID NO: 301409
  misc_feature (292)..(292): n is a, c, g, or t

SEQ ID NO: 415811 - DNA, 537 bp, Homo Sapiens; identical to SEQ ID NO: 301410

SEQ ID NO: 415812 - DNA, 592 bp, Homo Sapiens; identical to SEQ ID NO: 301411
  misc_feature (171)..(231): n is a, c, g, or t
  misc_feature (312)..(497): n is a, c, g, or t

SEQ ID NO: 415813 - DNA, 485 bp, Homo Sapiens
  misc_feature (96)..(104): n is a, c, g, or t
  misc_feature (122)..(139): n is a, c, g, or t
ggcagctttgtcattctgcttaagttgacaaactcatcaagttacagaatctttagcatatgcatactctatatgagtcaagagctgaccttttcnnnnnnnnnttatactttgacagccgnnnnnnnnnnnnnnnnnnaagcaacataagacattttaaataacaatatataaatttctatcctgttgtttttaaaactagaaacagggcaattaaataatcattcaatatatgggcaaaaggattccaccttatctttccctcctgccagtggtgcagaaagtggtcaagggagagtggtggatgaagagggataggggagacacagcccttgggaggggtcctctgtctacctggacttgatcaagctgcagtatgactcatcccggcatcggtgacattgcactggggattcctgaaatctcatacagttttccatgaatgattttggtttccatccagcagttcttatcattgatataaa

SEQ ID NO: 415814 - DNA, 187 bp, Homo Sapiens; identical to SEQ ID NO: 301414

SEQ ID NO: 415815 - DNA, 792 bp, Homo Sapiens; identical to SEQ ID NO: 301415
  misc_feature (395)..(491): n is a, c, g, or t

SEQ ID NO: 415816 - DNA, 232 bp, Homo Sapiens; identical to SEQ ID NO: 301416

SEQ ID NO: 415817 - DNA, 768 bp, Homo Sapiens; identical to SEQ ID NO: 231432
  misc_feature (130)..(166): n is a, c, g, or t
  misc_feature (631)..(631): n is a, c, g, or t

SEQ ID NO: 415818 - DNA, 247 bp, Homo Sapiens; identical to SEQ ID NO: 301418

SEQ ID NO: 415819 - DNA, 818 bp, Homo Sapiens; identical to SEQ ID NO: 301420
  misc_feature (612)..(613): n is a, c, g, or t
  misc_feature (615)..(615): n is a, c, g, or t
  misc_feature (636)..(636): n is a, c, g, or t
  misc_feature (716)..(716): n is a, c, g, or t

SEQ ID NO: 415820 - DNA, 318 bp, Homo Sapiens; identical to SEQ ID NO: 301421

SEQ ID NO: 415821 - DNA, 292 bp, Homo Sapiens; identical to SEQ ID NO: 231436
  misc_feature (114)..(173): n is a, c, g, or t

SEQ ID NO: 415822 - DNA, 276 bp, Homo Sapiens; identical to SEQ ID NO: 301423

SEQ ID NO: 415823 - DNA, 427 bp, Homo Sapiens; identical to SEQ ID NO: 32812

SEQ ID NO: 415824 - DNA, 445 bp, Homo Sapiens; identical to SEQ ID NO: 32813

SEQ ID NO: 415825 - DNA, 829 bp, Homo Sapiens; identical to SEQ ID NO: 231446
  misc_feature (50)..(268): n is a, c, g, or t
  misc_feature (270)..(362): n is a, c, g, or t
  misc_feature (417)..(493): n is a, c, g, or t
  misc_feature (526)..(585): n is a, c, g, or t
  misc_feature (767)..(767): n is a, c, g, or t
  misc_feature (802)..(802): n is a, c, g, or t

SEQ ID NO: 415826 - DNA, 295 bp, Homo Sapiens; identical to SEQ ID NO: 231447
  misc_feature (49)..(183): n is a, c, g, or t
  misc_feature (187)..(211): n is a, c, g, or t
  misc_feature (213)..(215): n is a, c, g, or t

SEQ ID NO: 415827 - DNA, 523 bp, Homo Sapiens; identical to SEQ ID NO: 32814

SEQ ID NO: 415828 - DNA, 687 bp, Homo Sapiens; identical to SEQ ID NO: 231450
  misc_feature (48)..(149): n is a, c, g, or t
  misc_feature (193)..(223): n is a, c, g, or t
  misc_feature (243)..(255): n is a, c, g, or t
  misc_feature (268)..(329): n is a, c, g, or t

SEQ ID NO: 415829 - DNA, 800 bp, Homo Sapiens; identical to SEQ ID NO: 301435
  misc_feature (184)..(421): n is a, c, g, or t
  misc_feature (744)..(744): n is a, c, g, or t

SEQ ID NO: 415830 - DNA, 611 bp, Homo Sapiens; identical to SEQ ID NO: 32820

SEQ ID NO: 415831 - DNA, 428 bp, Homo Sapiens; identical to SEQ ID NO: 32821

SEQ ID NO: 415832 - DNA, 416 bp, Homo Sapiens; identical to SEQ ID NO: 301438

SEQ ID NO: 415833 - DNA, 662 bp, Homo Sapiens; identical to SEQ ID NO: 231456
  misc_feature (119)..(212): n is a, c, g, or t
  misc_feature (216)..(216): n is a, c, g, or t
  misc_feature (219)..(219): n is a, c, g, or t
  misc_feature (222)..(222): n is a, c, g, or t
  misc_feature (238)..(238): n is a, c, g, or t
  misc_feature (259)..(259): n is a, c, g, or t
  misc_feature (349)..(357): n is a, c, g, or t

SEQ ID NO: 415834 - DNA, 178 bp, Homo Sapiens; identical to SEQ ID NO: 301440

SEQ ID NO: 415835 - DNA, 606 bp, Homo Sapiens; identical to SEQ ID NO: 32823

SEQ ID NO: 415836 - DNA, 279 bp, Homo Sapiens; identical to SEQ ID NO: 301444

SEQ ID NO: 415837 - DNA, 942 bp, Homo Sapiens; identical to SEQ ID NO: 301445
  misc_feature (524)..(524): n is a, c, g, or t
  misc_feature (554)..(555): n is a, c, g, or t
  misc_feature (557)..(557): n is a, c, g, or t

SEQ ID NO: 415838 - DNA, 342 bp, Homo Sapiens; identical to SEQ ID NO: 231464
  misc_feature (45)..(103): n is a, c, g, or t
  misc_feature (141)..(190): n is a, c, g, or t
  misc_feature (223)..(233): n is a, c, g, or t

SEQ ID NO: 415839 - DNA, 589 bp, Homo Sapiens; identical to SEQ ID NO: 231468
  misc_feature (96)..(223): n is a, c, g, or t
  misc_feature (262)..(272): n is a, c, g, or t

SEQ ID NO: 415840 - DNA, 381 bp, Homo Sapiens; identical to SEQ ID NO: 231469
  misc_feature (81)..(142): n is a, c, g, or t

SEQ ID NO: 415841 - DNA, 750 bp, Homo Sapiens; identical to SEQ ID NO: 231476
  misc_feature (145)..(153): n is a, c, g, or t
  misc_feature (267)..(277): n is a, c, g, or t
  misc_feature (346)..(360): n is a, c, g, or t
  misc_feature (716)..(716): n is a, c, g, or t

SEQ ID NO: 415842 - DNA, 645 bp, Homo Sapiens; identical to SEQ ID NO: 301451
  misc_feature (399)..(412): n is a, c, g, or t

SEQ ID NO: 415843 - DNA, 136 bp, Homo Sapiens; identical to SEQ ID NO: 301452

SEQ ID NO: 415844 - DNA, 104 bp, Homo Sapiens; identical to SEQ ID NO: 301454

SEQ ID NO: 415845 - DNA, 838 bp, Homo Sapiens; identical to SEQ ID NO: 301455
  misc_feature (446)..(578): n is a, c, g, or t

SEQ ID NO: 415846 - DNA, 925 bp, Homo Sapiens; identical to SEQ ID NO: 231482
  misc_feature (86)..(95): n is a, c, g, or t
  misc_feature (142)..(202): n is a, c, g, or t
  misc_feature (308)..(308): n is a, c, g, or t
  misc_feature (374)..(383): n is a, c, g, or t
  misc_feature (849)..(849): n is a, c, g, or t

SEQ ID NO: 415847 - DNA, 289 bp, Homo Sapiens; identical to SEQ ID NO: 301458

SEQ ID NO: 415848 - DNA, 337 bp, Homo Sapiens; identical to SEQ ID NO: 301459
  misc_feature (62)..(124): n is a, c, g, or t

SEQ ID NO: 415849 - DNA, 927 bp, Homo Sapiens; identical to SEQ ID NO: 93778
  misc_feature (884)..(884): n is a, c, g, or t

SEQ ID NO: 415850 - DNA, 357 bp, Homo Sapiens; identical to SEQ ID NO: 32829

SEQ ID NO: 415851 - DNA, 773 bp, Homo Sapiens; identical to SEQ ID NO: 301463
  misc_feature (214)..(229): n is a, c, g, or t
  misc_feature (490)..(658): n is a, c, g, or t
  misc_feature (755)..(755): n is a, c, g, or t

SEQ ID NO: 415852 - DNA, 571 bp, Homo Sapiens; identical to SEQ ID NO: 301464
  misc_feature (405)..(405): n is a, c, g, or t

SEQ ID NO: 415853 - DNA, 448 bp, Homo Sapiens; identical to SEQ ID NO: 32834

SEQ ID NO: 415854 - DNA, 302 bp, Homo Sapiens; identical to SEQ ID NO: 301466

SEQ ID NO: 415855 - DNA, 182 bp, Homo Sapiens; identical to SEQ ID NO: 301467

SEQ ID NO: 415856 - DNA, 225 bp, Homo Sapiens
  misc_feature (53)..(88): n is a, c, g, or t
gggtgtctgtcttcattgcagctctgtctgcagagccagcactgtgatacctnnnnnnnnnnnnnnnnnnnnnnnnnnnnnnnnnnnntactatctagacaaggatgagactggtatgactctccaaagctttcccacctccaaaacctcggcttgtggggaatctccagtagggggcactgtggacacggttcgcatctgcctcccaaggctgggctccgcgac

SEQ ID NO: 415857 - DNA, 1010 bp, Homo Sapiens; identical to SEQ ID NO: 231500
  misc_feature (724)..(724): n is a, c, g, or t

SEQ ID NO: 415858 - DNA, 168 bp, Homo Sapiens; identical to SEQ ID NO: 231501

SEQ ID NO: 415859 - DNA, 317 bp, Homo Sapiens; identical to SEQ ID NO: 301471

SEQ ID NO: 415860 - DNA, 426 bp, Homo Sapiens; identical to SEQ ID NO: 947

SEQ ID NO: 415861 - DNA, 523 bp, Homo Sapiens; identical to SEQ ID NO: 231505
  misc_feature (122)..(179): n is a, c, g, or t
  misc_feature (354)..(354): n is a, c, g, or t
  misc_feature (377)..(449): n is a, c, g, or t

SEQ ID NO: 415862 - DNA, 529 bp, Homo Sapiens; identical to SEQ ID NO: 32840

SEQ ID NO: 415863 - DNA, 293 bp, Homo Sapiens; identical to SEQ ID NO: 301476
  misc_feature (126)..(155): n is a, c, g, or t

SEQ ID NO: 415864 - DNA, 969 bp, Homo Sapiens; identical to SEQ ID NO: 231514
  misc_feature (48)..(277): n is a, c, g, or t

SEQ ID NO: 415865 - DNA, 973 bp, Homo Sapiens; identical to SEQ ID NO: 231515
  misc_feature (50)..(219): n is a, c, g, or t
  misc_feature (238)..(321): n is a, c, g, or t

SEQ ID NO: 415866 - DNA, 966 bp, Homo Sapiens; identical to SEQ ID NO: 231516
  misc_feature (50)..(134): n is a, c, g, or t
  misc_feature (136)..(157): n is a, c, g, or t
  misc_feature (224)..(319): n is a, c, g, or t
  misc_feature (487)..(617): n is a, c, g, or t

SEQ ID NO: 415867 - DNA, 801 bp, Homo Sapiens; identical to SEQ ID NO: 32843

SEQ ID NO: 415868 - DNA, 793 bp, Homo Sapiens; identical to SEQ ID NO: 301482
  misc_feature (429)..(616): n is a, c, g, or t

SEQ ID NO: 415869 - DNA, 568 bp, Homo Sapiens; identical to SEQ ID NO: 32849

SEQ ID NO: 415870 - DNA, 813 bp, Homo Sapiens
  misc_feature (382)..(392): n is a, c, g, or t
  misc_feature (548)..(564): n is a, c, g, or t
  misc_feature (566)..(654): n is a, c, g, or t
ggggtccgcatggaatctttcttatattttaccctttcctacatgtagccttgaatgtcctttccacaaatatgctcccacggctgggagcattttcttttcttttcgtcacctttgatttttgggattagattaataggggaaaaagtccctggctttaaagaaaacaaaagtagaattcttcaaaaataaatttcatactgggaacagaaaggaactaaatgcttcataaaacagggaaaaagaaattaagatcatcctagaaataaactaagataaaaataagtatactgacccttggttggtagataaaaagatgaccagtcttgtattgttttaaaattagataaacatggattaagcatgcaaagactctgttccnnnnnnnnnnncttggagacagggcctcacgctgtcacccaggctggagtgcagttgtgcaacatcatggctcaccgcagcctcaacctcctgggctcaaacagtcctcccaactcagactccagagtagctgggactacaggtgtgcgccaccacactcagctaannnnnnnnnnnnnnnnnannnnnnnnnnnnnnnnnnnnnnnnnnnnnnnnnnnnnnnnnnnnnnnnnnnnnnnnnnnnnnnnnnnnnnnnnnnnnnnnnnnnnnnnnagcatgagctactgcacctgccctctgttttctttggaaatctcctacctttcattagggtttcttcatagcaaattcctttgggttttttaagacttctacattgcttttttcctttaatacccgggctcccggaaccttaatgaatgctgcctaaaa

SEQ ID NO: 415871 - DNA, 942 bp, Homo Sapiens; identical to SEQ ID NO: 231519
  misc_feature (44)..(52): n is a, c, g, or t
  misc_feature (73)..(212): n is a, c, g, or t
  misc_feature (290)..(300): n is a, c, g, or t
  misc_feature (471)..(480): n is a, c, g, or t

SEQ ID NO: 415872 - DNA, 1020 bp, Homo Sapiens; identical to SEQ ID NO: 231520
  misc_feature (165)..(165): n is a, c, g, or t
  misc_feature (169)..(169): n is a, c, g, or t
  misc_feature (179)..(179): n is a, c, g, or t
  misc_feature (186)..(186): n is a, c, g, or t
  misc_feature (218)..(305): n is a, c, g, or t
  misc_feature (341)..(353): n is a, c, g, or t
  misc_feature (391)..(391): n is a, c, g, or t
  misc_feature (394)..(414): n is a, c, g, or t
  misc_feature (429)..(429): n is a, c, g, or t
  misc_feature (447)..(447): n is a, c, g, or t
  misc_feature (451)..(488): n is a, c, g, or t
  misc_feature (496)..(496): n is a, c, g, or t
  misc_feature (503)..(503): n is a, c, g, or t
  misc_feature (507)..(507): n is a, c, g, or t
  misc_feature (544)..(544): n is a, c, g, or t
  misc_feature (563)..(563): n is a, c, g, or t
  misc_feature (575)..(577): n is a, c, g, or t
  misc_feature (580)..(580): n is a, c, g, or t
  misc_feature (582)..(582): n is a, c, g, or t
  misc_feature (594)..(594): n is a, c, g, or t
  misc_feature (603)..(603): n is a, c, g, or t
  misc_feature (610)..(700): n is a, c, g, or t
  misc_feature (704)..(704): n is a, c, g, or t
  misc_feature (799)..(800): n is a, c, g, or t
  misc_feature (820)..(820): n is a, c, g, or t
  misc_feature (822)..(824): n is a, c, g, or t
  misc_feature (866)..(866): n is a, c, g, or t
  misc_feature (869)..(870): n is a, c, g, or t
  misc_feature (872)..(872): n is a, c, g, or t
  misc_feature (874)..(874): n is a, c, g, or t
  misc_feature (884)..(884): n is a, c, g, or t
  misc_feature (890)..(890): n is a, c, g, or t
  misc_feature (905)..(905): n is a, c, g, or t
  misc_feature (925)..(925): n is a, c, g, or t
  misc_feature (931)..(931): n is a, c, g, or t
  misc_feature (985)..(985): n is a, c, g, or t
  misc_feature (987)..(988): n is a, c, g, or t

SEQ ID NO: 415873 - DNA, 829 bp, Homo Sapiens; identical to SEQ ID NO: 32855

SEQ ID NO: 415874 - DNA, 1049 bp, Homo Sapiens; identical to SEQ ID NO: 231521
  misc_feature (44)..(52): n is a, c, g, or t
  misc_feature (75)..(189): n is a, c, g, or t
  misc_feature (215)..(232): n is a, c, g, or t
  misc_feature (292)..(346): n is a, c, g, or t
  misc_feature (953)..(953): n is a, c, g, or t
  misc_feature (959)..(959): n is a, c, g, or t

SEQ ID NO: 415875 - DNA, 785 bp, Homo Sapiens
  misc_feature (505)..(563): n is a, c, g, or t
  misc_feature (635)..(745): n is a, c, g, or t
gggaagtgtgcacagtaaacacaacaaggacaatggcatcacagggcgatggcatcagtccaagagtaccttgggaagagcaattctgtggatgaaccgcagtgcaggtgcacaggcttctaatggtctcgcctggcagacctagcgtcaccccagctagcctgaccataagactcacctgaacagttcattaaatacacaggttcctgaaggttatggtgaacttgcaactggtaggaaatgtccatatggaagagcccagaatcatagtccacacacaaagctgatccctccctaccctccaccaggccctgtactccccagttcatagaggccagaaatctatgttgttaacaagaatccctggcaagtctcattgggcaaggttagggaatactggcttagtgaagaatgatggcttgcacatctatagtgaagtattacaaaaacctcgcactgtactgtctcccaatcaaaccagccaaactctccactctggccagannnnnnnnnnnnnnnnnnnnnnnnnnnnnnnnnnnnnnnnnnnnnnnnnnnnnnnnnnntaaacacacagatcaatggaagaagattgagagtcaagaaataaaccacacagttatggctaatttccctcnnnnnnnnnnnnnnnnnnnnnnnnnnnnnnnnnnnnnnnnnnnnnnnnnnnnnnnnnnnnnnnnnnnnnnnnnnnnnnnnnnnnnnnnnnnnnnnnnnnnnnnnnnnnnnnaggagatcaaagtcatagctgtaaggagctaaaacttata

SEQ ID NO: 415876 - DNA, 537 bp, Homo Sapiens; identical to SEQ ID NO: 32856

SEQ ID NO: 415877 - DNA, 755 bp, Homo Sapiens; identical to SEQ ID NO: 32857

SEQ ID NO: 415878 - DNA, 501 bp, Homo Sapiens; identical to SEQ ID NO: 301496

SEQ ID NO: 415879 - DNA, 796 bp, Homo Sapiens; identical to SEQ ID NO: 301497
  misc_feature (190)..(203): n is a, c, g, or t
  misc_feature (509)..(509): n is a, c, g, or t
  misc_feature (540)..(540): n is a, c, g, or t
  misc_feature (727)..(727): n is a, c, g, or t
  misc_feature (750)..(750): n is a, c, g, or t

SEQ ID NO: 415880 - DNA, 633 bp, Homo Sapiens; identical to SEQ ID NO: 231528
  misc_feature (616)..(616): n is a, c, g, or t

SEQ ID NO: 415881 - DNA, 137 bp, Homo Sapiens; identical to SEQ ID NO: 301499

SEQ ID NO: 415882 - DNA, 580 bp, Homo Sapiens; identical to SEQ ID NO: 231530
  misc_feature (88)..(377): n is a, c, g, or t

SEQ ID NO: 415883 - DNA, 165 bp, Homo Sapiens; identical to SEQ ID NO: 231531

SEQ ID NO: 415884 - DNA, 815 bp, Homo Sapiens; identical to SEQ ID NO: 301502
  misc_feature (439)..(439): n is a, c, g, or t

SEQ ID NO: 415885 - DNA, 813 bp, Homo Sapiens; identical to SEQ ID NO: 32862

SEQ ID NO: 415886 - DNA, 323 bp, Homo Sapiens; identical to SEQ ID NO: 231533
  misc_feature (54)..(274): n is a, c, g, or t

SEQ ID NO: 415887 - DNA, 756 bp, Homo Sapiens; identical to SEQ ID NO: 231536
  misc_feature (49)..(347): n is a, c, g, or t
  misc_feature (358)..(358): n is a, c, g, or t
  misc_feature (656)..(656): n is a, c, g, or t
  misc_feature (714)..(714): n is a, c, g, or t

SEQ ID NO: 415888 - DNA, 896 bp, Homo Sapiens; identical to SEQ ID NO: 301507
  misc_feature (41)..(50): n is a, c, g, or t
  misc_feature (208)..(383): n is a, c, g, or t

SEQ ID NO: 415889 - DNA, 827 bp, Homo Sapiens; identical to SEQ ID NO: 301508
  misc_feature (617)..(617): n is a, c, g, or t
  misc_feature (745)..(745): n is a, c, g, or t

SEQ ID NO: 415890 - DNA, 187 bp, Homo Sapiens
ggggttcaccctggacctactatttttgcactcacctccctggttctcagatttctggctccggttcccagctgccatagcccctttggtcccttcactttggtgaccctttaggcttccctttttagaccacagctgtcacatgtttctgactcaacttgcttctgccatgccagcgtcacccctg

SEQ ID NO: 415891 - DNA, 475 bp, Homo Sapiens; identical to SEQ ID NO: 301509
  misc_feature (351)..(351): n is a, c, g, or t
  misc_feature (378)..(378): n is a, c, g, or t

SEQ ID NO: 415892 - DNA, 806 bp, Homo Sapiens; identical to SEQ ID NO: 301510
  misc_feature (601)..(601): n is a, c, g, or t

SEQ ID NO: 415893 - DNA, 730 bp, Homo Sapiens; identical to SEQ ID NO: 301512
  misc_feature (591)..(591): n is a, c, g, or t

SEQ ID NO: 415894 - DNA, 671 bp, Homo Sapiens; identical to SEQ ID NO: 231537
  misc_feature (207)..(207): n is a, c, g, or t
  misc_feature (242)..(312): n is a, c, g, or t
  misc_feature (617)..(626): n is a, c, g, or t

SEQ ID NO: 415895 - DNA, 517 bp, Homo Sapiens
  misc_feature (156)..(156): n is a, c, g, or t
  misc_feature (354)..(376): n is a, c, g, or t
gggggagggtggcgcaaggagaggacacctctctcctggccctgtcgccatcttccctcatcaatagctaaaaatggcaaagaagaaagagccaggaccccgtgccatcaaatcctccggccttgtgctgccctgtctcggcactgcttgccttangagatcaggagtgttcctagccactgggagatgggatgcctgccactggcagctctgccgtccatcctcaccatcccaccgtccccccaagacagctctccatcccatcctctgcctcccttctagcctcaaccttaactcaggggctcccccgttctcacaccctgggtttgcagggaacattcttctttcaccaannnnnnnnnnnnnnnnnnnnnnntcagggggctggcctaggggcagcctaacaaaaaacccagggccaggccctcttgaaaaagttgcctcccaccatcttcatttaaaaaaacccgtggaaaattcgcacttggcccccacttattcggaaaataagcctccc

SEQ ID NO: 415896 - DNA, 359 bp, Homo Sapiens; identical to SEQ ID NO: 231542
  misc_feature (287)..(287): n is a, c, g, or t

SEQ ID NO: 415897 - DNA, 748 bp, Homo Sapiens; identical to SEQ ID NO: 32865

SEQ ID NO: 415898 - DNA, 778 bp, Homo Sapiens; identical to SEQ ID NO: 301515
  misc_feature (486)..(486): n is a, c, g, or t

SEQ ID NO: 415899 - DNA, 789 bp, Homo Sapiens; identical to SEQ ID NO: 32866

SEQ ID NO: 415900 - DNA, 750 bp, Homo Sapiens
  misc_feature (509)..(538): n is a, c, g, or t
  misc_feature (691)..(699): n is a, c, g, or t
ggctggtaaagtaggagtttgcatgacttcacactttttttgcgtagtttcttctgttgtatgatggcgtgagtgtgtgtcttgggtaccgctgtgtactactgtgtgcctagattccatgcactctcgttgtgtttgaagtaaatattggagaccggagggtaacaggttggcctgttgattacagctagtaatcgctgtgtcttgttccgccccctccctgacaccccagcttcccaggatgtggaaagcctggatctcagctccttgccccatatcccttctgtaatttgtacctaaagagtgtgattatcctaattcaagagtcactaaaactcatcacattatcattgcatatcagcaaagggtaaagtcctagcaccaaaggcttcacataccagcatgttccatttccaatttagaattagccacataataaaatcttagaatcttccttgagaaagagctgcctgagatgtagtttagttatatggttccccaccgaccannnnnnnnnnnnnnnnnnnnnnnnnnnnnngttccaactggcactgtgagttttgtaggggccctcctctggccaaacaaacgccaaaatgaactgggacttatgtaaaacaaatccttgaatgccaggggaatcccttccctttcctcccagttcccagcaaaaaatggaatggggccaaannnnnnnnnaaaaatcccagaaaacccccctcccatttccatttccaaatgggaaatttt

SEQ ID NO: 415901 - DNA, 744 bp, Homo Sapiens; identical to SEQ ID NO: 301518
  misc_feature (310)..(342): n is a, c, g, or t

SEQ ID NO: 415902 - DNA, 396 bp, Homo Sapiens; identical to SEQ ID NO: 301519
  misc_feature (50)..(80): n is a, c, g, or t

SEQ ID NO: 415903 - DNA, 163 bp, Homo Sapiens; identical to SEQ ID NO: 301520

SEQ ID NO: 415904 - DNA, 295 bp, Homo Sapiens; identical to SEQ ID NO: 301521

SEQ ID NO: 415905 - DNA, 393 bp, Homo Sapiens; identical to SEQ ID NO: 301522
  misc_feature (79)..(79): n is a, c, g, or t
  misc_feature (136)..(136): n is a, c, g, or t
  misc_feature (275)..(275): n is a, c, g, or t
  misc_feature (299)..(299): n is a, c, g, or t

SEQ ID NO: 415906 - DNA, 634 bp, Homo Sapiens; identical to SEQ ID NO: 32871

SEQ ID NO: 415907 - DNA, 721 bp, Homo Sapiens; identical to SEQ ID NO: 301524
  misc_feature (58)..(311): n is a, c, g, or t

SEQ ID NO: 415908 - DNA, 575 bp, Homo Sapiens; identical to SEQ ID NO: 32872

SEQ ID NO: 415909 - DNA, 568 bp, Homo Sapiens; identical to SEQ ID NO: 231550
  misc_feature (87)..(118): n is a, c, g, or t

SEQ ID NO: 415910 - DNA, 787 bp, Homo Sapiens; identical to SEQ ID NO: 301527
  misc_feature (508)..(508): n is a, c, g, or t
  misc_feature (722)..(722): n is a, c, g, or t

SEQ ID NO: 415911 - DNA, 788 bp, Homo Sapiens; identical to SEQ ID NO: 301530

SEQ ID NO: 415912 - DNA, 751 bp, Homo Sapiens; identical to SEQ ID NO: 231556
  misc_feature (63)..(184): n is a, c, g, or t
  misc_feature (197)..(210): n is a, c, g, or t
  misc_feature (341)..(351): n is a, c, g, or t

SEQ ID NO: 415913 - DNA, 426 bp, Homo Sapiens; identical to SEQ ID NO: 301532

SEQ ID NO: 415914 - DNA, 144 bp, Homo Sapiens; identical to SEQ ID NO: 231558
  misc_feature (74)..(75): n is a, c, g, or t

SEQ ID NO: 415915 - DNA, 144 bp, Homo Sapiens; identical to SEQ ID NO: 301535

SEQ ID NO: 415916 - DNA, 793 bp, Homo Sapiens; identical to SEQ ID NO: 301536
  misc_feature (355)..(364): n is a, c, g, or t
  misc_feature (477)..(477): n is a, c, g, or t
  misc_feature (546)..(604): n is a, c, g, or t

SEQ ID NO: 415917 - DNA, 844 bp, Homo Sapiens; identical to SEQ ID NO: 301538
  misc_feature (435)..(435): n is a, c, g, or t
  misc_feature (547)..(603): n is a, c, g, or t

SEQ ID NO: 415918 - DNA, 302 bp, Homo Sapiens; identical to SEQ ID NO: 231561
  misc_feature (107)..(107): n is a, c, g, or t
  misc_feature (143)..(153): n is a, c, g, or t

SEQ ID NO: 415919 - DNA, 762 bp, Homo Sapiens; identical to SEQ ID NO: 32879

SEQ ID NO: 415920 - DNA, 927 bp, Homo Sapiens; identical to SEQ ID NO: 231564
  misc_feature (45)..(92): n is a, c, g, or t
  misc_feature (201)..(238): n is a, c, g, or t
  misc_feature (328)..(391): n is a, c, g, or t
  misc_feature (518)..(608): n is a, c, g, or t
  misc_feature (621)..(675): n is a, c, g, or t

SEQ ID NO: 415921 - DNA, 374 bp, Homo Sapiens; identical to SEQ ID NO: 301543

SEQ ID NO: 415922 - DNA, 550 bp, Homo Sapiens; identical to SEQ ID NO: 32880

SEQ ID NO: 415923 - DNA, 322 bp, Homo Sapiens; identical to SEQ ID NO: 231567
  misc_feature (76)..(90): n is a, c, g, or t

SEQ ID NO: 415924 - DNA, 761 bp, Homo Sapiens; identical to SEQ ID NO: 32882

SEQ ID NO: 415925 - DNA, 841 bp, Homo Sapiens; identical to SEQ ID NO: 301547
  misc_feature (277)..(543): n is a, c, g, or t

SEQ ID NO: 415926 - DNA, 880 bp, Homo Sapiens; identical to SEQ ID NO: 301548
  misc_feature (512)..(653): n is a, c, g, or t
  misc_feature (793)..(793): n is a, c, g, or t

SEQ ID NO: 415927 - DNA, 561 bp, Homo Sapiens; identical to SEQ ID NO: 32883

SEQ ID NO: 415928 - DNA, 881 bp, Homo Sapiens; identical to SEQ ID NO: 301550
  misc_feature (853)..(853): n is a, c, g, or t

SEQ ID NO: 415929 - DNA, 760 bp, Homo Sapiens; identical to SEQ ID NO: 32886

SEQ ID NO: 415930 - DNA, 734 bp, Homo Sapiens; identical to SEQ ID NO: 32887

SEQ ID NO: 415931 - DNA, 450 bp, Homo Sapiens; identical to SEQ ID NO: 32888

SEQ ID NO: 415932 - DNA, 111 bp, Homo Sapiens; identical to SEQ ID NO: 231578

SEQ ID NO: 415933 - DNA, 521 bp, Homo Sapiens; identical to SEQ ID NO: 301554
  misc_feature (49)..(248): n is a, c, g, or t

SEQ ID NO: 415934 - DNA, 804 bp, Homo Sapiens; identical to SEQ ID NO: 301555
  misc_feature (283)..(590): n is a, c, g, or t

SEQ ID NO: 415935 - DNA, 781 bp, Homo Sapiens
  misc_feature (121)..(460): n is a, c, g, or t
  misc_feature (501)..(501): n is a, c, g, or t
gggcactcaggagtagatactcagtgcctttgctgacatgtctgtgttctacaaacaccttctctccattatttttctgtttttaagttcccttagagcctacagtgcagtagtgtagatnnnnnnnnnnnnnnnnnnnnnnnnnnnnnnnnnnnnnnnnnnnnnnnnnnnnnnnnnnnnnnnnnnnnnnnnnnnnnnnnnnnnnnnnnnnnnnnnnnnnnnnnnnnnnnnnnnnnnnnnnnnnnnnnnnnnnnnnnnnnnnnnnnnnnnnnnnnnnnnnnnnnnnnnnnnnnnnnnnnnnnnnnnnnnnnnnnnnnnnnnnnnnnnnnnnnnnnnnnnnnnnnnnnnnnnnnnnnnnnnnnnnnnnnnnnnnnnnnnnnnnnnnnnnnnnnnnnnnnnnnnnnnnnnnnnnnnnnnnnnnnnnnnnnnnnnnnnnnnnnnnnnnnnnnnnnnnnnnnnngtatagataacagaccattagcattttctcctttatatganacatttattatttgatttatttgtgtctattttgctctgtggcttggacccagaaacacttgtataataggtgaaatgaacaaagaatgagctgccagaacatctgagagctgtaaaggttaaattatttgggacccaaagaagcctagttctgaccgttgtttcagttcacacaaaatttttggtctgaaaaacccaaactttttttcttttccccttttaaaattatgcctgaaacaatttaggggccccgtaatgttgtgaacctgaacattggctt

SEQ ID NO: 415936 - DNA, 277 bp, Homo Sapiens; identical to SEQ ID NO: 301557

SEQ ID NO: 415937 - DNA, 334 bp, Homo Sapiens
gggtcatgcctggaatcagccatgtttctaaggaaccgtgatccttttaatagataatactatttggaagcaacaatttggatgctgacatgttcattcctactggttgtcattgtttctgggtcttttcagtaggtagtgctaggtaaatcatgaattaatggtgatatttcaaatttataaatacaggctaattttgggttatgttatacttgtatcatttttatcttatgctgaatatcttggttcttcaaatgatgttgttacttatgtaagtatcacaacatatatgtgtttctaaataatacagtattactactaacaataagactgt

SEQ ID NO: 415938 - DNA, 763 bp, Homo Sapiens; identical to SEQ ID NO: 301559
  misc_feature (527)..(527): n is a, c, g, or t
  misc_feature (595)..(595): n is a, c, g, or t

SEQ ID NO: 415939 - DNA, 799 bp, Homo Sapiens; identical to SEQ ID NO: 301561
  misc_feature (330)..(397): n is a, c, g, or t

SEQ ID NO: 415940 - DNA, 1912 bp, Homo Sapiens; identical to SEQ ID NO: 231588
  misc_feature (58)..(109): n is a, c, g, or t
  misc_feature (113)..(148): n is a, c, g, or t
  misc_feature (197)..(423): n is a, c, g, or t
  misc_feature (1094)..(1104): n is a, c, g, or t
  misc_feature (1122)..(1122): n is a, c, g, or t
  misc_feature (1336)..(1376): n is a, c, g, or t
  misc_feature (1456)..(1456): n is a, c, g, or t
  misc_feature (1467)..(1467): n is a, c, g, or t
  misc_feature (1506)..(1568): n is a, c, g, or t
  misc_feature (1768)..(1768): n is a, c, g, or t
  misc_feature (1817)..(1817): n is a, c, g, or t

SEQ ID NO: 415941 - DNA, 151 bp, Homo Sapiens; identical to SEQ ID NO: 301564

SEQ ID NO: 415942 - DNA, 582 bp, Homo Sapiens; identical to SEQ ID NO: 32897

SEQ ID NO: 415943 - DNA, 769 bp, Homo Sapiens; identical to SEQ ID NO: 301567
  misc_feature (523)..(523): n is a, c, g, or t

SEQ ID NO: 415944 - DNA, 808 bp, Homo Sapiens; identical to SEQ ID NO: 301569
  misc_feature (536)..(546): n is a, c, g, or t
  misc_feature (550)..(655): n is a, c, g, or t

SEQ ID NO: 415945 - DNA, 130 bp, Homo Sapiens; identical to SEQ ID NO: 231594

SEQ ID NO: 415946 - DNA, 101 bp, Homo Sapiens; identical to SEQ ID NO: 231595

SEQ ID NO: 415947 - DNA, 812 bp, Homo Sapiens; identical to SEQ ID NO: 32902

SEQ ID NO: 415948 - DNA, 578 bp, Homo Sapiens; identical to SEQ ID NO: 231599
  misc_feature (502)..(510): n is a, c, g, or t

SEQ ID NO: 415949 - DNA, 734 bp, Homo Sapiens; identical to SEQ ID NO: 301574
  misc_feature (604)..(604): n is a, c, g, or t
  misc_feature (613)..(613): n is a, c, g, or t
  misc_feature (639)..(639): n is a, c, g, or t

SEQ ID NO: 415950 - DNA, 849 bp, Homo Sapiens
  misc_feature (257)..(343): n is a, c, g, or t
  misc_feature (576)..(577): n is a, c, g, or t
  misc_feature (579)..(579): n is a, c, g, or t
ggagagtaaaaaccattttcatagtatatgttggatcactgttgtcttcatatttctaaaataaatgaattaaaaaatttaaattcttagatgcttatctctatcatagctcagaatgcaacttcaatacccccattcttttatatttccagatttcttttaattaagatataatgaacaaattaagttaaatgaagtctgtattttcatgcaaatatattagtattcattaatatacatttattctttgcaaatannnnnnnnnnnnnnnnnnnnnnnnnnnnnnnnnnnnnnnnnnnnnnnnnnnnnnnnnnnnnnnnnnnnnnnnnnnnnnnnnnnnnnngcactgtaaaataatatgtaaaggacttggaatgttaaaaataaccattcatcattttgctttatattacatctaatatttcctgaaacattttgtaatacccacatggaaagtggagaaagagaaaccttgtgctttttataaacattgcccaggagaataatggttaaacaaatctgttcaaatacatattttaattttttttacaaataaaagttttacattaacatacnnanatcacacgaccaaccccccccattaaaccttgtccggcccgcctcgggccctcgaaaaaacctttctagaaccatttcgtttggccgcgccgggccccgttaaggtaaactggaacattgggccaatacctgcttcccctagggaaaatcccgggccatggacatagtggcctgggaattctcccccaattaaaaaaaccccccgggcggggtaacccgcaagcgcttttctgaaaccaaatctccagaatggggaagtttcctcgaaga

SEQ ID NO: 415951 - DNA, 308 bp, Homo Sapiens; identical to SEQ ID NO: 301578

SEQ ID NO: 415952 - DNA, 837 bp, Homo Sapiens; identical to SEQ ID NO: 301579
  misc_feature (512)..(512): n is a, c, g, or t
  misc_feature (648)..(648): n is a, c, g, or t
  misc_feature (668)..(668): n is a, c, g, or t
  misc_feature (758)..(758): n is a, c, g, or t

SEQ ID NO: 415953 - DNA, 686 bp, Homo Sapiens; identical to SEQ ID NO: 301580
  misc_feature (116)..(404): n is a, c, g, or t
  misc_feature (486)..(494): n is a, c, g, or t
  misc_feature (587)..(595): n is a, c, g, or t

SEQ ID NO: 415954 - DNA, 698 bp, Homo Sapiens; identical to SEQ ID NO: 301581
  misc_feature (204)..(204): n is a, c, g, or t
  misc_feature (377)..(377): n is a, c, g, or t
  misc_feature (406)..(406): n is a, c, g, or t
  misc_feature (410)..(410): n is a, c, g, or t
  misc_feature (464)..(464): n is a, c, g, or t
  misc_feature (474)..(474): n is a, c, g, or t
  misc_feature (576)..(623): n is a, c, g, or t

SEQ ID NO: 415955 - DNA, 801 bp, Homo Sapiens; identical to SEQ ID NO: 301583
  misc_feature (615)..(615): n is a, c, g, or t
  misc_feature (641)..(641): n is a, c, g, or t
  misc_feature (680)..(680): n is a, c, g, or t

SEQ ID NO: 415956 - DNA, 395 bp, Homo Sapiens
  misc_feature (173)..(222): n is a, c, g, or t
ggatggttacttgttcttgtacaagctactaattagactatagtaggatattttaaagagctgaatcacttttggtattttggtataaatattttcatttgttatgtcccagtatattcttactggaaaattcttgttttgatctgcctgaagaaaatatctgttttctatannnnnnnnnnnnnnnnnnnnnnnnnnnnnnnnnnnnnnnnnnnnnnnnnnataaaatcacaaaggaatgtaccttatgaatgttgttgacattttatgaaattatgtggattcatattactgttacaagatagaattgaatgcaaaaagaccaaaacctcaataaaatttgaggaaaacgtgttattatgtaattgaaataaaaacattttataattgtgcca

SEQ ID NO: 415957 - DNA, 375 bp, Homo Sapiens; identical to SEQ ID NO: 231614
  misc_feature (254)..(263): n is a, c, g, or t

SEQ ID NO: 415958 - DNA, 1004 bp, Homo Sapiens; identical to SEQ ID NO: 231617
  misc_feature (523)..(532): n is a, c, g, or t

SEQ ID NO: 415959 - DNA, 1076 bp, Homo Sapiens; identical to SEQ ID NO: 231619
  misc_feature (548)..(595): n is a, c, g, or t
  misc_feature (774)..(807): n is a, c, g, or t
  misc_feature (897)..(953): n is a, c, g, or t
  misc_feature (974)..(974): n is a, c, g, or t

SEQ ID NO: 415960 - DNA, 197 bp, Homo Sapiens; identical to SEQ ID NO: 301591

SEQ ID NO: 415961 - DNA, 857 bp, Homo Sapiens
  misc_feature (156)..(459): n is a, c, g, or t
gggtgccaggcctaggttaaacttggaaacatgcttgaccattctattccctggtcctttaagatcagtttggctgcaattttggctccttggaccctcaagcatagctggtaaatcaagttagagatgtaactgccttaaaacatgccagcttannnnnnnnnnnnnnnnnnnnnnnnnnnnnnnnnnnnnnnnnnnnnnnnnnnnnnnnnnnnnnnnnnnnnnnnnnnnnnnnnnnnnnnnnnnnnnnnnnnnnnnnnnnnnnnnnnnnnnnnnnnnnnnnnnnnnnnnnnnnnnnnnnnnnnnnnnnnnnnnnnnnnnnnnnnnnnnnnnnnnnnnnnnnnnnnnnnnnnnnnnnnnnnnnnnnnnnnnnnnnnnnnnnnnnnnnnnnnnnnnnnnnnnnnnnnnnnnnnnnnnnnnnnnnnnnnnnnnnnnnnnnnnnnnnnnnnnnnnnnnnnngtgccagtggatgagggaagtacactggttctcccccgagggtacctgcccagaaaagatgctatagatgctactcccatgtgccaaaagccggtgggcccactggtggccacagcttatatccgcccggtgctgtgcccgcactaagggagaggcgggggcttccccgccgaccacaaagaaggaacgtcacactcccccaaccagtggcgcaccgattcgatggtaccagcgcgcgtcagcacacccactcgcccggaacgcttctccgcgccgccgccacccgtgcggtcgcagagcgccgatgcctagccgtgcgaccacgcatcccatcttaggcagtcggcgcagacaccacgtcaaagatttgcatggaacctgcagccagctaacagcag

SEQ ID NO: 415962 - DNA, 498 bp, Homo Sapiens; identical to SEQ ID NO: 301593
  misc_feature (460)..(460): n is a, c, g, or t

SEQ ID NO: 415963 - DNA, 450 bp, Homo Sapiens; identical to SEQ ID NO: 231628
  misc_feature (67)..(115): n is a, c, g, or t
  misc_feature (134)..(142): n is a, c, g, or t
  misc_feature (345)..(354): n is a, c, g, or t

SEQ ID NO: 415964 - DNA, 167 bp, Homo Sapiens; identical to SEQ ID NO: 301595

SEQ ID NO: 415965 - DNA, 793 bp, Homo Sapiens; identical to SEQ ID NO: 301596
  misc_feature (564)..(564): n is a, c, g, or t
  misc_feature (663)..(663): n is a, c, g, or t

SEQ ID NO: 415966 - DNA, 713 bp, Homo Sapiens; identical to SEQ ID NO: 301597
  misc_feature (43)..(56): n is a, c, g, or t
  misc_feature (420)..(420): n is a, c, g, or t
  misc_feature (430)..(430): n is a, c, g, or t
  misc_feature (453)..(453): n is a, c, g, or t
  misc_feature (466)..(467): n is a, c, g, or t
  misc_feature (581)..(581): n is a, c, g, or t
  misc_feature (603)..(603): n is a, c, g, or t

SEQ ID NO: 415967 - DNA, 205 bp, Homo Sapiens; identical to SEQ ID NO: 301598

SEQ ID NO: 415968 - DNA, 821 bp, Homo Sapiens
  misc_feature (501)..(501): n is a, c, g, or t
  misc_feature (658)..(658): n is a, c, g, or t
gggagtaaagtgaagcttctgtctttgttactgtaccaggtgacaacagctgagtgtccctccatggacagtcactattggccttttgagtgagacagttctttaggataaaaacctgtcatcccattgcaggattcatttagcctttctggcccttacccactgatgctagtcattgtgaccaccccacctcccccaaataaaagtgtgccaaactattcattgttgagaaccattcaattgtattcaccaaaattggaggatatattggaatgccctaccttaatataggtcacatagcattagagaaaattggtttggagagtattacagcaaagtgtgctgcaaggaggctactccagcacaatggcaggcactgcttcccaggcatatggacaattctgggaggtggccagggtcagtacctgataactagtaagtgtctcaatctcagcatacaaaatttagcagtgacctacaaaagaagttggaattttctanaatgtttgtattcaagaaaggaacaaatgaatttactaaatgttgtcagagtattttttgtttagataccccccagaaccgaacaaccctaaagatacttgggaaaaatatctatcagtcaacattctaaggactgttaaatgtgaaataacctagntaatttttggccttttggtactaagggggaacaagaaacggcggcctaacatataatggggcatttagtaactcctgttaaatgaaaggattctccaattttcaaattttccttttaccatcctaataagcccctaacttaaatcctgatgaatttacctctc

SEQ ID NO: 415969 - DNA, 590 bp, Homo Sapiens; identical to SEQ ID NO: 231638
  misc_feature (252)..(253): n is a, c, g, or t
  misc_feature (297)..(297): n is a, c, g, or t
  misc_feature (320)..(320): n is a, c, g, or t
  misc_feature (380)..(380): n is a, c, g, or t
  misc_feature (478)..(478): n is a, c, g, or t
  misc_feature (548)..(548): n is a, c, g, or t
  misc_feature (568)..(568): n is a, c, g, or t

SEQ ID NO: 415970 - DNA, 629 bp, Homo Sapiens; identical to SEQ ID NO: 231643
  misc_feature (262)..(262): n is a, c, g, or t
  misc_feature (350)..(400): n is a, c, g, or t
  misc_feature (416)..(516): n is a, c, g, or t

SEQ ID NO: 415971 - DNA, 1069 bp, Homo Sapiens; identical to SEQ ID NO: 301602
  misc_feature (353)..(446): n is a, c, g, or t
  misc_feature (459)..(504): n is a, c, g, or t
  misc_feature (517)..(539): n is a, c, g, or t
  misc_feature (577)..(640): n is a, c, g, or t
  misc_feature (852)..(852): n is a, c, g, or t

SEQ ID NO: 415972 - DNA, 842 bp, Homo Sapiens; identical to SEQ ID NO: 301603
  misc_feature (735)..(756): n is a, c, g, or t
  misc_feature (779)..(779): n is a, c, g, or t

SEQ ID NO: 415973 - DNA, 789 bp, Homo Sapiens; identical to SEQ ID NO: 301604
  misc_feature (79)..(102): n is a, c, g, or t
  misc_feature (611)..(658): n is a, c, g, or t

SEQ ID NO: 415974 - DNA, 695 bp, Homo Sapiens; identical to SEQ ID NO: 231647
  misc_feature (49)..(220): n is a, c, g, or t
  misc_feature (326)..(338): n is a, c, g, or t
  misc_feature (529)..(568): n is a, c, g, or t

SEQ ID NO: 415975 - DNA, 404 bp, Homo Sapiens; identical to SEQ ID NO: 32920

SEQ ID NO: 415976 - DNA, 658 bp, Homo Sapiens; identical to SEQ ID NO: 301607
  misc_feature (13)..(13): n is a, c, g, or t
  misc_feature (465)..(489): n is a, c, g, or t
  misc_feature (491)..(491): n is a, c, g, or t

SEQ ID NO: 415977 - DNA, 245 bp, Homo Sapiens; identical to SEQ ID NO: 301610

SEQ ID NO: 415978 - DNA, 201 bp, Homo Sapiens
gggcaataacagactaccccagatactgcagtttacgcagtgcttagtaaatgagatttgtggaactaagttattagttacctgaggcttcttaagaaagtcttcttttttgaccagttgatgtgaaagagggagcatgtgacacagccagtatggtggagtgctagggttatcctgtttacaataaatcgcctgaattcc

SEQ ID NO: 415979 - DNA, 703 bp, Homo Sapiens; identical to SEQ ID NO: 231660
  misc_feature (60)..(70): n is a, c, g, or t
  misc_feature (73)..(81): n is a, c, g, or t

SEQ ID NO: 415980 - DNA, 700 bp, Homo Sapiens; identical to SEQ ID NO: 231661
  misc_feature (112)..(120): n is a, c, g, or t
  misc_feature (126)..(126): n is a, c, g, or t
  misc_feature (485)..(493): n is a, c, g, or t

SEQ ID NO: 415981 - DNA, 308 bp, Homo Sapiens; identical to SEQ ID NO: 231663

SEQ ID NO: 415982 - DNA, 186 bp, Homo Sapiens; identical to SEQ ID NO: 231665
  misc_feature (64)..(73): n is a, c, g, or t
  misc_feature (80)..(137): n is a, c, g, or t

SEQ ID NO: 415983 - DNA, 751 bp, Homo Sapiens; identical to SEQ ID NO: 231667
  misc_feature (159)..(169): n is a, c, g, or t
  misc_feature (438)..(446): n is a, c, g, or t

SEQ ID NO: 415984 - DNA, 435 bp, Homo Sapiens; identical to SEQ ID NO: 33063

SEQ ID NO: 415985 - DNA, 773 bp, Homo Sapiens; identical to SEQ ID NO: 231669
  misc_feature (473)..(473): n is a, c, g, or t
  misc_feature (508)..(508): n is a, c, g, or t
  misc_feature (656)..(668): n is a, c, g, or t

SEQ ID NO: 415986 - DNA, 159 bp, Homo Sapiens; identical to SEQ ID NO: 301620

SEQ ID NO: 415987 - DNA, 343 bp, Homo Sapiens; identical to SEQ ID NO: 301622

SEQ ID NO: 415988 - DNA, 316 bp, Homo Sapiens
ggatatttgtaagtacttgttcattgtggaaatgtgtccttgactaaaaccatacgtggctatggaaaccatgtttgtagttctgaatacacaggttttgtgtgtatttactctatgtattaaattattattgcccttagtttaaagtaaggattacaattggatttaagtagatcactgaatgttattgtttatgaaacttaactttttgtatgctgcttataaacatgatctataaatcagtgcttgggaaaattttactttcttaatctactgatacaggaataaaatatgaacaattaaacaggttgatcct

SEQ ID NO: 415989 - DNA, 614 bp, Homo Sapiens; identical to SEQ ID NO: 263932
  misc_feature (111)..(244): n is a, c, g, or t
  misc_feature (257)..(320): n is a, c, g, or t
  misc_feature (326)..(480): n is a, c, g, or t
  misc_feature (487)..(496): n is a, c, g, or t

SEQ ID NO: 415990 - DNA, 343 bp, Homo Sapiens; identical to SEQ ID NO: 231675

SEQ ID NO: 415991 - DNA, 116 bp, Homo Sapiens; identical to SEQ ID NO: 231677

SEQ ID NO: 415992 - DNA, 1117 bp, Homo Sapiens; identical to SEQ ID NO: 231681
  misc_feature (241)..(311): n is a, c, g, or t
  misc_feature (367)..(401): n is a, c, g, or t
  misc_feature (409)..(423): n is a, c, g, or t
  misc_feature (476)..(484): n is a, c, g, or t
  misc_feature (556)..(564): n is a, c, g, or t
  misc_feature (682)..(682): n is a, c, g, or t
  misc_feature (771)..(771): n is a, c, g, or t
  misc_feature (921)..(921): n is a, c, g, or t
  misc_feature (954)..(954): n is a, c, g, or t
  misc_feature (1030)..(1039): n is a, c, g, or t

SEQ ID NO: 415993 - DNA, 813 bp, Homo Sapiens; identical to SEQ ID NO: 231682
  misc_feature (139)..(147): n is a, c, g, or t
  misc_feature (197)..(218): n is a, c, g, or t
  misc_feature (461)..(509): n is a, c, g, or t

SEQ ID NO: 415994 - DNA, 432 bp, Homo Sapiens; identical to SEQ ID NO: 231683
  misc_feature (61)..(72): n is a, c, g, or t
  misc_feature (334)..(345): n is a, c, g, or t

SEQ ID NO: 415995 - DNA, 813 bp, Homo Sapiens; identical to SEQ ID NO: 231689
  misc_feature (192)..(203): n is a, c, g, or t
  misc_feature (216)..(304): n is a, c, g, or t
  misc_feature (321)..(330): n is a, c, g, or t
  misc_feature (342)..(342): n is a, c, g, or t
  misc_feature (348)..(411): n is a, c, g, or t
  misc_feature (480)..(480): n is a, c, g, or t
  misc_feature (632)..(654): n is a, c, g, or t
  misc_feature (753)..(770): n is a, c, g, or t

SEQ ID NO: 415996 - DNA, 645 bp, Homo Sapiens; identical to SEQ ID NO: 33069

SEQ ID NO: 415997 - DNA, 795 bp, Homo Sapiens; identical to SEQ ID NO: 231694
  misc_feature (221)..(284): n is a, c, g, or t
  misc_feature (369)..(369): n is a, c, g, or t
  misc_feature (546)..(546): n is a, c, g, or t
  misc_feature (626)..(626): n is a, c, g, or t
  misc_feature (640)..(641): n is a, c, g, or t
  misc_feature (763)..(763): n is a, c, g, or t

SEQ ID NO: 415998 - DNA, 135 bp, Homo Sapiens; identical to SEQ ID NO: 301633

SEQ ID NO: 415999 - DNA, 208 bp, Homo Sapiens; identical to SEQ ID NO: 301634
  misc_feature (138)..(155): n is a, c, g, or t

SEQ ID NO: 416000 - DNA, 651 bp, Homo Sapiens; identical to SEQ ID NO: 231695
  misc_feature (110)..(110): n is a, c, g, or t
  misc_feature (113)..(115): n is a, c, g, or t
  misc_feature (117)..(118): n is a, c, g, or t
  misc_feature (120)..(120): n is a, c, g, or t
  misc_feature (123)..(124): n is a, c, g, or t
  misc_feature (126)..(127): n is a, c, g, or t
  misc_feature (132)..(159): n is a, c, g, or t
  misc_feature (173)..(176): n is a, c, g, or t
  misc_feature (178)..(178): n is a, c, g, or t
  misc_feature (190)..(216): n is a, c, g, or t
  misc_feature (343)..(362): n is a, c, g, or t

SEQ ID NO: 416001 - DNA, 170 bp, Homo Sapiens; identical to SEQ ID NO: 301637

SEQ ID NO: 416002 - DNA, 470 bp, Homo Sapiens
  misc_feature (281)..(281): n is a, c, g, or t
gggtgagaaggaaactctagccgactccggcttgcgcacttctggcggtctccttggacatttccacacgggacgcctgtgttcaagctcgctgactttccttctttaatctctgatggtcgttatctgtgggcccactggactatctcgcgcgtgcacgcggaaccggaggtgggtggagggtggaatgagagagaaacccatccgcagaaggaggggccctaccttactcagtcttttacccccggacagaaacaaaaccccaggggcccctcttcganacccaacttgcggccgggttcctttccagactcttccccggaaaacctagaatccgggacctttgccctttcctaatcccggggggggttcccaaccccaattttaaaaaccccccctgaagggttccctaaaaggggggaaagtgggccaaaaggaaattccccgcgattaggggggttgtcgacatt

SEQ ID NO: 416003 - DNA, 755 bp, Homo Sapiens; identical to SEQ ID NO: 231702
  misc_feature (166)..(222): n is a, c, g, or t
  misc_feature (224)..(224): n is a, c, g, or t
  misc_feature (235)..(244): n is a, c, g, or t
  misc_feature (278)..(325): n is a, c, g, or t
  misc_feature (460)..(497): n is a, c, g, or t
  misc_feature (583)..(642): n is a, c, g, or t

SEQ ID NO: 416004 - DNA, 317 bp, Homo Sapiens; identical to SEQ ID NO: 301639

SEQ ID NO: 416005 - DNA, 408 bp, Homo Sapiens; identical to SEQ ID NO: 231704
  misc_feature (52)..(120): n is a, c, g, or t
  misc_feature (145)..(156): n is a, c, g, or t
  misc_feature (209)..(221): n is a, c, g, or t
  misc_feature (253)..(294): n is a, c, g, or t

SEQ ID NO: 416006 - DNA, 163 bp, Homo Sapiens; identical to SEQ ID NO: 301641

SEQ ID NO: 416007 - DNA, 189 bp, Homo Sapiens; identical to SEQ ID NO: 301642

SEQ ID NO: 416008 - DNA, 744 bp, Homo Sapiens; identical to SEQ ID NO: 231710
  misc_feature (134)..(224): n is a, c, g, or t
  misc_feature (309)..(376): n is a, c, g, or t
  misc_feature (552)..(552): n is a, c, g, or t
  misc_feature (712)..(712): n is a, c, g, or t

SEQ ID NO: 416009 - DNA, 141 bp, Homo Sapiens; identical to SEQ ID NO: 301645

SEQ ID NO: 416010 - DNA, 815 bp, Homo Sapiens; identical to SEQ ID NO: 301646
  misc_feature (198)..(212): n is a, c, g, or t
  misc_feature (428)..(436): n is a, c, g, or t

SEQ ID NO: 416011 - DNA, 312 bp, Homo Sapiens; identical to SEQ ID NO: 301647

SEQ ID NO: 416012 - DNA, 427 bp, Homo Sapiens; identical to SEQ ID NO: 301648
  misc_feature (392)..(392): n is a, c, g, or t
  misc_feature (400)..(400): n is a, c, g, or t
  misc_feature (402)..(402): n is a, c, g, or t

SEQ ID NO: 416013 - DNA, 158 bp, Homo Sapiens; identical to SEQ ID NO: 301649

SEQ ID NO: 416014 - DNA, 878 bp, Homo Sapiens; identical to SEQ ID NO: 231718
  misc_feature (543)..(543): n is a, c, g, or t
  misc_feature (590)..(590): n is a, c, g, or t
  misc_feature (633)..(633): n is a, c, g, or t

SEQ ID NO: 416015 - DNA, 1193 bp, Homo Sapiens; identical to SEQ ID NO: 231719
  misc_feature (571)..(571): n is a, c, g, or t
  misc_feature (725)..(725): n is a, c, g, or t
  misc_feature (771)..(771): n is a, c, g, or t
  misc_feature (881)..(881): n is a, c, g, or t
  misc_feature (1095)..(1095): n is a, c, g, or t
  misc_feature (1116)..(1116): n is a, c, g, or t

SEQ ID NO: 416016 - DNA, 144 bp, Homo Sapiens; identical to SEQ ID NO: 231720

SEQ ID NO: 416017 - DNA, 710 bp, Homo Sapiens; identical to SEQ ID NO: 231721
  misc_feature (76)..(86): n is a, c, g, or t
  misc_feature (206)..(227): n is a, c, g, or t
  misc_feature (255)..(274): n is a, c, g, or t
  misc_feature (327)..(367): n is a, c, g, or t

SEQ ID NO: 416018 - DNA, 502 bp, Homo Sapiens; identical to SEQ ID NO: 231724
  misc_feature (60)..(68): n is a, c, g, or t

SEQ ID NO: 416019 - DNA, 161 bp, Homo Sapiens; identical to SEQ ID NO: 301655

SEQ ID NO: 416020 - DNA, 282 bp, Homo Sapiens; identical to SEQ ID NO: 301656

SEQ ID NO: 416021 - DNA, 241 bp, Homo Sapiens; identical to SEQ ID NO: 301657

SEQ ID NO: 416022 - DNA, 348 bp, Homo Sapiens; identical to SEQ ID NO: 231727
  misc_feature (152)..(197): n is a, c, g, or t
  misc_feature (259)..(308): n is a, c, g, or t

SEQ ID NO: 416023 - DNA, 792 bp, Homo Sapiens; identical to SEQ ID NO: 231730
  misc_feature (388)..(423): n is a, c, g, or t
  misc_feature (537)..(579): n is a, c, g, or t

SEQ ID NO: 416024 - DNA, 116 bp, Homo Sapiens; identical to SEQ ID NO: 231731

SEQ ID NO: 416025 - DNA, 651 bp, Homo Sapiens; identical to SEQ ID NO: 231732
  misc_feature (432)..(432): n is a, c, g, or t

SEQ ID NO: 416026 - DNA, 557 bp, Homo Sapiens; identical to SEQ ID NO: 231733
  misc_feature (57)..(65): n is a, c, g, or t
  misc_feature (201)..(227): n is a, c, g, or t
  misc_feature (262)..(320): n is a, c, g, or t
  misc_feature (342)..(424): n is a, c, g, or t
  misc_feature (460)..(460): n is a, c, g, or t
  misc_feature (472)..(486): n is a, c, g, or t

SEQ ID NO: 416027 - DNA, 719 bp, Homo Sapiens; identical to SEQ ID NO: 231734
  misc_feature (292)..(511): n is a, c, g, or t

SEQ ID NO: 416028 - DNA, 647 bp, Homo Sapiens; identical to SEQ ID NO: 33074

SEQ ID NO: 416029 - DNA, 219 bp, Homo Sapiens; identical to SEQ ID NO: 301669

SEQ ID NO: 416030 - DNA, 1020 bp, Homo Sapiens; identical to SEQ ID NO: 231737
  misc_feature (105)..(385): n is a, c, g, or t
  misc_feature (778)..(778): n is a, c, g, or t
  misc_feature (819)..(819): n is a, c, g, or t

SEQ ID NO: 416031 - DNA, 582 bp, Homo Sapiens; identical to SEQ ID NO: 231739
  misc_feature (180)..(180): n is a, c, g, or t
  misc_feature (500)..(500): n is a, c, g, or t

SEQ ID NO: 416032 - DNA, 655 bp, Homo Sapiens; identical to SEQ ID NO: 231745
  misc_feature (44)..(44): n is a, c, g, or t
  misc_feature (61)..(61): n is a, c, g, or t
  misc_feature (85)..(85): n is a, c, g, or t
  misc_feature (130)..(130): n is a, c, g, or t
  misc_feature (138)..(138): n is a, c, g, or t
  misc_feature (143)..(143): n is a, c, g, or t
  misc_feature (150)..(150): n is a, c, g, or t
  misc_feature (214)..(214): n is a, c, g, or t
  misc_feature (246)..(246): n is a, c, g, or t
  misc_feature (272)..(272): n is a, c, g, or t
  misc_feature (295)..(295): n is a, c, g, or t
  misc_feature (303)..(303): n is a, c, g, or t
  misc_feature (318)..(318): n is a, c, g, or t
  misc_feature (375)..(375): n is a, c, g, or t
  misc_feature (467)..(467): n is a, c, g, or t
  misc_feature (559)..(559): n is a, c, g, or t
  misc_feature (603)..(603): n is a, c, g, or t
  misc_feature (629)..(629): n is a, c, g, or t

SEQ ID NO: 416033 - DNA, 804 bp, Homo Sapiens; identical to SEQ ID NO: 231749
  misc_feature (144)..(287): n is a, c, g, or t
  misc_feature (308)..(356): n is a, c, g, or t
  misc_feature (370)..(378): n is a, c, g, or t
  misc_feature (389)..(397): n is a, c, g, or t
  misc_feature (528)..(536): n is a, c, g, or t

SEQ ID NO: 416034 - DNA, 635 bp, Homo Sapiens; identical to SEQ ID NO: 231750
  misc_feature (163)..(163): n is a, c, g, or t
  misc_feature (391)..(391): n is a, c, g, or t
  misc_feature (488)..(488): n is a, c, g, or t
  misc_feature (497)..(497): n is a, c, g, or t

SEQ ID NO: 416035 - DNA, 336 bp, Homo Sapiens; identical to SEQ ID NO: 301678

SEQ ID NO: 416036 - DNA, 702 bp, Homo Sapiens; identical to SEQ ID NO: 231751
  misc_feature (60)..(75): n is a, c, g, or t
  misc_feature (263)..(276): n is a, c, g, or t
  misc_feature (550)..(550): n is a, c, g, or t

SEQ ID NO: 416037 - DNA, 320 bp, Homo Sapiens; identical to SEQ ID NO: 231755
  misc_feature (51)..(52): n is a, c, g, or t
  misc_feature (55)..(55): n is a, c, g, or t
  misc_feature (57)..(57): n is a, c, g, or t
  misc_feature (59)..(81): n is a, c, g, or t
  misc_feature (115)..(123): n is a, c, g, or t
  misc_feature (175)..(225): n is a, c, g, or t

SEQ ID NO: 416038 - DNA, 260 bp, Homo Sapiens; identical to SEQ ID NO: 301681
  misc_feature (74)..(91): n is a, c, g, or t

SEQ ID NO: 416039 - DNA, 957 bp, Homo Sapiens; identical to SEQ ID NO: 231761
  misc_feature (275)..(283): n is a, c, g, or t
  misc_feature (455)..(469): n is a, c, g, or t

SEQ ID NO: 416040 - DNA, 912 bp, Homo Sapiens; identical to SEQ ID NO: 231763
  misc_feature (482)..(482): n is a, c, g, or t
  misc_feature (589)..(589): n is a, c, g, or t
  misc_feature (641)..(641): n is a, c, g, or t
  misc_feature (674)..(674): n is a, c, g, or t
  misc_feature (735)..(735): n is a, c, g, or t
  misc_feature (779)..(779): n is a, c, g, or t
  misc_feature (791)..(791): n is a, c, g, or t
  misc_feature (810)..(810): n is a, c, g, or t
  misc_feature (828)..(828): n is a, c, g, or t
  misc_feature (834)..(834): n is a, c, g, or t

SEQ ID NO: 416041 - DNA, 865 bp, Homo Sapiens; identical to SEQ ID NO: 231764
  misc_feature (148)..(281): n is a, c, g, or t
  misc_feature (297)..(297): n is a, c, g, or t
  misc_feature (300)..(301): n is a, c, g, or t
  misc_feature (311)..(325): n is a, c, g, or t
  misc_feature (350)..(362): n is a, c, g, or t
  misc_feature (403)..(427): n is a, c, g, or t
  misc_feature (449)..(460): n is a, c, g, or t
  misc_feature (506)..(536): n is a, c, g, or t
  misc_feature (593)..(604): n is a, c, g, or t
  misc_feature (626)..(634): n is a, c, g, or t
  misc_feature (677)..(689): n is a, c, g, or t

SEQ ID NO: 416042 - DNA, 349 bp, Homo Sapiens
ggcagctagccagtgccgggccagtgtggagaaagctgaattgcctgtgaagctggggttgcaggcaggaatattcatggagcccctgaccatgtactcatactgctcttcctcagttcagggttcttggatttgctcaagtccacccaaatatccctttacgattctcagggtcccactccttccagatccaatgccctaaactttacataagagttccggcaaggctgtgacttcaacttgtgttgtaactgcaacctgcacaatcaaatttagggttatgttttcagatgtatcaggcttacggctacaagatattaaagagattcttttctgggtattacaccgg

SEQ ID NO: 416043 - DNA, 103 bp, Homo Sapiens; identical to SEQ ID NO: 301686

SEQ ID NO: 416044 - DNA, 183 bp, Homo Sapiens; identical to SEQ ID NO: 301687
  misc_feature (105)..(132): n is a, c, g, or t

SEQ ID NO: 416045 - DNA, 168 bp, Homo Sapiens; identical to SEQ ID NO: 301689

SEQ ID NO: 416046 - DNA, 892 bp, Homo Sapiens; identical to SEQ ID NO: 231772
  misc_feature (366)..(366): n is a, c, g, or t
  misc_feature (585)..(585): n is a, c, g, or t
  misc_feature (604)..(604): n is a, c, g, or t

SEQ ID NO: 416047 - DNA, 218 bp, Homo Sapiens; identical to SEQ ID NO: 301692

SEQ ID NO: 416048 - DNA, 161 bp, Homo Sapiens; identical to SEQ ID NO: 301693

SEQ ID NO: 416049 - DNA, 971 bp, Homo Sapiens; identical to SEQ ID NO: 231774
  misc_feature (400)..(416): n is a, c, g, or t
  misc_feature (441)..(441): n is a, c, g, or t
  misc_feature (486)..(527): n is a, c, g, or t
  misc_feature (542)..(551): n is a, c, g, or t
  misc_feature (600)..(600): n is a, c, g, or t
  misc_feature (759)..(759): n is a, c, g, or t
  misc_feature (860)..(860): n is a, c, g, or t
  misc_feature (862)..(862): n is a, c, g, or t

SEQ ID NO: 416050 - DNA, 305 bp, Homo Sapiens; identical to SEQ ID NO: 301695

SEQ ID NO: 416051 - DNA, 1065 bp, Homo Sapiens; identical to SEQ ID NO: 301696
  misc_feature (275)..(288): n is a, c, g, or t
  misc_feature (801)..(801): n is a, c, g, or t
  misc_feature (806)..(809): n is a, c, g, or t
  misc_feature (814)..(815): n is a, c, g, or t
  misc_feature (826)..(827): n is a, c, g, or t
  misc_feature (1023)..(1023): n is a, c, g, or t

SEQ ID NO: 416052 - DNA, 332 bp, Homo Sapiens
gggcccgcgtgacctcaccgctgcggggcgatggagcgaaaagtgaggaaactgaagtcccgggagagacagtggcaaggtcaagtagcaaagtgcactcagccctcccagcaaggagtctgccactcgcgcttgaaggacgtgtttgaagagctgctttcccagtgggatgctgccttaaagtcttgattccctggcactctttcctattactacattttatcggtgctgtttgtgttatgcaacggtagcatcgtgtctccggaagataaaaaaggtctcgatacaaacatccataaccttccacccactccgtcaggaacaacccaatc

SEQ ID NO: 416053 - DNA, 186 bp, Homo Sapiens; identical to SEQ ID NO: 301697

SEQ ID NO: 416054 - DNA, 319 bp, Homo Sapiens; identical to SEQ ID NO: 231780
  misc_feature (48)..(108): n is a, c, g, or t
  misc_feature (180)..(188): n is a, c, g, or t
  misc_feature (211)..(274): n is a, c, g, or t

SEQ ID NO: 416055 - DNA, 178 bp, Homo Sapiens; identical to SEQ ID NO: 301700

SEQ ID NO: 416056 - DNA, 157 bp, Homo Sapiens; identical to SEQ ID NO: 301701

SEQ ID NO: 416057 - DNA, 1144 bp, Homo Sapiens; identical to SEQ ID NO: 231791
  misc_feature (45)..(212): n is a, c, g, or t
  misc_feature (639)..(639): n is a, c, g, or t
  misc_feature (943)..(943): n is a, c, g, or t

SEQ ID NO: 416058 - DNA, 970 bp, Homo Sapiens; identical to SEQ ID NO: 231792
  misc_feature (170)..(202): n is a, c, g, or t
  misc_feature (227)..(276): n is a, c, g, or t
  misc_feature (357)..(440): n is a, c, g, or t
  misc_feature (671)..(671): n is a, c, g, or t
  misc_feature (795)..(795): n is a, c, g, or t

SEQ ID NO: 416059 - DNA, 526 bp, Homo Sapiens; identical to SEQ ID NO: 301704
  misc_feature (268)..(394): n is a, c, g, or t
  misc_feature (403)..(416): n is a, c, g, or t
  misc_feature (441)..(451): n is a, c, g, or t

SEQ ID NO: 416060 - DNA, 395 bp, Homo Sapiens; identical to SEQ ID NO: 301706
  misc_feature (364)..(364): n is a, c, g, or t

SEQ ID NO: 416061 - DNA, 260 bp, Homo Sapiens; identical to SEQ ID NO: 301707
  misc_feature (129)..(180): n is a, c, g, or t

SEQ ID NO: 416062 - DNA, 326 bp, Homo Sapiens; identical to SEQ ID NO: 231795
  misc_feature (52)..(67): n is a, c, g, or t
  misc_feature (111)..(122): n is a, c, g, or t

SEQ ID NO: 416063 - DNA, 893 bp, Homo Sapiens; identical to SEQ ID NO: 231798
  misc_feature (423)..(423): n is a, c, g, or t
  misc_feature (562)..(625): n is a, c, g, or t

SEQ ID NO: 416064 - DNA, 826 bp, Homo Sapiens; identical to SEQ ID NO: 33078

SEQ ID NO: 416065 - DNA, 828 bp, Homo Sapiens; identical to SEQ ID NO: 231800
  misc_feature (79)..(93): n is a, c, g, or t
  misc_feature (251)..(278): n is a, c, g, or t
  misc_feature (431)..(446): n is a, c, g, or t
  misc_feature (475)..(475): n is a, c, g, or t
  misc_feature (593)..(593): n is a, c, g, or t
  misc_feature (743)..(743): n is a, c, g, or t

SEQ ID NO: 416066 - DNA, 121 bp, Homo Sapiens; identical to SEQ ID NO: 301713

SEQ ID NO: 416067 - DNA, 196 bp, Homo Sapiens; identical to SEQ ID NO: 301714

SEQ ID NO: 416068 - DNA, 1124 bp, Homo Sapiens; identical to SEQ ID NO: 231802
  misc_feature (191)..(208): n is a, c, g, or t
  misc_feature (486)..(486): n is a, c, g, or t
  misc_feature (499)..(499): n is a, c, g, or t
  misc_feature (545)..(545): n is a, c, g, or t
  misc_feature (551)..(551): n is a, c, g, or t
  misc_feature (684)..(684): n is a, c, g, or t
  misc_feature (926)..(926): n is a, c, g, or t

SEQ ID NO: 416069 - DNA, 475 bp, Homo Sapiens; identical to SEQ ID NO: 231806
  misc_feature (152)..(152): n is a, c, g, or t
  misc_feature (229)..(229): n is a, c, g, or t

SEQ ID NO: 416070 - DNA, 275 bp, Homo Sapiens; identical to SEQ ID NO: 231808
  misc_feature (62)..(70): n is a, c, g, or t
  misc_feature (211)..(234): n is a, c, g, or t

SEQ ID NO: 416071 - DNA, 571 bp, Homo Sapiens; identical to SEQ ID NO: 231810
  misc_feature (244)..(256): n is a, c, g, or t

SEQ ID NO: 416072 - DNA, 173 bp, Homo Sapiens; identical to SEQ ID NO: 301720

SEQ ID NO: 416073 - DNA, 132 bp, Homo Sapiens; identical to SEQ ID NO: 231815
  misc_feature (55)..(55): n is a, c, g, or t

SEQ ID NO: 416074 - DNA, 137 bp, Homo Sapiens; identical to SEQ ID NO: 301722

SEQ ID NO: 416075 - DNA, 126 bp, Homo Sapiens; identical to SEQ ID NO: 301723

SEQ ID NO: 416076 - DNA, 125 bp, Homo Sapiens; identical to SEQ ID NO: 301725

SEQ ID NO: 416077 - DNA, 214 bp, Homo Sapiens
ggggactcattcagaaaagcatccctggatgtgaatgaggaccctccttaaacaggaatggagaggttgagctggtcatttccaaccttagcttcaaggcagaactggaattagtttcaaaataaaccttgatcctaggcacttagttctagaagatcctacaagcacgtctgctgtaactctatgtatgttttctgtaaaatcacatacctat

SEQ ID NO: 416078 - DNA, 322 bp, Homo Sapiens; identical to SEQ ID NO: 301726
  misc_feature (72)..(112): n is a, c, g, or t

SEQ ID NO: 416079 - DNA, 303 bp, Homo Sapiens; identical to SEQ ID NO: 301727
  misc_feature (72)..(242): n is a, c, g, or t
  misc_feature (248)..(263): n is a, c, g, or t

SEQ ID NO: 416080 - DNA, 747 bp, Homo Sapiens; identical to SEQ ID NO: 231827
  misc_feature (320)..(320): n is a, c, g, or t
  misc_feature (486)..(486): n is a, c, g, or t
  misc_feature (523)..(523): n is a, c, g, or t

SEQ ID NO: 416081 - DNA, 944 bp, Homo Sapiens; identical to SEQ ID NO: 231832
  misc_feature (44)..(64): n is a, c, g, or t
  misc_feature (101)..(110): n is a, c, g, or t
  misc_feature (228)..(350): n is a, c, g, or t
  misc_feature (758)..(778): n is a, c, g, or t

SEQ ID NO: 416082 - DNA, 152 bp, Homo Sapiens; identical to SEQ ID NO: 301731

SEQ ID NO: 416083 - DNA, 141 bp, Homo Sapiens; identical to SEQ ID NO: 301732

SEQ ID NO: 416084 - DNA, 136 bp, Homo Sapiens; identical to SEQ ID NO: 231835
  misc_feature (50)..(50): n is a, c, g, or t
  misc_feature (66)..(67): n is a, c, g, or t

SEQ ID NO: 416085 - DNA, 1115 bp, Homo Sapiens; identical to SEQ ID NO: 231844
  misc_feature (1014)..(1014): n is a, c, g, or t

SEQ ID NO: 416086 - DNA, 229 bp, Homo Sapiens; identical to SEQ ID NO: 301737

SEQ ID NO: 416087 - DNA, 194 bp, Homo Sapiens; identical to SEQ ID NO: 301738

SEQ ID NO: 416088 - DNA, 830 bp, Homo Sapiens; identical to SEQ ID NO: 231849
  misc_feature (172)..(210): n is a, c, g, or t
  misc_feature (582)..(592): n is a, c, g, or t

SEQ ID NO: 416089 - DNA, 353 bp, Homo Sapiens; identical to SEQ ID NO: 231854
  misc_feature (119)..(260): n is a, c, g, or t
  misc_feature (263)..(266): n is a, c, g, or t
  misc_feature (268)..(281): n is a, c, g, or t
  misc_feature (289)..(307): n is a, c, g, or t

SEQ ID NO: 416090 - DNA, 406 bp, Homo Sapiens; identical to SEQ ID NO: 33087

SEQ ID NO: 416091 - DNA, 332 bp, Homo Sapiens; identical to SEQ ID NO: 231859
  misc_feature (76)..(85): n is a, c, g, or t
  misc_feature (105)..(163): n is a, c, g, or t
  misc_feature (190)..(200): n is a, c, g, or t

SEQ ID NO: 416092 - DNA, 427 bp, Homo Sapiens; identical to SEQ ID NO: 33089

SEQ ID NO: 416093 - DNA, 115 bp, Homo Sapiens
gggacatggtagggcaaaagcatcttcaaactaaagactccaaaatgctaactcagaaagaaagaaaaaacccgttttcaattctaatgaaacagcaacaacattttttttaatt

SEQ ID NO: 416094 - DNA, 163 bp, Homo Sapiens
ggttcacagtgactagtcatatactggagtagctctgttgttcattatttgtaacaggtccatgtaacagtcaagttagcattcaagcaattatggatgtgatactatgatgtacttttgttatgattgtatatgattaataacaaagttatttttcttacta

SEQ ID NO: 416095 - DNA, 105 bp, Homo Sapiens; identical to SEQ ID NO: 301749
  misc_feature (64)..(64): n is a, c, g, or t

SEQ ID NO: 416096 - DNA, 238 bp, Homo Sapiens; identical to SEQ ID NO: 231866
  misc_feature (48)..(64): n is a, c, g, or t
  misc_feature (106)..(135): n is a, c, g, or t

SEQ ID NO: 416097 - DNA, 603 bp, Homo Sapiens; identical to SEQ ID NO: 301752
  misc_feature (108)..(219): n is a, c, g, or t
  misc_feature (355)..(414): n is a, c, g, or t

SEQ ID NO: 416098 - DNA, 318 bp, Homo Sapiens; identical to SEQ ID NO: 301753
  misc_feature (126)..(135): n is a, c, g, or t

SEQ ID NO: 416099 - DNA, 325 bp, Homo Sapiens; identical to SEQ ID NO: 301754

SEQ ID NO: 416100 - DNA, 562 bp, Homo Sapiens; identical to SEQ ID NO: 33093

SEQ ID NO: 416101 - DNA, 897 bp, Homo Sapiens; identical to SEQ ID NO: 231875
  misc_feature (542)..(593): n is a, c, g, or t
  misc_feature (675)..(768): n is a, c, g, or t
  misc_feature (879)..(879): n is a, c, g, or t

SEQ ID NO: 416102 - DNA, 766 bp, Homo Sapiens; identical to SEQ ID NO: 33094

SEQ ID NO: 416103 - DNA, 613 bp, Homo Sapiens; identical to SEQ ID NO: 231876
  misc_feature (247)..(327): n is a, c, g, or t
  misc_feature (335)..(336): n is a, c, g, or t
  misc_feature (552)..(572): n is a, c, g, or t

SEQ ID NO: 416104 - DNA, 762 bp, Homo Sapiens; identical to SEQ ID NO: 231877
  misc_feature (716)..(716): n is a, c, g, or t

SEQ ID NO: 416105 - DNA, 785 bp, Homo Sapiens; identical to SEQ ID NO: 301761
  misc_feature (618)..(621): n is a, c, g, or t
  misc_feature (623)..(627): n is a, c, g, or t
  misc_feature (629)..(630): n is a, c, g, or t
  misc_feature (632)..(634): n is a, c, g, or t
  misc_feature (637)..(637): n is a, c, g, or t
  misc_feature (645)..(646): n is a, c, g, or t
  misc_feature (650)..(650): n is a, c, g, or t
  misc_feature (652)..(653): n is a, c, g, or t
  misc_feature (656)..(656): n is a, c, g, or t
  misc_feature (719)..(727): n is a, c, g, or t

SEQ ID NO: 416106 - DNA, 940 bp, Homo Sapiens; identical to SEQ ID NO: 231878
  misc_feature (864)..(864): n is a, c, g, or t

SEQ ID NO: 416107 - DNA, 768 bp, Homo Sapiens; identical to SEQ ID NO: 231879
  misc_feature (652)..(702): n is a, c, g, or t

SEQ ID NO: 416108 - DNA, 820 bp, Homo Sapiens; identical to SEQ ID NO: 231880
  misc_feature (486)..(550): n is a, c, g, or t
  misc_feature (767)..(775): n is a, c, g, or t

SEQ ID NO: 416109 - DNA, 778 bp, Homo Sapiens; identical to SEQ ID NO: 301765
  misc_feature (547)..(547): n is a, c, g, or t

SEQ ID NO: 416110 - DNA, 383 bp, Homo Sapiens; identical to SEQ ID NO: 33098

SEQ ID NO: 416111 - DNA, 841 bp, Homo Sapiens; identical to SEQ ID NO: 301767
  misc_feature (733)..(741): n is a, c, g, or t

SEQ ID NO: 416112 - DNA, 739 bp, Homo Sapiens; identical to SEQ ID NO: 33099

SEQ ID NO: 416113 - DNA, 908 bp, Homo Sapiens; identical to SEQ ID NO: 231881
  misc_feature (598)..(625): n is a, c, g, or t
  misc_feature (636)..(636): n is a, c, g, or t

SEQ ID NO: 416114 - DNA, 832 bp, Homo Sapiens; identical to SEQ ID NO: 33100

SEQ ID NO: 416115 - DNA, 793 bp, Homo Sapiens; identical to SEQ ID NO: 33101

SEQ ID NO: 416116 - DNA, 289 bp, Homo Sapiens; identical to SEQ ID NO: 231882

SEQ ID NO: 416117 - DNA, 992 bp, Homo Sapiens; identical to SEQ ID NO: 231883
  misc_feature (326)..(334): n is a, c, g, or t
  misc_feature (434)..(442): n is a, c, g, or t
  misc_feature (651)..(661): n is a, c, g, or t
  misc_feature (675)..(675): n is a, c, g, or t

SEQ ID NO: 416118 - DNA, 544 bp, Homo Sapiens; identical to SEQ ID NO: 33105

SEQ ID NO: 416119 - DNA, 799 bp, Homo Sapiens; identical to SEQ ID NO: 301776
  misc_feature (676)..(731): n is a, c, g, or t

SEQ ID NO: 416120 - DNA, 780 bp, Homo Sapiens; identical to SEQ ID NO: 301777
  misc_feature (612)..(612): n is a, c, g, or t

SEQ ID NO: 416121 - DNA, 840 bp, Homo Sapiens; identical to SEQ ID NO: 231886
  misc_feature (756)..(756): n is a, c, g, or t
  misc_feature (772)..(782): n is a, c, g, or t

SEQ ID NO: 416122 - DNA, 813 bp, Homo Sapiens; identical to SEQ ID NO: 301779
  misc_feature (465)..(465): n is a, c, g, or t
  misc_feature (747)..(748): n is a, c, g, or t
  misc_feature (770)..(770): n is a, c, g, or t

SEQ ID NO: 416123 - DNA, 901 bp, Homo Sapiens; identical to SEQ ID NO: 33108

SEQ ID NO: 416124 - DNA, 885 bp, Homo Sapiens; identical to SEQ ID NO: 231887
  misc_feature (401)..(409): n is a, c, g, or t
  misc_feature (488)..(537): n is a, c, g, or t
  misc_feature (540)..(576): n is a, c, g, or t
  misc_feature (649)..(723): n is a, c, g, or t

SEQ ID NO: 416125 - DNA, 761 bp, Homo Sapiens; identical to SEQ ID NO: 301782
  misc_feature (663)..(671): n is a, c, g, or t

SEQ ID NO: 416126 - DNA, 813 bp, Homo Sapiens; identical to SEQ ID NO: 301783
  misc_feature (540)..(540): n is a, c, g, or t
  misc_feature (634)..(634): n is a, c, g, or t
  misc_feature (641)..(641): n is a, c, g, or t
  misc_feature (704)..(715): n is a, c, g, or t

SEQ ID NO: 416127 - DNA, 799 bp, Homo Sapiens; identical to SEQ ID NO: 33109

SEQ ID NO: 416128 - DNA, 760 bp, Homo Sapiens; identical to SEQ ID NO: 33110

SEQ ID NO: 416129 - DNA, 445 bp, Homo Sapiens; identical to SEQ ID NO: 33111

SEQ ID NO: 416130 - DNA, 558 bp, Homo Sapiens; identical to SEQ ID NO: 33113

SEQ ID NO: 416131 - DNA, 776 bp, Homo Sapiens; identical to SEQ ID NO: 33114

SEQ ID NO: 416132 - DNA, 812 bp, Homo Sapiens; identical to SEQ ID NO: 33116

SEQ ID NO: 416133 - DNA, 835 bp, Homo Sapiens; identical to SEQ ID NO: 231888
  misc_feature (692)..(702): n is a, c, g, or t

SEQ ID NO: 416134 - DNA, 772 bp, Homo Sapiens; identical to SEQ ID NO: 301792
  misc_feature (614)..(614): n is a, c, g, or t

SEQ ID NO: 416135 - DNA, 873 bp, Homo Sapiens; identical to SEQ ID NO: 33117

SEQ ID NO: 416136 - DNA, 988 bp, Homo Sapiens; identical to SEQ ID NO: 231890
  misc_feature (225)..(282): n is a, c, g, or t
  misc_feature (341)..(384): n is a, c, g, or t

SEQ ID NO: 416137 - DNA, 763 bp, Homo Sapiens; identical to SEQ ID NO: 33119

SEQ ID NO: 416138 - DNA, 437 bp, Homo Sapiens; identical to SEQ ID NO: 33121

SEQ ID NO: 416139 - DNA, 588 bp, Homo Sapiens; identical to SEQ ID NO: 301796
  misc_feature (563)..(563): n is a, c, g, or t

SEQ ID NO: 416140 - DNA, 224 bp, Homo Sapiens; identical to SEQ ID NO: 301797

SEQ ID NO: 416141 - DNA, 477 bp, Homo Sapiens; identical to SEQ ID NO: 33124

SEQ ID NO: 416142 - DNA, 828 bp, Homo Sapiens; identical to SEQ ID NO: 33125

SEQ ID NO: 416143 - DNA, 812 bp, Homo Sapiens; identical to SEQ ID NO: 301801
  misc_feature (545)..(606): n is a, c, g, or t

SEQ ID NO: 416144 - DNA, 759 bp, Homo Sapiens; identical to SEQ ID NO: 33127

SEQ ID NO: 416145 - DNA, 808 bp, Homo Sapiens; identical to SEQ ID NO: 33128

SEQ ID NO: 416146 - DNA, 761 bp, Homo Sapiens; identical to SEQ ID NO: 301804
  misc_feature (660)..(660): n is a, c, g, or t

SEQ ID NO: 416147 - DNA, 763 bp, Homo Sapiens; identical to SEQ ID NO: 33129

SEQ ID NO: 416148 - DNA, 750 bp, Homo Sapiens; identical to SEQ ID NO: 33130

SEQ ID NO: 416149 - DNA, 736 bp, Homo Sapiens; identical to SEQ ID NO: 231896
  misc_feature (80)..(97): n is a, c, g, or t
  misc_feature (147)..(166): n is a, c, g, or t
  misc_feature (609)..(686): n is a, c, g, or t

SEQ ID NO: 416150 - DNA, 890 bp, Homo Sapiens; identical to SEQ ID NO: 231897
  misc_feature (272)..(372): n is a, c, g, or t
  misc_feature (375)..(375): n is a, c, g, or t
  misc_feature (740)..(754): n is a, c, g, or t

SEQ ID NO: 416151 - DNA, 858 bp, Homo Sapiens; identical to SEQ ID NO: 231898
  misc_feature (411)..(542): n is a, c, g, or t
  misc_feature (576)..(611): n is a, c, g, or t

SEQ ID NO: 416152 - DNA, 735 bp, Homo Sapiens; identical to SEQ ID NO: 33131

SEQ ID NO: 416153 - DNA, 519 bp, Homo Sapiens; identical to SEQ ID NO: 33132

SEQ ID NO: 416154 - DNA, 857 bp, Homo Sapiens; identical to SEQ ID NO: 33134

SEQ ID NO: 416155 - DNA, 901 bp, Homo Sapiens; identical to SEQ ID NO: 231900
  misc_feature (395)..(403): n is a, c, g, or t
  misc_feature (463)..(473): n is a, c, g, or t
  misc_feature (530)..(531): n is a, c, g, or t
  misc_feature (538)..(538): n is a, c, g, or t
  misc_feature (543)..(543): n is a, c, g, or t
  misc_feature (545)..(554): n is a, c, g, or t
  misc_feature (641)..(703): n is a, c, g, or t

SEQ ID NO: 416156 - DNA, 697 bp, Homo Sapiens; identical to SEQ ID NO: 33135

SEQ ID NO: 416157 - DNA, 890 bp, Homo Sapiens; identical to SEQ ID NO: 231901
  misc_feature (166)..(224): n is a, c, g, or t

SEQ ID NO: 416158 - DNA, 781 bp, Homo Sapiens; identical to SEQ ID NO: 301815
  misc_feature (556)..(594): n is a, c, g, or t

SEQ ID NO: 416159 - DNA, 589 bp, Homo Sapiens; identical to SEQ ID NO: 301816
  misc_feature (349)..(351): n is a, c, g, or t
  misc_feature (353)..(366): n is a, c, g, or t
  misc_feature (388)..(543): n is a, c, g, or t

SEQ ID NO: 416160 - DNA, 774 bp, Homo Sapiens; identical to SEQ ID NO: 33136

SEQ ID NO: 416161 - DNA, 793 bp, Homo Sapiens; identical to SEQ ID NO: 33137

SEQ ID NO: 416162 - DNA, 653 bp, Homo Sapiens; identical to SEQ ID NO: 33139

SEQ ID NO: 416163 - DNA, 773 bp, Homo Sapiens; identical to SEQ ID NO: 33141

SEQ ID NO: 416164 - DNA, 851 bp, Homo Sapiens; identical to SEQ ID NO: 231905
  misc_feature (338)..(338): n is a, c, g, or t
  misc_feature (674)..(731): n is a, c, g, or t

SEQ ID NO: 416165 - DNA, 855 bp, Homo Sapiens; identical to SEQ ID NO: 231906
  misc_feature (288)..(429): n is a, c, g, or t
  misc_feature (541)..(581): n is a, c, g, or t
  misc_feature (650)..(720): n is a, c, g, or t

SEQ ID NO: 416166 - DNA, 840 bp, Homo Sapiens; identical to SEQ ID NO: 301825
  misc_feature (577)..(588): n is a, c, g, or t

SEQ ID NO: 416167 - DNA, 758 bp, Homo Sapiens; identical to SEQ ID NO: 33142

SEQ ID NO: 416168 - DNA, 431 bp, Homo Sapiens; identical to SEQ ID NO: 301827
  misc_feature (189)..(254): n is a, c, g, or t

SEQ ID NO: 416169 - DNA, 373 bp, Homo Sapiens; identical to SEQ ID NO: 33145

SEQ ID NO: 416170 - DNA, 873 bp, Homo Sapiens; identical to SEQ ID NO: 231907
  misc_feature (397)..(476): n is a, c, g, or t
  misc_feature (523)..(557): n is a, c, g, or t
  misc_feature (583)..(621): n is a, c, g, or t

SEQ ID NO: 416171 - DNA, 755 bp, Homo Sapiens; identical to SEQ ID NO: 301830
  misc_feature (195)..(250): n is a, c, g, or t
  misc_feature (492)..(515): n is a, c, g, or t

SEQ ID NO: 416172 - DNA, 813 bp, Homo Sapiens; identical to SEQ ID NO: 33147

SEQ ID NO: 416173 - DNA, 750 bp, Homo Sapiens; identical to SEQ ID NO: 33148

SEQ ID NO: 416174 - DNA, 906 bp, Homo Sapiens; identical to SEQ ID NO: 231909
  misc_feature (321)..(432): n is a, c, g, or t
  misc_feature (501)..(517): n is a, c, g, or t
  misc_feature (519)..(527): n is a, c, g, or t
  misc_feature (529)..(536): n is a, c, g, or t
  misc_feature (538)..(539): n is a, c, g, or t
  misc_feature (541)..(547): n is a, c, g, or t
  misc_feature (549)..(551): n is a, c, g, or t
  misc_feature (553)..(714): n is a, c, g, or t
  misc_feature (758)..(758): n is a, c, g, or t

SEQ ID NO: 416175 - DNA, 796 bp, Homo Sapiens; identical to SEQ ID NO: 301835
  misc_feature (619)..(627): n is a, c, g, or t

SEQ ID NO: 416176 - DNA, 865 bp, Homo Sapiens; identical to SEQ ID NO: 301836
  misc_feature (527)..(527): n is a, c, g, or t

SEQ ID NO: 416177 - DNA, 847 bp, Homo Sapiens; identical to SEQ ID NO: 231910
  misc_feature (326)..(326): n is a, c, g, or t
  misc_feature (399)..(411): n is a, c, g, or t
  misc_feature (577)..(604): n is a, c, g, or t
  misc_feature (705)..(792): n is a, c, g, or t

SEQ ID NO: 416178 - DNA, 792 bp, Homo Sapiens; identical to SEQ ID NO: 33150

SEQ ID NO: 416179 - DNA, 159 bp, Homo Sapiens; identical to SEQ ID NO: 301839

SEQ ID NO: 416180 - DNA, 706 bp, Homo Sapiens; identical to SEQ ID NO: 33151

SEQ ID NO: 416181 - DNA, 665 bp, Homo Sapiens; identical to SEQ ID NO: 301841
  misc_feature (622)..(622): n is a, c, g, or t

SEQ ID NO: 416182 - DNA, 366 bp, Homo Sapiens; identical to SEQ ID NO: 33152

SEQ ID NO: 416183 - DNA, 915 bp, Homo Sapiens; identical to SEQ ID NO: 231912
  misc_feature (737)..(737): n is a, c, g, or t

SEQ ID NO: 416184 - DNA, 775 bp, Homo Sapiens; identical to SEQ ID NO: 33155

SEQ ID NO: 416185 - DNA, 741 bp, Homo Sapiens; identical to SEQ ID NO: 33156

SEQ ID NO: 416186 - DNA, 742 bp, Homo Sapiens; identical to SEQ ID NO: 33159

SEQ ID NO: 416187 - DNA, 491 bp, Homo Sapiens; identical to SEQ ID NO: 33160

SEQ ID NO: 416188 - DNA, 823 bp, Homo Sapiens; identical to SEQ ID NO: 301851
  misc_feature (705)..(778): n is a, c, g, or t

SEQ ID NO: 416189 - DNA, 1024 bp, Homo Sapiens; identical to SEQ ID NO: 231915
  misc_feature (121)..(122): n is a, c, g, or t
  misc_feature (158)..(158): n is a, c, g, or t
  misc_feature (276)..(316): n is a, c, g, or t
  misc_feature (389)..(399): n is a, c, g, or t
  misc_feature (417)..(476): n is a, c, g, or t
  misc_feature (862)..(870): n is a, c, g, or t

SEQ ID NO: 416190 - DNA, 624 bp, Homo Sapiens; identical to SEQ ID NO: 231916
  misc_feature (260)..(346): n is a, c, g, or t

SEQ ID NO: 416191 - DNA, 764 bp, Homo Sapiens; identical to SEQ ID NO: 301855
  misc_feature (595)..(595): n is a, c, g, or t
  misc_feature (717)..(717): n is a, c, g, or t

SEQ ID NO: 416192 - DNA, 836 bp, Homo Sapiens; identical to SEQ ID NO: 33163

SEQ ID NO: 416193 - DNA, 595 bp, Homo Sapiens; identical to SEQ ID NO: 33164

SEQ ID NO: 416194 - DNA, 792 bp, Homo Sapiens; identical to SEQ ID NO: 33165

SEQ ID NO: 416195 - DNA, 841 bp, Homo Sapiens; identical to SEQ ID NO: 231919
  misc_feature (357)..(432): n is a, c, g, or t
  misc_feature (450)..(459): n is a, c, g, or t
  misc_feature (688)..(698): n is a, c, g, or t

SEQ ID NO: 416196 - DNA, 669 bp, Homo Sapiens; identical to SEQ ID NO: 301861
  misc_feature (204)..(214): n is a, c, g, or t
  misc_feature (521)..(521): n is a, c, g, or t
  misc_feature (538)..(538): n is a, c, g, or t
  misc_feature (547)..(547): n is a, c, g, or t
  misc_feature (556)..(556): n is a, c, g, or t
  misc_feature (622)..(622): n is a, c, g, or t

SEQ ID NO: 416197 - DNA, 786 bp, Homo Sapiens; identical to SEQ ID NO: 33168

SEQ ID NO: 416198 - DNA, 896 bp, Homo Sapiens; identical to SEQ ID NO: 231920
  misc_feature (105)..(117): n is a, c, g, or t
  misc_feature (221)..(229): n is a, c, g, or t
  misc_feature (545)..(546): n is a, c, g, or t
  misc_feature (549)..(550): n is a, c, g, or t
  misc_feature (627)..(627): n is a, c, g, or t
  misc_feature (782)..(782): n is a, c, g, or t
  misc_feature (816)..(816): n is a, c, g, or t

SEQ ID NO: 416199 - DNA, 308 bp, Homo Sapiens
gggtttgttgctaaaaacataatgttccatgaacatgatgttactacagaaagtttattgatgagataactgtttgaaataactttcaattataccttatgtgagacttttatgttctgtgctgacaatgtgtactcaaatgtctataagcctgatattctacaacctcagatgtatctagtggatagtaaccattaacagatgactaatttgtttcactgtatcaaatttcagatgtttagttcaatggtaatgctgactacacattcactgtattaaatacaaaagaaaataatctttcccacgta

SEQ ID NO: 416200 - DNA, 166 bp, Homo Sapiens; identical to SEQ ID NO: 231929

SEQ ID NO: 416201 - DNA, 292 bp, Homo Sapiens; identical to SEQ ID NO: 301865

SEQ ID NO: 416202 - DNA, 388 bp, Homo Sapiens; identical to SEQ ID NO: 301868

SEQ ID NO: 416203 - DNA, 404 bp, Homo Sapiens; identical to SEQ ID NO: 33174

SEQ ID NO: 416204 - DNA, 406 bp, Homo Sapiens; identical to SEQ ID NO: 301870
  misc_feature (168)..(219): n is a, c, g, or t
  misc_feature (228)..(322): n is a, c, g, or t

SEQ ID NO: 416205 - DNA, 112 bp, Homo Sapiens; identical to SEQ ID NO: 301871

SEQ ID NO: 416206 - DNA, 147 bp, Homo Sapiens; identical to SEQ ID NO: 301872

SEQ ID NO: 416207 - DNA, 144 bp, Homo Sapiens; identical to SEQ ID NO: 301873

SEQ ID NO: 416208 - DNA, 262 bp, Homo Sapiens; identical to SEQ ID NO: 301874
  misc_feature (119)..(210): n is a, c, g, or t

SEQ ID NO: 416209 - DNA, 104 bp, Homo Sapiens; identical to SEQ ID NO: 301875

SEQ ID NO: 416210 - DNA, 123 bp, Homo Sapiens; identical to SEQ ID NO: 301876

SEQ ID NO: 416211 - DNA, 641 bp, Homo Sapiens; identical to SEQ ID NO: 231946
  misc_feature (140)..(259): n is a, c, g, or t
  misc_feature (391)..(399): n is a, c, g, or t
  misc_feature (500)..(509): n is a, c, g, or t

SEQ ID NO: 416212 - DNA, 463 bp, Homo Sapiens; identical to SEQ ID NO: 231950
  misc_feature (47)..(203): n is a, c, g, or t
  misc_feature (258)..(376): n is a, c, g, or t
  misc_feature (396)..(416): n is a, c, g, or t

SEQ ID NO: 416213 - DNA, 171 bp, Homo Sapiens; identical to SEQ ID NO: 301880

SEQ ID NO: 416214 - DNA, 264 bp, Homo Sapiens; identical to SEQ ID NO: 301881
  misc_feature (160)..(175): n is a, c, g, or t

SEQ ID NO: 416215 - DNA, 294 bp, Homo Sapiens; identical to SEQ ID NO: 301882

SEQ ID NO: 416216 - DNA, 782 bp, Homo Sapiens; identical to SEQ ID NO: 301883
  misc_feature (55)..(193): n is a, c, g, or t
  misc_feature (323)..(391): n is a, c, g, or t
  misc_feature (659)..(667): n is a, c, g, or t

SEQ ID NO: 416217 - DNA, 1016 bp, Homo Sapiens; identical to SEQ ID NO: 231956
  misc_feature (530)..(530): n is a, c, g, or t
  misc_feature (610)..(610): n is a, c, g, or t

SEQ ID NO: 416218 - DNA, 885 bp, Homo Sapiens; identical to SEQ ID NO: 301886
  misc_feature (310)..(381): n is a, c, g, or t
  misc_feature (489)..(548): n is a, c, g, or t
  misc_feature (569)..(569): n is a, c, g, or t
  misc_feature (576)..(576): n is a, c, g, or t

SEQ ID NO: 416219 - DNA, 884 bp, Homo Sapiens; identical to SEQ ID NO: 33180

SEQ ID NO: 416220 - DNA, 559 bp, Homo Sapiens; identical to SEQ ID NO: 33183

SEQ ID NO: 416221 - DNA, 862 bp, Homo Sapiens; identical to SEQ ID NO: 301892
  misc_feature (437)..(491): n is a, c, g, or t
  misc_feature (814)..(814): n is a, c, g, or t

SEQ ID NO: 416222 - DNA, 980 bp, Homo Sapiens; identical to SEQ ID NO: 33184

SEQ ID NO: 416223 - DNA, 680 bp, Homo Sapiens; identical to SEQ ID NO: 97970
  misc_feature (353)..(547): n is a, c, g, or t

SEQ ID NO: 416224 - DNA, 998 bp, Homo Sapiens; identical to SEQ ID NO: 231963
  misc_feature (102)..(158): n is a, c, g, or t
  misc_feature (189)..(189): n is a, c, g, or t
  misc_feature (195)..(195): n is a, c, g, or t

SEQ ID NO: 416225 - DNA, 790 bp, Homo Sapiens; identical to SEQ ID NO: 33186

SEQ ID NO: 416226 - DNA, 963 bp, Homo Sapiens; identical to SEQ ID NO: 231965
  misc_feature (583)..(629): n is a, c, g, or t

SEQ ID NO: 416227 - DNA, 552 bp, Homo Sapiens; identical to SEQ ID NO: 231969
  misc_feature (144)..(144): n is a, c, g, or t
  misc_feature (260)..(260): n is a, c, g, or t
  misc_feature (326)..(326): n is a, c, g, or t

SEQ ID NO: 416228 - DNA, 761 bp, Homo Sapiens; identical to SEQ ID NO: 301899
  misc_feature (668)..(668): n is a, c, g, or t
  misc_feature (696)..(696): n is a, c, g, or t

SEQ ID NO: 416229 - DNA, 651 bp, Homo Sapiens; identical to SEQ ID NO: 33188

SEQ ID NO: 416230 - DNA, 555 bp, Homo Sapiens; identical to SEQ ID NO: 301901
  misc_feature (145)..(153): n is a, c, g, or t
  misc_feature (354)..(354): n is a, c, g, or t
  misc_feature (489)..(489): n is a, c, g, or t

SEQ ID NO: 416231 - DNA, 890 bp, Homo Sapiens; identical to SEQ ID NO: 231976
  misc_feature (302)..(350): n is a, c, g, or t
  misc_feature (386)..(468): n is a, c, g, or t
  misc_feature (567)..(673): n is a, c, g, or t
  misc_feature (728)..(728): n is a, c, g, or t
  misc_feature (749)..(749): n is a, c, g, or t
  misc_feature (754)..(754): n is a, c, g, or t
  misc_feature (756)..(756): n is a, c, g, or t

SEQ ID NO: 416232 - DNA, 1250 bp, Homo Sapiens; identical to SEQ ID NO: 231982
  misc_feature (664)..(664): n is a, c, g, or t
  misc_feature (1205)..(1205): n is a, c, g, or t

SEQ ID NO: 416233 - DNA, 640 bp, Homo Sapiens; identical to SEQ ID NO: 301904
  misc_feature (211)..(272): n is a, c, g, or t
  misc_feature (285)..(474): n is a, c, g, or t

SEQ ID NO: 416234 - DNA, 670 bp, Homo Sapiens; identical to SEQ ID NO: 33197

SEQ ID NO: 416235 - DNA, 837 bp, Homo Sapiens; identical to SEQ ID NO: 33200

SEQ ID NO: 416236 - DNA, 1037 bp, Homo Sapiens; identical to SEQ ID NO: 231992
  misc_feature (109)..(383): n is a, c, g, or t

SEQ ID NO: 416237 - DNA, 1280 bp, Homo Sapiens; identical to SEQ ID NO: 231994
  misc_feature (540)..(540): n is a, c, g, or t
  misc_feature (707)..(707): n is a, c, g, or t
  misc_feature (748)..(748): n is a, c, g, or t
  misc_feature (1050)..(1050): n is a, c, g, or t
  misc_feature (1134)..(1134): n is a, c, g, or t
  misc_feature (1232)..(1232): n is a, c, g, or t

SEQ ID NO: 416238 - DNA, 840 bp, Homo Sapiens; identical to SEQ ID NO: 301909
  misc_feature (670)..(670): n is a, c, g, or t
  misc_feature (732)..(743): n is a, c, g, or t
  misc_feature (749)..(749): n is a, c, g, or t
  misc_feature (753)..(754): n is a, c, g, or t
  misc_feature (760)..(762): n is a, c, g, or t

SEQ ID NO: 416239 - DNA, 216 bp, Homo Sapiens; identical to SEQ ID NO: 231995
  misc_feature (42)..(42): n is a, c, g, or t
  misc_feature (53)..(54): n is a, c, g, or t

SEQ ID NO: 416240 - DNA, 398 bp, Homo Sapiens; identical to SEQ ID NO: 33205

SEQ ID NO: 416241 - DNA, 706 bp, Homo Sapiens; identical to SEQ ID NO: 301913
  misc_feature (48)..(60): n is a, c, g, or t

SEQ ID NO: 416242 - DNA, 879 bp, Homo Sapiens; identical to SEQ ID NO: 301914
  misc_feature (55)..(68): n is a, c, g, or t
  misc_feature (461)..(471): n is a, c, g, or t

SEQ ID NO: 416243 - DNA, 961 bp, Homo Sapiens; identical to SEQ ID NO: 301915
  misc_feature (264)..(278): n is a, c, g, or t
  misc_feature (292)..(462): n is a, c, g, or t

SEQ ID NO: 416244 - DNA, 447 bp, Homo Sapiens; identical to SEQ ID NO: 301916
  misc_feature (302)..(391): n is a, c, g, or t

SEQ ID NO: 416245 - DNA, 516 bp, Homo Sapiens; identical to SEQ ID NO: 232011
  misc_feature (67)..(276): n is a, c, g, or t

SEQ ID NO: 416246 - DNA, 721 bp, Homo Sapiens; identical to SEQ ID NO: 301918
  misc_feature (423)..(518): n is a, c, g, or t
  misc_feature (522)..(522): n is a, c, g, or t

SEQ ID NO: 416247 - DNA, 728 bp, Homo Sapiens; identical to SEQ ID NO: 232019
  misc_feature (147)..(560): n is a, c, g, or t

SEQ ID NO: 416248 - DNA, 764 bp, Homo Sapiens; identical to SEQ ID NO: 301921
  misc_feature (149)..(430): n is a, c, g, or t

SEQ ID NO: 416249 - DNA, 817 bp, Homo Sapiens
  misc_feature (597)..(597): n is a, c, g, or t
gggggggtgactggagagctcattgcagaccacgtggtcctccagggtggctctccaccttcgggtcctggtatttccagtcaagtgggtttcaattcttgggttttgccgcccttatgatgaagtgtgtgtttgatgccagtgagaaactcagtctggcaggctacaaaattctactccaagaaatacccagcaaccttctgtttgttccaaagcaactagcttatcatgcaagcaaattttgctgactccaggctttatctttaggaaaacaaaaaaaccaaagtattatcagcaggtgggaaagatttttctattgaaaatttatccctgacaactcagcgtttagaaaagaaataaaatgtgccacttccagaggtgctgcattgcagttgttcagggctagggccaggcaggacaagtgaatgggtgggacaggtggctgcctaaggaccacctcaggccactaaccccttgtggacaactgtgagtagctgggtttttccccccacctgctgtgcaacttcctgtgctttgaggttggactaacttgtcttcaggagctaatttaatgtacaggccctccccacgccccanccatacggtcactgcatttgggccagcctgctttcttaagtcgatgccctcctttctgataatccatctcccttcaggggaggttggggcccccactggactgggtggccaaaattgaaaactttaatgggagcttttaaggagacttcatgggtgggttccatggcaggggggttctgcccctcccgtgcttgatttacctgggggcctcgcgtggcga

SEQ ID NO: 416250 - DNA, 678 bp, Homo Sapiens; identical to SEQ ID NO: 301922
  misc_feature (126)..(134): n is a, c, g, or t
  misc_feature (145)..(254): n is a, c, g, or t
  misc_feature (340)..(477): n is a, c, g, or t
  misc_feature (485)..(494): n is a, c, g, or t

SEQ ID NO: 416251 - DNA, 795 bp, Homo Sapiens; identical to SEQ ID NO: 301923
  misc_feature (605)..(613): n is a, c, g, or t
  misc_feature (649)..(661): n is a, c, g, or t
  misc_feature (683)..(706): n is a, c, g, or t

SEQ ID NO: 416252 - DNA, 396 bp, Homo Sapiens; identical to SEQ ID NO: 33221

SEQ ID NO: 416253 - DNA, 967 bp, Homo Sapiens; identical to SEQ ID NO: 232034
  misc_feature (280)..(337): n is a, c, g, or t
  misc_feature (352)..(404): n is a, c, g, or t

SEQ ID NO: 416254 - DNA, 327 bp, Homo Sapiens; identical to SEQ ID NO: 232035
  misc_feature (250)..(250): n is a, c, g, or t

SEQ ID NO: 416255 - DNA, 565 bp, Homo Sapiens; identical to SEQ ID NO: 301928

SEQ ID NO: 416256 - DNA, 310 bp, Homo Sapiens; identical to SEQ ID NO: 301929
  misc_feature (127)..(159): n is a, c, g, or t

SEQ ID NO: 416257 - DNA, 781 bp, Homo Sapiens; identical to SEQ ID NO: 232042
  misc_feature (101)..(341): n is a, c, g, or t
  misc_feature (387)..(683): n is a, c, g, or t

SEQ ID NO: 416258 - DNA, 795 bp, Homo Sapiens; identical to SEQ ID NO: 301932
  misc_feature (454)..(499): n is a, c, g, or t
  misc_feature (775)..(775): n is a, c, g, or t

SEQ ID NO: 416259 - DNA, 676 bp, Homo Sapiens; identical to SEQ ID NO: 301933
  misc_feature (391)..(391): n is a, c, g, or t

SEQ ID NO: 416260 - DNA, 530 bp, Homo Sapiens; identical to SEQ ID NO: 33225

SEQ ID NO: 416261 - DNA, 219 bp, Homo Sapiens; identical to SEQ ID NO: 301935

SEQ ID NO: 416262 - DNA, 598 bp, Homo Sapiens; identical to SEQ ID NO: 33227

SEQ ID NO: 416263 - DNA, 401 bp, Homo Sapiens; identical to SEQ ID NO: 232051
  misc_feature (140)..(292): n is a, c, g, or t
  misc_feature (295)..(295): n is a, c, g, or t
  misc_feature (305)..(305): n is a, c, g, or t
  misc_feature (329)..(329): n is a, c, g, or t
  misc_feature (361)..(361): n is a, c, g, or t
  misc_feature (363)..(363): n is a, c, g, or t

SEQ ID NO: 416264 - DNA, 863 bp, Homo Sapiens; identical to SEQ ID NO: 232057
  misc_feature (312)..(327): n is a, c, g, or t
  misc_feature (354)..(354): n is a, c, g, or t
  misc_feature (368)..(370): n is a, c, g, or t
  misc_feature (375)..(375): n is a, c, g, or t
  misc_feature (383)..(383): n is a, c, g, or t

SEQ ID NO: 416265 - DNA, 1030 bp, Homo Sapiens; identical to SEQ ID NO: 232058
  misc_feature (887)..(887): n is a, c, g, or t

SEQ ID NO: 416266 - DNA, 835 bp, Homo Sapiens; identical to SEQ ID NO: 301941
  misc_feature (718)..(718): n is a, c, g, or t

SEQ ID NO: 416267 - DNA, 414 bp, Homo Sapiens; identical to SEQ ID NO: 33230

SEQ ID NO: 416268 - DNA, 540 bp, Homo Sapiens; identical to SEQ ID NO: 33232

SEQ ID NO: 416269 - DNA, 919 bp, Homo Sapiens; identical to SEQ ID NO: 232061
  misc_feature (215)..(215): n is a, c, g, or t
  misc_feature (217)..(383): n is a, c, g, or t
  misc_feature (393)..(407): n is a, c, g, or t
  misc_feature (435)..(448): n is a, c, g, or t
  misc_feature (461)..(469): n is a, c, g, or t
  misc_feature (493)..(503): n is a, c, g, or t
  misc_feature (547)..(556): n is a, c, g, or t
  misc_feature (696)..(705): n is a, c, g, or t
  misc_feature (723)..(743): n is a, c, g, or t

SEQ ID NO: 416270 - DNA, 890 bp, Homo Sapiens; identical to SEQ ID NO: 301944
  misc_feature (667)..(704): n is a, c, g, or t

SEQ ID NO: 416271 - DNA, 889 bp, Homo Sapiens
  misc_feature (26)..(27): n is a, c, g, or t
  misc_feature (91)..(91): n is a, c, g, or t
  misc_feature (311)..(395): n is a, c, g, or t
cggatcgaaatattaatttaaatatnnaagcacactttatttgaaaacaaaattcaaacaaataatgtcttagtgtggaaactgtacttanttttggaaatatatatcagatttagagatgccatattttttctcaaacctttaacttattctgtattttcacacaagaggtcactggctctcatgtaacacagacaagggaggagtttcttactccttcgaactatgttgatgtctttgccattatgctatcaagcaacatagaaataaaagggaggtgtcctttaccaaagagcatatgttttcagcannnnnnnnnnnnnnnnnnnnnnnnnnnnnnnnnnnnnnnnnnnnnnnnnnnnnnnnnnnnnnnnnnnnnnnnnnnnnnnnnnnnnttagcaaatatgcctatgactatagcttttctgtcacactcaaatctgtccttttcctttctgttctgacttctacacctgggtatagtatttcccttctttccctttgtaagcctcacagggaattcttaaaagctatgccatctccatatgccacttctacgcttgcctttatgatgtgcacatacaaacagccctggaacctatgggaccgtgtctcacaagaaaacattactacaactcttctactattcttggcccataccctctggaacaaacctctagctttcacttaaaagagcattgagctagtgggtacttagtagtaatgctgatcttccagatactccaataattggagtttctttccttatctgactaattactttatacttagtcatgtactatgaatgcacatattttcaaagtatatattattcctatcagagtgttctattggtaatgactcactttctacaatatatttccacatc

SEQ ID NO: 416272 - DNA, 818 bp, Homo Sapiens
  misc_feature (354)..(518): n is a, c, g, or t
gctgcctgagagtagcaagtgacaggtaagggctctgaaccttcctgcgtgctacccaaggagtgcctagggctaccaggaggcccagggaggaaccttgagacctgagaaaggcttttcttccccgagaggaccactgctcaggctcagaggccatggggtgaagtgcacaaaaaagtgggcgtccagccatgctctaagtcccccgaagatgaagaccagggagcagcttcctccaatgaagcagcagcaatcagaggaccaggaggctgaagccctgagcccagccagaggcaggatcagccaagtctgggacaggcttcaattattttaggcagagcttctggttcctgnnnnnnnnnnnnnnnnnnnnnnnnnnnnnnnnnnnnnnnnnnnnnnnnnnnnnnnnnnnnnnnnnnnnnnnnnnnnnnnnnnnnnnnnnnnnnnnnnnnnnnnnnnnnnnnnnnnnnnnnnnnnnnnnnnnnnnnnnnnnnnnnnnnnnnnnnnnnnnnnnnnnnctttgaagaagaccactgcgtcggtatttgtgaaatgttttgagcctctggatttaaataaggtgaaatataaaggatccttttcactactgggcacgcctaactgcatgtcttcttaacactgcttgtgatggtcattcataccaaaggacggaaacagaaagcacagatcacaaaatcctctggcccaatgggggaatctggacccctgaaaccgaaggaagcaggtggtcaatgttccctggagccccccactggccaggcccttcaagccttcttatgaagaaaaaggggtgggcc

SEQ ID NO: 416273 - DNA, 535 bp, Homo Sapiens
  misc_feature (138)..(178): n is a, c, g, or t
  misc_feature (187)..(309): n is a, c, g, or t
aaagatatatgaacacagatactgcctgtgcagacctaaattttagttttgtgtacctggatccatatacaaattttttgtggtttatagcataaaagcagaacgttgtttctttcttagttttcaaccggctcatcnnnnnnnnnnnnnnnnnnnnnnnnnnnnnnnnnnnnnnnnngagatggannnnnnnnnnnnnnnnnnnnnnnnnnnnnnnnnnnnnnnnnnnnnnnnnnnnnnnnnnnnnnnnnnnnnnnnnnnnnnnnnnnnnnnnnnnnnnnnnnnnnnnnnnnnnnnnnnnnnnnnnnncaccatggccgggtaaatttttggaattttaaggaaaagatgggggttttcacctatgttgggcccaagcctgggttctcaaaaccccgggacccccctgggatctgggccccaccttagaccttcccccaaaggggcttggggaaatttcaggggggttggaagcccccccaagggccccggggccaaatttttttcaaaagtggggcccccaaaacttttttta

SEQ ID NO: 416274 - DNA, 836 bp, Homo Sapiens
gacagggtctcactgtgttgtccaagctggagtacagtggctattcataggtgtgagcatcgtatgctatagcttcaaactcctgggttcaagccatcctccagccccagcctcctgagtagctgaggctacagccacgcccaccaccatgcccagcaaagcctttcttgatttgtacccaaattatttcataggtactaatgtagtttttcctaatttagttataaggtcctttatgttacttactttatctcatatttgtaggctttatctgtgctaagaacagtgttagacacatataaggtgattgtggtagctatctctatttccatattttttttcttatacattgaagtatgactttttctgtaaaagagatagaattgggtatccagaatcagaaagttttccaagagtgcaaaggagatttggaacttaaaagctgttaacatttttgctggactgcctgtttcaggatggcacataattatgctagaaaatctgtggaatagaggctgggctagtatttaggaaaatatggcagtataattgtggaaaaggagatatcagaaggaattaacaaagaatactgggactaagaggtgaatgagagcagattcatacacacattgagatgaccatgggtgtctcttaccactgtttggtttggtatatgaacaacacagaggtgggctgctactacaaccatgtgtgtggagtgttgcatggtggatcaccataataggatcaggtagaacaagcagtggagaagaacagaatcttagcaccttttctcttctagttcttggagctgttttctgctactgccagtggaa

SEQ ID NO: 416275 - DNA, 169 bp, Homo Sapiens
tagtctcagaatgaatggtgggaaaaggtatatttagcaactgttctttgattgatgaagcgaggaagggctattatattaagaacattcaagtgaaagcctctgaaaatcctcagatcaccaaaatagtgttcccaaagtaactctgcaatctgggggaaattcagtg

SEQ ID NO: 416276 - DNA, 876 bp, Homo Sapiens
  misc_feature (156)..(454): n is a, c, g, or t
  misc_feature (457)..(478): n is a, c, g, or t
ttttatctcattggccaacacttagccttgtagtctcattttgcagcaggggaggctaagaaatgtagtttttccatggggctcagagctttgatactaagaagagtatggatagcggatggccaccatgtgtctaccatgtctccttgactatannnnnnnnnnnnnnnnnnnnnnnnnnnnnnnnnnnnnnnnnnnnnnnnnnnnnnnnnnnnnnnnnnnnnnnnnnnnnnnnnnnnnnnnnnnnnnnnnnnnnnnnnnnnnnnnnnnnnnnnnnnnnnnnnnnnnnnnnnnnnnnnnnnnnnnnnnnnnnnnnnnnnnnnnnnnnnnnnnnnnnnnnnnnnnnnnnnnnnnnnnnnnnnnnnnnnnnnnnnnnnnnnnnnnnnnnnnnnnnnnnnnnnnnnnnnnnnnnnnnnnnnnnnnnnnnnnnnnnnnnnnnnnnnnnnnnnnnnnnttnnnnnnnnnnnnnnnnnnnnnngattcaaacattcaacattagcattccctaacctaacccacatcatgaccctgacaagaaaacaatggtatttgcatagcatgatgggtaaatgatggaagtagttcttagctgatggtcaccccggacactacctggcaccctccattcccagcactgcttgtggaagctctgttctaaatcactaggagaaaaaagaatctggtggcacatactctacaatgcaaaagacagcaaagtgatgaaacctccagaagtttgaccaccaagaggcatgacaatagtaaagatgagtctttgcccaatttttgacattaattgctccctgttttgaaaggcaaaattcttcagaatggggttcaaaaaggtgaaagccttttatccacagggggcttttg

SEQ ID NO: 416277 - DNA, 618 bp, Homo Sapiens
tgtgggaatgaatggctatttttctttctatttgaagttaaaagacgaagcaatcggagttttaaagagagaaacaattcctggaatagcattaggatcattggataactgtgtcttgctctttgcttctgacgggcgtcctcattttgtacgtgtgcacacccattttactaatgagtttcgagttgatcttcagcgtggggctccacagacaatgtgacatatctcccaagccaggtaaaataacatggagcaaacataaacagataaaactaaaacacagaatgtaaaggtagattcaaagttgtagctcacacttgcatgtctctctgtccctttctccctgtcttctttgtgctattttgctttcgaacaaccatggaatgggatgcccaattttgagtcattgtatacaatgaattctaaatcagttcctaaaatctgttttatttttatggaaaattgttgtgtctgtgactgccaacaaaaaggtttatttgcatatttcaaaagaatcctgaaagcaatttatttttgaatgcatgtttatatgcatatgcagggatgctattaaaaatgttaaacaactggatcaactcaggtatttagacttttcag

SEQ ID NO: 416278 - DNA, 857 bp, Homo Sapiens
  misc_feature (47)..(47): n is a, c, g, or t
ttcaaaactctaatcttcaggtttagaagagactggccatttgctantttgagagaatcaaagggtctcacgagtttttatcaatttccatgtcatgccctacacactgtgcacaatataaaagcatttggaatttaagagccagaagggacgtcagcattctttccaccaaaatgcctcatttaagatgagaaaacagaggcacacgctgggctcttgatgggtatttactgaagggaagagagaatgaagagtcttttccgaggtgctaggtggtggcagagcctaagctggaacccttggcttctggctgcctgataagtcagttctctgtccactctgccctatggcttctgttgtctctaaggatttttcagtaggaagacagaaaacacttgctccacaagcccatttatgaataaatgtgtaagcactttgacaaggcaatgggtcctggaatatgatctggtgaattagaattctccttcctaaagggctttttcctcaccttctaatgtaatacatatattcagttactttcagaaaccactagctgcaggtgaaaaccatgtggaatccaaaaaccacagctttgatatatgcattagcatttcctacctagcaggaattcggagagctactcaattttcaaggaaggctgaaatttagtctcatagaaaggaaaggctagagggaagagactggccaatgggattttcccatcagttgagataaaccaaagagcaagtaaccaaagggcatgactgattaaaatctctatcagcacaaagtgggctttagaaaatcattccccttttattagagaacatttacagtattaataaaaagggggaata

SEQ ID NO: 416279 - DNA, 1062 bp, Homo Sapiens
  misc_feature (20)..(21): n is a, c, g, or t
  misc_feature (592)..(592): n is a, c, g, or t
  misc_feature (597)..(598): n is a, c, g, or t
  misc_feature (603)..(604): n is a, c, g, or t
  misc_feature (821)..(821): n is a, c, g, or t
  misc_feature (825)..(825): n is a, c, g, or t
  misc_feature (830)..(830): n is a, c, g, or t
ggctggtaccggtccggaannttcagaataggggggcaggcggcacctcttacactgtaacaagagtaataaggaaggaaagggcatagatgcttatggtgatggagcataggtaggcttgctggcaagaagttaagggcattcccatttgatgctttctactctctgtctgaagcaggaggtgaggtcctcttgaaagcaagaagatgttggtggagagatttttaaaagagtggtggaagtttgagaaagagggcagatgagggggacagggaaggactgataagtggccttgagaaccttttgagggtcctcatggtgcactgtgcttataggggctgtgtgatggaggccgcgtgcacgaggccggcctggatgctcatgaggagtcttggtcgaagactagcaccggggtggtggcctctgggtgtgctccgtatgagcacgtctcgacctgggggttgggggttcccggctagagagtcagccgaggagggtccgcgcctgcgcttggctcccgcctgggggagctggggtactgttctgagccggtcttggggccaggaggccctgtggctgtctgtccttaagnggggnnggganntgggcctggacgggggggcgcctcggcggggcccccagcgtgtggtggcggggccgctatggtttgttgggcgtgggaaagggggcgcgtggggaggttgggtgctccggggctgccccgcacggtgcggggatgtgggaggagagagggcgtccgcaagaggctggccccggccggtgggtttgcgggggtaggctctgttcggcttacaaagggnggantggcngggtgcagcgggtcgggtgcgcagttttttatatttgacggctctggggtgggccgagtaaggtgcgttgtgttcgtcagagcggtgtccgagcgtcagcccgtcgtgtcacggagagtgtgcggggcgcaggctcacggtaggcggggatgggttcagccctgagcgtgggagttgacgcaatcgggagttaggtggcgctcagactgtgtgtcacagggagagggatggg

SEQ ID NO: 416280 - DNA, 875 bp, Homo Sapiens
  misc_feature (59)..(159): n is a, c, g, or t
  misc_feature (511)..(525): n is a, c, g, or t
aggctggaccggtccggattcccgggatctgccttccaacgagtacagtaggcaaaggnnnnnnnnnnnnnnnnnnnnnnnnnnnnnnnnnnnnnnnnnnnnnnnnnnnnnnnnnnnnnnnnnnnnnnnnnnnnnnnnnnnnnnnnnnnnnnnnnnnnnctgtcctcacattgctataaagaaatacctgagactgggtaatttatagagaaaagagatttggttcactcacgattctgtaggctgtactggaagcatagtggcttccacatcaggggaggtctcaggaaacttacaatcgtgacagaaggggaagcaggcacatcttacatggccagagcaagaggaagagggagagggggaaggtgctacgctttttaacagatcccgtgagaatgagctctatcatgggaacagcactaggaggatggtgccagatcattcatgagaaaccacccccacgatccaatcacttcccacgaggccctacctccaacattagggattaacnnnnnnnnnnnnnnnagtgtaaaaatatgaacttttgttgtcctatttctggggaaaagggttctactttccacactgagccagcagtgggcttgagttataatatgtagattccttttggttatagttgcagaagaagctattaaattcttgagggtttgacatctcctggaaagaagcaaactagaagatggaccaatgatctggattgcttaaaatgataacatttatagtaggatcctagttgacatgctattagtgttgaaataatcatgcctgtactggtcggtgagttcagtatcctggttggaaatacagttccagaccttttaggtggacatgttttgaattgagttccccattgt

SEQ ID NO: 416281 - DNA, 552 bp, Homo Sapiens
aagctggaccggtccggattcccgggatggaaaaattgtccacttttcagacggtacaaacaaaagtcttggaattgaatcttgaggtttccaattggcctgagatcacaggtctactctaagcagttgctgttataatggcatgtaactcaatgaccacaggaccactccagaggtgctgcagagcagggatcacaaactgagagccagtgcactgaatccaacccaaagatgtgctttgctaagccagcatggtgttttgagattttttatttaaacacctttggctgatgtctccactcttcagtttcttgaagaccctcctactccatgctcagcctaatttacacattgatattactgcctggttcgggaaagtatttaattttgcacactattacagatataacttaagaattctgtgcagctgaactaaatgatctttggggatcaattacctctgtgttgccagtatctagcatagtacctgcacacacagagctcatgcaaaggtgcttatagaattatactcattaatctactgatcacggc

SEQ ID NO: 416282 - DNA, 884 bp, Homo Sapiens
  misc_feature (702)..(792): n is a, c, g, or t
ggctggtccggtccggattcccgggatggatgattgtcattctttggagtcgttatatttgggtgagtgctggcactatgggtaggatattatttagaagctgagttgtgtgctgagcaaatgtttctttaaaaaccaaagccgtatgagatctgttatagaggcacagtgtggctaaatagtgtgcgataagataagcatagggctcctgaggtgttgctgttctcccactgtaatgaatttactcttcttcctaaggaaagtgatcctttatcacctctcctctcaaattcactggcttgtttcgtgagtgtgccttcatggaatcatgtctccttctcttccctcagttctctccttccctcccttacgtatgactcctcccataatccgcacacatggattgaaccaagtgagggtatttttctgtttcctacctcatagaagggcatagagtggacacggtctaaggttagttcctgaactgagtacccacatatgcagaactttatttaaagctgctgaaatctttgtataacagatagatcaataggactgaaaactactgatggttttacttacttgttgaacgtgactaagttccatggcaccatttagaaattgtgttgtatagttttcgtatgttgcttaagaaacagtttagcataatggttaaaagcatggcctctggaactagattgnnnnnnnnnnnnnnnnnnnnnnnnnnnnnnnnnnnnnnnnnnnnnnnnnnnnnnnnnnnnnnnnnnnnnnnnnnnnnnnnnnnnnnnnnnntgatttcatacaaaactgaattgtacttgacacttagtactcaggtattaactgggaccgttattatcatcacagatgttgttttccagcac

SEQ ID NO: 416283 - DNA, 672 bp, Homo Sapiens
  misc_feature (276)..(327): n is a, c, g, or t
agatgcaaaaaagagttatagctttccctaatagattatttgtaaccaataatatcttaagaggtcaagcgaggtgtctctcacttcagaagacatactgcaacatgtctcagaccttaaggatttaactgatgtttttggctaccaaacatccatgaggtgtttctcccaccctctcatacatatcttaataaggcatataggatatgtgaaacttcctccttttcaggtccagtgctaataccatgagtactgtttcatatacatatcataaannnnnnnnnnnnnnnnnnnnnnnnnnnnnnnnnnnnnnnnnnnnnnnnnnnngtactttaattttgttttgttgtctgtctcaggagagtagctataaactctacaaaaactttagtcttgaccttatagggctccagggatttggtcatagtagtttacgatgtgctgtctctatcctgtctgacagcctaatgcctaagtgtccagcttgttaccaggtagttctctcacagaacacttttttatacttgcagatgcccttgtgtctcttgtttgaactatgtccagtttattgctaccaagatagccacactcctagatagacccctgataggaaaacaacctaggttttagggatctggggtcaggccccgacacggaggaaagcaacttcac

SEQ ID NO: 416284 - DNA, 482 bp, Homo Sapiens
agcactgctgtttacccaggcttattcctactgtcaattctcaaaatcaaataaacaaaataaaagcccagtcagctaaatacgtaaaatattcagtcgtttcctgaccagattaaccagttccactgatcatgataaatgtcatgttatcccttattccagacattatgtttttgagggccacacacattacaaatgataaaatattctgcatcatttgggctgacagccagtcacttgtagcagtgacctgattgcctgcagaggactggtcaccattagggaggtggctaactgcatgaaagacaaaatagaaatgttagtgcttcaggaacaaagagttccaataaaacacaggaaagtcaaaacttaatatgcggagtaagcttgccaaacagtaccaaacaattcgggagatttattaaacagctagtaactatttcacttgtcagcctcagactccacaaatgcacccaggtcag

SEQ ID NO: 416285 - DNA, 735 bp, Homo Sapiens
  misc_feature (566)..(566): n is a, c, g, or t
gggaattcagtgccggagaaagtaagtgccccctgaagatcttttcttccccagagatcagacgaacagaagggcgggcctctcttcaatatcctctgaggtgctccccccttcttctggacccgcactttctagaggcaagagggtccccaccgtgcttaggccgctttaacaagcctgggaggcgtgggcccctcggtgtacactcgcgctcatcgccggggaaaaaaacctgcttacctctggggcctcctgttggggaaacggaaccctttcatttcctccctggagctgcaacacaataagttgccgacacaacgattcgaccttgctagggagcctctcattatatccttcttatcggcgtaaaacttcataacaagactggctgcaccacttgctttaatagggtggcggcatacaacccgccagttcttccgacttacttcttatcttcgcctccctgctttatccctgccctccccattttacacccgccagcgcttgtaactctcatacgacacaagaactcctcgtgttaatccaacacgcgattgcgcggcttntgcatggcgctcggctcacgccatattagggacgcctcgcggtgtgcatgtatgatgttaacgaaaaatatgccatgtgagtcgccaagcttttaccccccaacaaagaggtgggcgctcccatccaccgcttgtctgagcagtgggcgcgcctacgagatagtgattc

SEQ ID NO: 416286 - DNA, 855 bp, Homo Sapiens
  misc_feature (194)..(206): n is a, c, g, or t
  misc_feature (307)..(315): n is a, c, g, or t
tccctcatttataattgcctgtaatatttgtctctatatacatttataaccatatgatacagtattatacgtttttcttcaatcctataatttaaataactcaagagaagaagtaaagtccattttttaacccatattttttcttgccatgttctttcttccttcctgatgttccaactgtcctcaatttaacnnnnnnnnnnnnnagggtagacctgttagtgacaaattctgttagttttccctcatctctgtatgtcttaatttccctggatatttttgctgatatagtgttctaagttgatannnnnnnnncctttcagcactggaaaaaggtggtgacctccttcgggcttacacagtttctgatgaaaattttgctctgtcatttttttcacctgttagatgtcatttatctcactgctttcaagattctttttatctttaatttttagttaattactatgattttggtgtggctttctttgggtttgtcctatttggggttcactcaccttcttaaatcactaggtttatgtcttctgccaaatttgggaagttttcaaccatatttatttgataatttttttcagcttcactctctttttcctctcattttgggactctgagtacatgaacattaaatcttttgttatagccccatgggtccctgaggctttgtccattttttccagtgtattttctttcgttcttttgttcagattaagtgattgctattgctgtgtcttcaaggtagctaattctttcctctgttctctccttctgcctgctgagcttattttactgggccttttttaattttgggctatttgccacttttttaggttcctaaaa

SEQ ID NO: 416287 - DNA, 637 bp, Homo Sapiens
  misc_feature (495)..(585): n is a, c, g, or t
ttagatattcacctttcttttttaatgtatgcatttaaagctacaattttaattctcagaatgccattagctgtatctcaaaggtttgacagataatactttcatcgccattccactcaaaacattttcaaatttccaaggtgatttcttctttgattcatgaatatttagaagtatacagaaactatatagtgcaatgttctgtatatgtcaattaggccaagtgttttcaaatctttttgttctacgaactactgagagagtattaaaattacttttcccattagcagtggatgctaaaaagtagaaggaaattctgatgagcagcagcatatgtgcatggtcttaaagcatctccccacagactgcttattgattgcaaataggaaaaaaatagtaattatatagtggaaaaataagacagcacctcaaacaggagaataaaatcaacattaaaaaaatcagacagatgggcaacgtatgcctccagatctnnnnnnnnnnnnnnnnnnnnnnnnnnnnnnnnnnnnnnnnnnnnnnnnnnnnnnnnnnnnnnnnnnnnnnnnnnnnnnnnnnnnnnnnnnngaactggattaaaagagggggaatgtattaatcaaagaatgtcaatatcatt

SEQ ID NO: 416288 - DNA, 441 bp, Homo Sapiens
aggctggaccggtccggattcccgggatggatgttttagtccatgcaatttttaaagaattggccgattactaaattactagcttataaagagaaaaggagaaaattttccacaagtacatgaagaaactggagaagttatttaaatacaatcatgcctaggagaatgactaaagaaaatattgctccttaattagctgggaatggaaagctaatattagatgaaactaaaatgacagatgacttcactgttcttttttaacttgggctatgagaaaggaatccacagctgaggctttagggctgtttgccaccatgcatgggatgtctgaggagctgaagtttcccacttttgttgcccgtggcaaagactggccatagcacattaccccagctaaggtaatctttgactctgaccatcacaaagccaagcgaaaacaag

SEQ ID NO: 416289 - DNA, 539 bp, Homo Sapiens
tgaaaagcagatcagatgagcaataactgacttcgtggatcagaggaaactaaaattcatgccatgactgaaactccacactgactttaaatggagcagctagatccttctgatcccctctgtagccctaaaagaagacagacaatttacctcctggagaggccgaatcagaccattctgaatcagaaataggaagcactgctgagggtaggatgaggcatcttcatgaaagacatgtatttaagtgaaagttgacatacccactgaaaaataagactcctagccccttccttaactcaagtcccagcatgctggcagccaggttcgtacaccctttccctttccccatccctgctccctggagggaaattggggcattcttctgagagcaactgatgggtccaagagaaaagactatggagtttcccctaaggaaatggccccacataagctatagtgaagtccaacaactgacaagtctccccactccacgtggaagaggatcacttttgagaaagctccaaatatgaaatacacca

SEQ ID NO: 416290 - DNA, 637 bp, Homo Sapiens
  misc_feature (464)..(504): n is a, c, g, or t
atgaacaacctcagaaatgttcaggacgggggacctccaatgttggtttaagagaggaaacagagtgcaccggaaacgggaaaatgagtttaagatgccacactgaaaaggggagacttaggtgaagtctgcacaacattccccatggttctcctcaacttgaggctaagataccagcagccaagcctgcatccttgagacaggggctgatggttctttagagcaatgagcagacattcaaaaaccatgatatttcagagactgaataacaaaataacaaaaactcacacacaaagaaaaatagagaaaaagtatgaagggaaaaaatacaatattcttagtgagaaaatagaaggtattacataaaacataaaagaacaggatactattttaaaaagttccaagaccaaaatggagctgtaagatgtgaagtctaacatttgaatgagttctggaaagtgagnnnnnnnnnnnnnnnnnnnnnnnnnnnnnnnnnnnnnnnnntatttttccaaaacacaggggaaaaagcccagcaagtatgcagaacaaaagataaaagggacccatacgaaggcacgtcattgtgaaatttcagaagagtgcaaatgagaaaatcctaaaagcttccagaggt

SEQ ID NO: 416291 - DNA, 376 bp, Homo Sapiens
ctgattggggctgctgcctttgtttcagagatgccctgcccagtgaggaggaatctagagaggcagtctggccacagctgctttgctgcgttacgttgagttcctcccagtccttagtactgtcagaggaaaacagcctactcaagcctcagtaatggcagatgcccctccccccaccaagctgtgtcatccctggtcgacttcagacttgtgctggcagcgagaaattcaagccagtggttcttagcttgctggccttcatgggagtgggacctgctgagcgagaccacttggttccctggcttcagctccctttccaggcaagtgaacggttctgtcttgcctgggttccaggcaccactggagtaccgaataa

SEQ ID NO: 416292 - DNA, 671 bp, Homo Sapiens
  misc_feature (60)..(88): n is a, c, g, or t
tatgcacaaatggtacaaatggtgacttgaaaatgtttgtagatgttttcattattttgnnnnnnnnnnnnnnnnnnnnnnnnnnnnnctaagggttgaatttagtaaaggaagatgaaaattttctcctgagaactacaatcagagaagagattttgaaccaatagttttggaagaaataaggtgaaaaagaagaccggaatctgcgaacttctctctggtttttgaaaaatgtgcccatggaagtaatgtgatttggcacaaagatatcacaggcagaagaaggccgtatcccaggaatagggtggaggtttgagaaataacccctcaagctatgaaaactttaaatcgtcactttgtaagaccattcttacaatatacagctgatgtactgagtctctggattatggtaataactggcatgtgtgatgaataaattagagaaatagttttaaaactattggtattagctggagaaccagtcagataacaacatatgacttaaaaactatctaagtagggatattgtttacatcacctcagaacaaagggcgaaatgggaatggtgaagaaaacaattccaaataattttaataagcaaaagactataaatggaaattaatagcataatgctcatcaataatattttatttaattaattaggtaattaa

SEQ ID NO: 416293 - DNA, 770 bp, Homo Sapiens
gtactaaggacatacagcaaaagaaaaaacattcattcaagagaatttactaaatcttgggtaagaaaagtgaaaggctgggacatttaagcacagactactccattatggaccctatcagctccacatgatggaagctgtacttcaggtatctgtaccaaaaagaatgggattcatctcccccttcctactaccccaacctcacacctcccctgctcccagtttagggctatggtgaccaatgatgggcaggtagctggtgtttctcctacccccaccaagccctgtgttatggaagctctatttcaggcaggaatagcagacaaggtctctcttcccaaacagcctcttctcaaagacaaaaaccctacccccggtatggcagtctgaagacactagggctccaatttacctcagccctgactggctagtaggcagaaggtcctgcactagtaagaacaagctgagaacaccagatctgctccctctccccctgcagtgggtagtcactagaattagagaggggaggaagcccagagctttagtgcagtggtgcaagagttctgcccagtgggtaaggcagaccataaagagaaagaactttgcaagtctgcctgaagggactcacatccatgccctaagatgctgtcttgttggacaactgttaaagggaggctgggtacctctccaaaattttaaatgggctgaaaatcctttcaaaatttataaacggaacccccaaaacccccgggttcccgggtaaattttcc

SEQ ID NO: 416294 - DNA, 917 bp, Homo Sapiens
  misc_feature (68)..(200): n is a, c, g, or t
  misc_feature (202)..(212): n is a, c, g, or t
  misc_feature (624)..(664): n is a, c, g, or t
gggttcccagtaccatttcctctcaccaagcatgttaaaaattccatagggtgttggattggcaccannnnnnnnnnnnnnnnnnnnnnnnnnnnnnnnnnnnnnnnnnnnnnnnnnnnnnnnnnnnnnnnnnnnnnnnnnnnnnnnnnnnnnnnnnnnnnnnnnnnnnnnnnnnnnnnnnnnnnnnnnnnnnnnnnnnngnnnnnnnnnnntcaatggggcggtttaaggacccccaggtcagatccacccaggaccctaagtcaggcctcagacgtgggcccaggcaagaaatgcatggcctggaatccttgcaagtgttggctcttgggtccccaacaggtctaggagcacagctttggccagaagagattggcaatttcagccctgggacatttcaggtggcatctggagctgtggttaccccggtgacactgaaccaggctctctgtgcccttcacacagacacccaattactgagatgaggggctttgcagtacagatttgttcactaagataaagtccactgtttgcatccaattatttttgttattgttttgcaaacctaaatgtctgtatcaatatctcatggctagggttctgaagcaaaagctacaggatctnnnnnnnnnnnnnnnnnnnnnnnnnnnnnnnnnnnnnnnnncacgtatttttgtaaggtggttttgatcaccagggaaccaaatttggcttaaactttaaggagtacctcctaaattaaaagatttccgcccaaaccgggttcagtccagatatgtacatcgctaccgcctacgagtgcgaatgaaaatataaatgcggcctgctagctgatcacctcgagcagggtgatcatcgtcaacacggcattgggacctctctaaaaaaatactggggggacctggtgccccccgggt

SEQ ID NO: 416295 - DNA, 505 bp, Homo Sapiens
  misc_feature (449)..(449): n is a, c, g, or t
aaactagcttttgtatatatcatggaaccatcctgctctaacttcatattacaagaaaacagcaaacgtctacagaactagagtgtaatgagcccctctctacccattaattttactacacgtctgtgtgagcagtgtttggaaagaatgatcctagaccgaggtccatatccatgctgcctgcatgtgtcagcctggtgtcatgtaaacttctcattcgtcactggctattgttccaattttagaagacctaggtgaccaccagctgttctattgtttcagcctttattaccccataaccttcttccctggatgtgggtgaagagaaaaaagaggagagctatgttattctctgctccactccatctcttctgacaatacgatgaagatatgttaaacaatctatttaagttagtttataactggctttaacggtgacctttgttaanctatctcaaaagctataccagtttttggtacggaactcaattgaaagtttgttctg

SEQ ID NO: 416296 - DNA, 441 bp, Homo Sapiens
ggattttgcttatgtttgttttgacttgagtcaattcagaggaagataatgcttattgctagtgcatccagtgtcctatttagggcagtattgtcccatccaactagtgtttgcaggatggactctgtggccctaggagcgtcctcattgtggggagagctctggagcacctgaactcatgccactgttgctgtttcacctttgctttgttgctggatacaccacttatgtcacacctagccagccccagctaccgcaaactcttacttaccttctttagactttttcagaatgcttgtttttcagcattgtccgtactaatatcactgctcaatgatgaaagcaatttgaaggattatttgatggccttgcaaaaaatgtctgtttcagcttaaacaaattttaatttaaaaatatttcatttaaactaaaatactattg

SEQ ID NO: 416297 - DNA, 431 bp, Homo Sapiens
  misc_feature (44)..(56): n is a, c, g, or t
  misc_feature (168)..(178): n is a, c, g, or t
  misc_feature (221)..(230): n is a, c, g, or t
  misc_feature (360)..(368): n is a, c, g, or t
ccccctaaaatttccccaagggggccccaagtattgcccccccnnnnnnnnnnnnnaaagggggcaacctggggggttggtttttaaagggagggccgggcctcttttttaaatgtcagattgggaaaaaaacctccgtggggttttttttaaagggaaactttctcnnnnnnnnnnnttattggggacaaccccccccaaaaattttgccccctgaaagnnnnnnnnnntttttcgtggttttgggggttaaaaacccgggcacatttcgggcccaaaggttttgttctttcgcttcagattttaaaaaattttttccgggcgggccgggcgtcccctgttgtgggggttttaaaaaannnnnnnnnaggggtttattttgggcccctattctaaaaaaagttggttattttgtttttgagcgctaacca

SEQ ID NO: 416298 - DNA, 880 bp, Homo Sapiens
  misc_feature (316)..(384): n is a, c, g, or t
ctggtccggtccggattcccgggatctgagaagagaactaaaggaaatggcagatggcggctcacaacagtgtgggagtggcactggaatggctcccaggggcgcttggagcacatgggggcacctcttgaggactgcctgagataccagaggcagaagcaaaccaggaaaagtgaaggctacccaagatcttgaagttatatttgtggaaaggaacctctgacggagccatgggtgggtttattaatgtaacttcatttgtggttagagtgaggtgtccttggtctttcagactctgaccacatataaaatcacnnnnnnnnnnnnnnnnnnnnnnnnnnnnnnnnnnnnnnnnnnnnnnnnnnnnnnnnnnnnnnnnnnnnnaatttgaaaatgatagtaactgagttctgaccttacttgcggcaaatcttattttgttcctccttctgttatatccaagaatgtcaagtatgattactgaaaacaaaaagttagtgcccattagtcttgtcttccactaattccaggtagttggaagtattgctttgtttgccaatgagagtttttttctattgctaataagtgtccattgctgtggctgtgggtggaaatgttccttcctcgccctggtgttaggtttagacagaggtgtgactcttgcttatggtgaattttatctcagggtcctctccagcctggcctgagtcagggctaactcaacagggttcagtaacatggaactcaggccttgtgttctcaatactttccatcccagaagactccttagaaacaaatttccaacaacctcaaccttttactttaccaaaacctaatgggtaaaggggaacagagtggattggccatcccactttaccta

SEQ ID NO: 416299 - DNA, 848 bp, Homo Sapiens
  misc_feature (387)..(448): n is a, c, g, or t
tctttccaagatactgtttctccacccacactaaacagcattcccttccttcatcaacagctgtacatcttttggttcttgcattggatgtcacaggcctctaccacgtgcctcccactcttcctgcagttgcctggtgaatgtggatgagaacatatttctcttagtcattcataagagctcaaatgacaaatgaatttttctacccctgctgctctctaaactttaggaagtatcaagtgaaccattatctatttcatgatattcaacttgggtgaccatgctgggaacacttgcaatttaatgcctttttaaatgtatggttatgggctatatcgtatctagttctattacatttttctacaatattctcattttattgtgccnnnnnnnnnnnnnnnnnnnnnnnnnnnnnnnnnnnnnnnnnnnnnnnnnnnnnnnnnnnnnntgttttcttatttgtttttacaatggttgtaaaattaataaaatctttgaagctatcttgggaggtcattagggtccccgaattgcccactgccaacttgtcattatgcatacccttgcttgggtcctacatgagcaacccctaaacatacaccatagacaatgtattatttattcatttttttaaaatttgcaaattgtacataatatataaaactagagatcagatcatggtatttagaaaatgaaaccattttcctggcaacatagaaagagtataattcctagcaaaaatgcaagtatgtatgaaaactaagtgcctccaagatattattgaatgacatctaaataagatcaaatgctataatttgtaggtttataataactttaacagtaatggt

SEQ ID NO: 416300 - DNA, 879 bp, Homo Sapiens
  misc_feature (765)..(765): n is a, c, g, or t
caggactctgcttctcagacagtgttgatatgatcctggagactcgaaaatttatagaccagtccagagggcctgtaaatagcttctgacagagagctaaattttctggaactgagctgcataggcacaaactcactgtgataaatcaagactctgccattgctctgagatgtgtccatggaataaatgtgtacatggaataaatgccatagcatgtgggagagggaaaggaacaatacttaattaatttaataccttaaagggccttctgctcaagaatggacttattgctaggaatcaatttgccagctgagactttgagtgtccacatacctgcctaattagaacatgaacccacaggaaacactagtttctcctcactgtggaggattaagttgtgtagctggtttgaatcttcttactgaccatacatgactgtggattgctgccctagatgattggttttcaagtattttaagaacatgataaaatatagatgatagtaaaattatgttgaactggatttggcctttctttgattcactggcttggcaggtgtctgagagccttggtcattttcatgagcattagtggtcagagtccagcctgaagcagtacaaaatgcctaaaagtacactcaatttttcctgaccctttgacatactctggggaattagttttttaaatattaaatccctgatatcaacttgcacagtattcttgcttttcatataagcagaaagcagactatgaaatgatctatcntctttgtgttgttttttggtggtttttaattttgcgcaaagtgagcactttaaagcatattttggggaaggtaaatgctttccaaaaatctgccgattttgcctttttgaagta

SEQ ID NO: 416301 - DNA, 868 bp, Homo Sapiens
  misc_feature (617)..(810): n is a, c, g, or t
tggaggtcgaggtggggagggggaggcgggcttccctccctggtgtctggcctctttttgctcagccctcagcacagccttcagcgtggagagcgagaccctgcgtgtcactggggcttggctgaggtctccctgcaggataacagtgacttcaggaacccagaccccagtctgggcggctctaccttcccggctggcccagcccccacaccacagttccctgccacctccaggcacaaaagcctctgaggccacagcccagctatgaagctgagtggctttgtgcggtctcctagggaaggggcagtgatgccatgcatgagatccgctgtgccataagaagttgcttcctttagaatttctggtccaatgcagggaggtgaggcccagcctcatgataacacatgcccatcaaggaaaagctgtggctaatgcttccaaaacaagtgaaaatcttgcaccaggcccagggccatatctcattccgccccagctactgagggaggggacagactgctggaggacaatttctcctagttaccactaggggttacatggctactcagaatgaaagataaattgccaggcctgttgcaatcttttttttgagatgggannnnnnnnnnnnnnnnnnnnnnnnnnnnnnnnnnnnnnnnnnnnnnnnnnnnnnnnnnnnnnnnnnnnnnnnnnnnnnnnnnnnnnnnnnnnnnnnnnnnnnnnnnnnnnnnnnnnnnnnnnnnnnnnnnnnnnnnnnnnnnnnnnnnnnnnnnnnnnnnnnnnnnnnnnnnnnnnnnnnnnnnnnnnnnnnnntgggtccttggaacaccctggaacctccaaaatggattccggcccaaactttcgggcc

SEQ ID NO: 416302 - DNA, 820 bp, Homo Sapiens
  misc_feature (735)..(735): n is a, c, g, or t
atttttcaattgcttcggacatccccagcaccaagacattctgacactgaggaagtagaatcagcatttatgatcaacatcttctgaatgaacaagacctgggctttccaatagaccctctgagttcaagtcaggcactgtctacccagtcccctgcctgtccaaggattctgactttctgggcctcatgttccagagggcagggacaagtcatcagataactggacttctccactaagctgaaggcaacatgggagagtaagtggaagacatggtgctgtcagctagggtccaaggaaaggaagggatgatacagacagatgttgtcgggaggtgacatgagcatagccaccccagtgtcaccatgcaaaacaccgaggaggccgcccctccagccactcacagggctgcctgagccttaaactgacttcatgggtctccttactgatcatcatgtccttaagcagatgcccgtgacctccttctaaagagagctaagtcctgaataaagggaagtgactgcttcctcctaagctttgatgcgtgacggggatgccaaaagtcaaataagcagacagagcttatgcagaaacacaggataacagaggattaccaggaaaccatctcacttggatccagtactctgctatgtttcaaggctaagtgccattccccttggtttgaaaattaatccaggattagtgagacctttccccccagtctagaaggatgccntttcaacacacaggccgggcaggggactcaaagacaactgacaaagctcagcccatcagccacttttacttaacaaagttggccc

SEQ ID NO: 416303 - DNA, 850 bp, Homo Sapiens
  misc_feature (811)..(811): n is a, c, g, or t
  misc_feature (840)..(840): n is a, c, g, or t
cctgttggagccctgggaattcgggttggtaactcctgctcaggataatgagcatcagactctgagcacccatctctgagagcagtgccagaacaggcccagagtctgcgttttaatcatgttgtgatatgtgaaaatgaacatcctgcattacagaagtttcaaaggagacttgatcatctattgaaaaaaataccctgaacatatataatatagatggggcacagaaagctgtgtagcctgagtggcatcttgtatgtctattaccatcgatcaagtcctaccaacctttccaggttcagctcaacatcaccttctccatgaagactcagctatcgtaagtgagaatctcctttacgatgaggaaaaccagaacatgttttgctctattttaaagaaaggaggtataaaatgagaccacttttcagcatatccagcatcctgggtacattcaactaacacacgtttatttatcagactatgcttggggacccaagatatgaagaaaacgaaaacctttgctgtcctcagggagcacccagtctaatgcatgaaacatatttgtgtataataccagtgtgggagagctgataaataaggaagtgaatcacagtgatgtgatgtcaccaaggagcaagggaccagttctgcctgaaggttgggataaggcacttcatctgtcacttaaagaatgagtaggattgccataggcaaggaaaccagagaaagggcattccacacaaaacatcacaactctgggaatgatgcagcctggtatagacagaatagagaaaagggttctcaaatgcangacatacaagtaagtacctgtttctcaancaaatgtttc

SEQ ID NO: 416304 - DNA, 130 bp, Homo Sapiens
tcggatctgggatcacctgtcacctgctgtggaactggctctggatgcttaaatggacactcagccatatggagaagaacctggtcataatggttcatttcctgtccctttggagacttttattcttgta

SEQ ID NO: 416305 - DNA, 459 bp, Homo Sapiens
tcggatccgagtgtttggtagtgtctgtggaggactcggtcagggagccccctcctttcaccctggtactaggagctgaagaggcgagatgccaggcgaacggctgaaggcagaggtctttttacccccatctcccttgtctcccacacaagttgtagggcccctccaccgtgtctggtcctgaattgggaatgccagctcccagcgcggcgaggcccaggtccggtcctaggtgagtttttctctccggctggaagactcgacgccgtggataccagggacccgagccctccggggctgctggctttggagggatttccagacgttgcagtcggggtgagcggagagactaagaagtacaggggactagagaaagcagatgagggtgaattgtctcatcaagatgggggatagggaaaaggggcgagaagtaacccggggcgcaaggtccacagcgaa

SEQ ID NO: 416306 - DNA, 506 bp, Homo Sapiens
tcggatggcaaggcagacctagagaccatcagaggtcaaagaaccaatgtgattaacaaagaattcaacaaaaaggccttcttcctttacagcaaagagagttcatagatctgagttgaaccagagcagggactggagggaagcggataaagaggattttctaagcctgccgagcaacgaaaaacaacatagatgatgatgctgatgaaagacagaggttgagttgaacctcgaaaacgcctccctcccttggcaaagcagggaacacctgctctaaacctgaaatcacagagcaaggactttggttactggcataagaaattcacacatgctctttattggctaaactccactaggatatatatttgtctcccaaaacataataagtaattttttctaaaccattcatgctagattactatttttttcttgcttcaagagttaaatattgtaattcataactacgggttaccacttcattgctcttattttaatacgatctccag

SEQ ID NO: 416307 - DNA, 890 bp, Homo Sapiens
ttatagctaataggagttagagctaagatttaaacagaggtctagtgccacagccagtgcatgtttcctgccccacttcattgcctttgcagagatgtggacacggaaaaatgcaagacaagttcatgagacatgagcaaactagtttggctgggattaaatgtttgtcagctggcatgagggaagtgattggagaaataggctgaaattagattgtagagagctttaaatagtagaccctggagcttgaatcctaataagtaccaattaggggcttaccgggtaaagagaccatgtaggtatttcaaactaatttaagacaggaaatcagtaatataggagttggaaggctgaaggagtaaaaaaggaataggtaacccatatttagtaattatagataatagcctgactaacaccctatattagtgatttattgctgtggaacaaatccccaaattaatggtttaaaacagtacatatttattatttcacagcttctgtaagtcaggaatcccagcatggcttaaccagattctctatgtcacaatctctcatgagatggtttcagccagggttaggggctcatctgaaggtttgactggggaggtatccacctctaagatcaggtgggtgttggcaggatcgaatttcttgagggatgttttgaactgaaggcctcagtaccttgctggctgttagttgggggctcccctcagttcttagccatgtgggtctctccactatgtgagcctgcttttatctaagcccagtaagagagtatactagccaggatgggaagtcagaacccctttgttaaccttaccccattgggaagtgaaccagccccctggcaaatgttccacccaatattttttcctttagaaaagcac

SEQ ID NO: 416308 - DNA, 893 bp, Homo Sapiens
  misc_feature (328)..(390): n is a, c, g, or t
  misc_feature (414)..(518): n is a, c, g, or t
ttttgaatcaggttggtttttgttgagttttaggagttttctatatattctgggtattaatcctttatcagatatgtgatttccaagtattttatgttgggttgcctttttactgttgataatgtcctttgatgcacaagtttttaattatgaagtccaatttgtctacgttgttgttgttgttccctgctcactcttttggttttataaccaagaaatcactgccaaacccaatgccatgaggctttccttttttttccctttagagacagggtctcactctgtggcctaagctggagcacagtgacgtgatcatggctcactgcannnnnnnnnnnnnnnnnnnnnnnnnnnnnnnnnnnnnnnnnnnnnnnnnnnnnnnnnnnnnnngtgtgtgccattaatttaaaaaannnnnnnnnnnnnnnnnnnnnnnnnnnnnnnnnnnnnnnnnnnnnnnnnnnnnnnnnnnnnnnnnnnnnnnnnnnnnnnnnnnnnnnnnnnnnnnnnnnnnnnnngtataagccaccacatgctcctcttgagttttatagttttagttctgatgcttaggtctttggcccactttgagttttgcatatggtattaggtaagggtccaacttcattctttttgtatgtggctctctagtttacccagaaccatttgttgataaaactgtctttttccccactgaatggtctttggcacccctgttgcatattattttgaccacacatgcaaggggtttattttctgggatctgtaattccattcccattgggcctaaaaagtcctggtctttttatgccagtactgcactgctttgattaatgtagctttgtaataacctgaaataaaaatggagcctaacttatcccaaactattcgaa

SEQ ID NO: 416309 - DNA, 411 bp, Homo Sapiens
  misc_feature (69)..(69): n is a, c, g, or t
  misc_feature (143)..(143): n is a, c, g, or t
  misc_feature (208)..(313): n is a, c, g, or t
ggctggaccggtccggattcccgggatctgaaagttagactttatatgtaaggagaaacgtccaggaancatatcctgaagaaataatgaggtatatgtgaagcaacttagatagaattttcattggaaggttatgcaaaaanatctggaaaaaacttacatgttcaaaaatagagtttaggctatagcactgaactgtaggctgagnnnnnnnnnnnnnnnnnnnnnnnnnnnnnnnnnnnnnnnnnnnnnnnnnnnnnnnnnnnnnnnnnnnnnnnnnnnnnnnnnnnnnnnnnnnnnnnnnnnnnnnnnnggtgaagtttcctataaaatatccatatgaagaaagagtattcagtgcttaaaaatgatagggttccagtatgtacagtatgttctctttttttaatc

SEQ ID NO: 416310 - DNA, 222 bp, Homo Sapiens
aagaatgtaactcaaagaaatggtgctgagagaatagtggaactttgtgagccttgtttgctgttgtatattttttagaagagttggcttttttgaatctacgaaggacctaattttaataatataacaagctcctatctgacacatactatttcatggtatctaacattttattaccaagtactaatttctcttaaatttcacaatttatatttgtttatt

SEQ ID NO: 416311 - DNA, 916 bp, Homo Sapiens
  misc_feature (802)..(863): n is a, c, g, or t
ttactggaagtgaatagtactactttggtttaaaagtttgttcttaagaataagaacattttagagttatagaaaatagtccagtcaatgataatagctgtgtgtaactattctaattgagaatggatcattctttatggaagatttggtaaattatacagaatattgagcctttattgtttgtaaaattaatttaattttgtttgaaatatactctattaagccactataaatgtgtatccaataagctatctgaattagtattcagatgaaaatatattgaatttctcagggctttcaatatcagttctatttccgtgagcattttagctttctaatacaagaaatgcaatttgaattgtttactgctgtaagccactggttattttcagacataatggaataatggtgtttagccacaatgtggtattttctaaaagcacttgaaatatttcatgagtaagattagctaaagaatttagtcttgttttttatgaccatgatagtttatgtctgcaacctgagaagtttttattttcagaacagtttctcaagagttttattttaaagaaaatgaaactttttcttataagatcagatatcaggtttccactaactgtgttaaatatttcgcttttagttacagtatggaaaatttgagttactcaaccaactcaactaacttaggcattttattgtgaaccaagaaggagagggagtgtggagataatttataattccaaaaactacccattaaaatacctgaattggggattggtaaaattttaatttcttttaagtnnnnnnnnnnnnnnnnnnnnnnnnnnnnnnnnnnnnnnnnnnnnnnnnnnnnnnnnnnnnnnttaaatgggttcccacccaaaaacccatttttttaaaatgggaaaataaattt

SEQ ID NO: 416312 - DNA, 211 bp, Homo Sapiens
agggctgggtaccggtccgggaattcccgcggatgtaaagtttatttcttgtgtgtggttcacagaattcttgttgatgagaccctcttaaaaatcatctactcttctttattccagtctttagcatattccagaaagcctaattacttattgcaaaaacataaaaatagaaatctcttcactagattacgatttaaagcatgaacttcga

SEQ ID NO: 416313 - DNA, 861 bp, Homo Sapiens
  misc_feature (351)..(406): n is a, c, g, or t
tgtaaacaggtaattttactgggccttagtttcgtttcttcatctctctgatgaggggtgtggctgaatgacctctttggggtttttacatttcacagttgtcaatcataattttctgtgaccctgaccaagcctcactctgacctaatgactcatacaaacatttctcttcttctcttcatgtttgcgtattttgattgcacatgtaccttggacttagtggggtcactggcaaagcaagtgtattttctgaaatacaccagagaagtgggtgtgcacagtgttttcccttgggtggagccatgcttctgctgtccttccagctggaatctgtcagatgtggactgtggnnnnnnnnnnnnnnnnnnnnnnnnnnnnnnnnnnnnnnnnnnnnnnnnnnnnnnnngggggagtctctggaagtaaggctctgggctctgcattttaataagcccctaagtgatccccaggctcactactgtttgagaacatgaatgattctcctctaagtatgcactgtggtctttagatagaacccatggttccctcaaggcaggggtcatgctgtgtgtgtgtttataaatgaaacttctcaggataaattgtgatcatctagtttattcactcatgaaacaaatacttgcatccttcttttatacaaagtcctgtgttagttgtgggaatggagagaagagaatgtatctaaggaggcagagcagacagattttggcaactgattagatatgagggatgtgggaagaggtcaaagttagctagcgggttttgatcccggagtgtggggactctaagttgtgccagtacagaaaatgggggcagacaagtcatttgggaacaagtttt

SEQ ID NO: 416314 - DNA, 312 bp, Homo Sapiens
tcaccgagattccaaggggaaacgtggcacgtgaaacaatttctttactatgtgataaatttgcagacttcttttgtgtatgttgtgacattggagccttaaaccactcaagaagatatgcataaaagggtcattatctctgctttgtagataagctaacccagagctaatccagagaagcaaattattggcctggggtcctacagtttgtaagtggcagggaagagactcaaatccagtgtcctgaatccaagcaagatggttttgctcttccattcggctgctttctccctgctatcaactgaatatgta

SEQ ID NO: 416315 - DNA, 810 bp, Homo Sapiens
  misc_feature (696)..(696): n is a, c, g, or t
  misc_feature (777)..(777): n is a, c, g, or t
  misc_feature (779)..(779): n is a, c, g, or t
tgttgaaagtctcctttcagctctcatgtctcaggccagagagacaacttagggtggcattcagtttcctggtctccaggctaaagtaatcattttgaaagctgattcctctgtgtttcagagatgctccccacagatctgaactactgggggtctccaacctgtcacaagcctaaggggggaaaaactaacaatatcccttttagtaacagatttctggtaaaatttggatcactgggctggagcaattctcaggccatagtggagatgccatcaaattcttttcttaatggcatggactaaccgtcctctaggactactgtcgggagcttttgtcctaggtcatgatttctgctgacataattggaatatctgaatccatatgataaggagtcctgtttcaagtaatttaggcagactatgtacttcagaaaacaagactgagccataaaaagggaggaggaggcacacagaccctgagatctttggtgagtgtgtctcaggcggatccgaagctgacaaaccatgtgagtgtgtatggccatgaaaactttgaattatctgccagacagagtaagtgccctaaaaccaagatacattttaaaatgcttttattctgaatatttattcataggtcaagcctcatatttcattccattaatgcattcatattgcacctgttttcctctcccctangtgctttacatatccaaatgaacaaatacaaattcacttcaggtttcttgggctgtctcttaaactctcggccctctgaanantctcccctcccttcttctaattctctggtgg

SEQ ID NO: 416316 - DNA, 1198 bp, Homo Sapiens
  misc_feature (98)..(236): n is a, c, g, or t
  misc_feature (272)..(281): n is a, c, g, or t
  misc_feature (604)..(604): n is a, c, g, or t
  misc_feature (680)..(680): n is a, c, g, or t
  misc_feature (758)..(758): n is a, c, g, or t
  misc_feature (990)..(990): n is a, c, g, or t
  misc_feature (1044)..(1044): n is a, c, g, or t
  misc_feature (1111)..(1111): n is a, c, g, or t
tggactgttatgacaaacatcacataaacaaagttaagatatgttagatcctagaagaaagtatctgccttgtatataagcattaaaagggtggtatnnnnnnnnnnnnnnnnnnnnnnnnnnnnnnnnnnnnnnnnnnnnnnnnnnnnnnnnnnnnnnnnnnnnnnnnnnnnnnnnnnnnnnnnnnnnnnnnnnnnnnnnnnnnnnnnnnnnnnnnnnnnnnnnnnnnnnnnnnntcaaacgctaacgaccccgggattccccctgcctcnnnnnnnnnncccacgaacacgcgcgcagcgtgcgcgtcgcacctttacccctcttcgctcgcccgaaggatagtcgtttggccctgttcgcggtggccctgtgttcacagctacttctcgctttctcgtcgcgcggtaagtctcgtgacgtcgcggtccggcttccaccatcaccctcccaccgcttatttttggcgtgctcggcgccgtcctttcgctctgacccaaccctctgttattggccttactcggactcttccccacggaaagccacacctcgtagcgcttcccgcccccccgctgtgcggcttttcccgcccttgctctccccnccgcttccgagccgtcgttttttttgcctacccaccgaagactaaattaacctctcctatatccactgctcaagancagaacatattctacccatcgctttacgcgggcggcacaaagacacaatacctcccttgaccgctatcctacaaacgnaggccaatgcgtatcagaactgcatatgatatccagaccttcgagttttcgcagccgctctctttatatcagtacgttagtctcgtaacgcgctcatcccccctagccatgtcgtcttcgcctttatatacgtgctgtgtccccctattccgttctacaaaccaataagcacgcgctttccgtttcttcccgatcgttgttgctttagtgcaatgccccgataaccgcgtgngggagggtcactacaactacctcctcccgtgtgaggagccagggtttatccctnagtaggatactcacaacagatggtgtgtgcttagatcgaatcaacgaaatatgccgcgattgcactntattacttataacacttacgaccccgcccgccatattcccgcctctcccgcacgcgtgtggctatgtaatcaccgtaccaccttccc

SEQ ID NO: 416317 - DNA, 805 bp, Homo Sapiens
  misc_feature (635)..(635): n is a, c, g, or t
  misc_feature (711)..(711): n is a, c, g, or t
taaatccataactggatttgacttcttcactagttttaattttcattgttgcttttaaacaaaaaatcattggtcagggtttctcaaaacagtctggagatgaccaagcacaggaataaaatgagatgcaaaaaaagaaataaatccaatgggaagaagttatcagggacagggaaggaaagacggccttttaggaccttattttattgggataaaacagaaatgaacactaaagtgacctggtcatataagaagatccttggatgagaaaatccagatgaaggaatagcactatctttatgcacagtcatttggtcagtatctgttttcttattgggaagctacttcagaggctactgtaccatttttcactctttcttcctcttaaatggccattgggcctgttcaggagcggtattgtgaatactcagctacagccagaggcacaaagcctggcaggtttctccccgagaactagggtccccaagaatgacagcccacccccccaggaaagaagctggtaactgcacaaagcctcgcggtccatgagtggcctttggtggacattttaaaagtgtcaatctccctgacacatcttcctgatttcattagggtatgtaaaggtttcaaaaatnaataggaatatactagagtataaatgatattatataaaatccctgactgtaagccttactcaaaaggatgttatgngagcttgaaaatacatggtataagaatagatgccatgaaaggaggtttgaaaaccatccctccatggaattccgggaagtaattgggaaaagaa

SEQ ID NO: 416318 - DNA, 948 bp, Homo Sapiens
  misc_feature (297)..(306): n is a, c, g, or t
gctggaccggtccggattcctcggatgtctttgtgttgccctccaatgactcttgcttggaaatgattggaagcccatcgttttaagtcattggaacgactgtccccttcataaagcatgatgtagcaaaatgaaaagcatacttctggttaaaagtgtttttcaaaaaaagcttaccacattgaggaggtcatttcatatttcctgatattcagcaattttgctgtgagctttgtagagttgttctggtgcttagttcaaataagaaaggaattactgaaattgcacattaagttnnnnnnnnnntcagggttttgggtcctgagacttgttacctaaacatctgtcttgctattttgttacagcacaaagtaggaattgtaaaacatcttcgttataaactgagtactatacagtctctgggagagcagaagaaacgtggtaggaaggaaccacccagggtgggtaatgacagagtagagatagtcagatagggccggagacaaggccaggaaaggcgagaggaagagcctgcaggaacgagtttcttgcacgtttgagagctggacctgccaagagggtaaggccaacatctgcgtttgttctttgaggaaatccgagtagcctgccctgcctttgaccctctgctctttgaactgtggattccttcccatacacctgtgcattctcagtgccgtggtcagatccccaaacagacaccaaaccccgacctccgaggcccaggcaggagcataacccagccccaaggggagataaagacagaaagaatcagtattatagcaggggacttttttcaagaatctgccttctgcagggcagttgccctaggtgcattcaagcccagcatagcaaatccacaatcactatgaaaaactcctttccgtttttataactttggggaaactaaaggcccaaagccaattggac

SEQ ID NO: 416319 - DNA, 432 bp, Homo Sapiens
aaaaagagaaaggttgttcttcaggagagacaaacactgcgggagggtacctccactccgtgttccctccccgtcaccatgtggctttctgtttccacatgttgcttttgcgcaccatgccttcccatatggtataggttcttgcgcgacacacttgcatatgccagccccaacgtttattgggcagtctaagcaaaatatttacattctcgtcaggcaaagatggtaaaactcacagcaactgttctccaagggtggactcaggactcgctggagatccccacaacactcttgacagatataaaacactaaaaatttggatttctacgaactccccaggaggggtaactccaatgtgtccagatgaatagcccttcctttctaaacccacttggccctgggccttcttttcccaaaaaaccccacaccgat

SEQ ID NO: 416320 - DNA, 172 bp, Homo Sapiens
atcgtaattgtaagtaaaggcagtatctgactctgtcttgcacaactcacctcattcccttcacctaatcctggccctgccgatcccttctttctggcagcattttctctagtctgagagaattaatgcagttttgaaggagctgcatctgcaataattaaatcagacccaa

SEQ ID NO: 416321 - DNA, 746 bp, Homo Sapiens
tcagatagttcctttggtagtacactaaactcatttatcattttttcaatttctactgtaagttattcactgtgatcatttttaagttctactgatctttcacataggcaaactgcatccaggctaacagagcctgtatcagggagaaaacaaggcagaaataaaatttataagtgctttttaactatgaaggactgcatattttaacattcactcattcatacactgaacaaatatatgagtgcctaaatgtaagagacactatactaagcagataaacagacaaaacttctgctcttggttagcttatagtgtagtgaagaacaaagacagaaaaagataacagagttctatgctgacataagagaatttaatcaataccgggcccagggaagatttccctgaggaagagacggctacactgagaaatgaagaataagatgaaagcagttaagcaaaggggggaaaaagcattctatccagtctatggcatgtgctgaagatctattacaatttgcttctagccaagatggagcaacaggtactgattttccttcttagctaagataacccaaaacaaacagacaaaaaatattttaaaaataattttcaagacagtgggactttcaggcaaaagaaagacaattaattccctagaaagaccggggagaaaaaatataaaagtaaaccccttcttgaaatgccttccagccttttcctgccctttggaaaagccgtttctccct

SEQ ID NO: 416322 - DNA, 970 bp, Homo Sapiens
  misc_feature (258)..(311): n is a, c, g, or t
  misc_feature (939)..(939): n is a, c, g, or t
tccgatcaaaactaaatacagtcactttattggttagatttttttctcataaaaatctgtaggcaagtcatgatttatttttattaaactgtgtctcaccttgttatgtccacgctgttttgcaattcaatgttagttttaagctactgcaatatatccataaataaataatcttaagttacttttaaatggcctaataattagccaatcatttaaatgttttcttccagatagatcatccctagttaagtgattttnnnnnnnnnnnnnnnnnnnnnnnnnnnnnnnnnnnnnnnnnnnnnnnnnnnnnnagacaagacactttcatctactgagcttatttctttactaagaatgcaggttgatatttatttaaattaattataagggaagaaatttattatttataactttactagtgggacttcaccctcaggttactgcttatcttctcgcactgtacttttttcaaaatcaattaaacacacatgcagacacctgcagagtaaacagacacctgcacagatccaagtagcaaatccattttcagtttgttgtcagtagaaaatccaaatgtcttttggcttgtgctgtttagtccgccttgtcatagttggtattaagtaatgatcaataaagtaaaatttctgttttagttagtaaagtatacaataaaatatttttactatatcttaaatcattaaaaataggttttatcctgggtcctcattgcatttccaattacaattaggggaaataagggaaaaagaggggggttaaatttatcctttaaatttatccccctccggtaaacaatttctaaaatttggtctcctggggtaaaaataaaatacgggggaaggtattttttaaagcttttgaaaaagaaacctccccccccaaaatttctctttattgggagaaaagttggcaaaaaanacttatatttttaaattgtgaaaaacccata

SEQ ID NO: 416323 - DNA, 628 bp, Homo Sapiens
  misc_feature (136)..(171): n is a, c, g, or t
  misc_feature (259)..(302): n is a, c, g, or t
gaattaattgtaaaacagcctcaggcaggtccttccggaggaattccggaagaaagcattgtcttcatatatattgatgatcgtgatcctgtataggccgaggctaacgtgtgtgtttatgtcttaatttttaacnnnnnnnnnnnnnnnnnnnnnnnnnnnnnnnnnnnntagaatgagcttctagaataagaagataaagaacaaaacacattcacaactgtacattgtatttgtgttttaagctaactgttattannnnnnnnnnnnnnnnnnnnnnnnnnnnnnnnnnnnnnnnnnnntttaccgtaagtgcaggttaatgcatcattaaagaaatttttaaagtaaatgtagtgtagcctaaatgtacagtgattataaaatctacaatagtgtacagtaatgtcctaggcctcacagtcgctcaccattcactcactcagaacatcatccagtcttgcaagctccgttcatggtaagtgccacatgcaggtgcacatttttcatcttgtatttttcttgtaccttttctatttttagatatgtttagctacaaaagtactgaccattgtgttacaattgcctacagtattcaacggtgctgagacgcagagactgcggattt

SEQ ID NO: 416324 - DNA, 573 bp, Homo Sapiens
tcttagtaactgttttctttgtggtctcttgtgggaggaaagaatggagatgaattctatggtaatattcctctctaatggaagtgtccctgggcagcctctgtagactgtagtgcatttgccctgctgctgcctgtaagcactctggttaatcatgatttccaagggtacctgtaaccttgtaaaggcaatgggattaaaatgaacctgcaactggtagaatgtttgggctgattatctccttggtgtataggagaaaaaacaaaatccttccaggttgctgcaagagtacaaaggaaatcctgtcaccttgctttgtaaaatccacttgagaaaaaatttaaaggttgccctactgtgaattccagttgtgttaggaaaatcagtagaacagtgcctctccatgtggaccaaaggatgaagttgtttttttgtgaaagccattacaggacagagatttttccccccctttctttctcttcaaaatataattttttacccaggagttttgtatgaaatattaaataatttggaatgcctgctgtgggtaggttgagaggcctttatgagatg

SEQ ID NO: 416325 - DNA, 935 bp, Homo Sapiens
  misc_feature (868)..(887): n is a, c, g, or t
cgttcgtttcaggtcatttctttgctcacacatacgagcgtagggtactagaagcagccaggcaacatcttgaatgctttgttccttagaaatttcttcctccagttatcctaagtcatcattctcaacttcaaagttccacagatctctaggcaggggcacaatgccaccaggttctttgctaacacataacaaaagtgacttttgctccagttcccaataagttccttatttccatctgagctctcctcagcctggacttcattgtccatatcactgtcagcattttgttgacaacaagttgataagtctctaggaagttcctaattttccctcatcttcttgtcttctgagctctctgcactcttccagcctctgcccattacccagtttcagagacgcttccacattttcaggtgtctttatagcaatgccccacttttcagtagcaattctctctgttagtttgttttcacactgctataaaaaatacccgagactggataatttgtaaagaaaaagagtttaattgtctcactgttccatggactttataggaagcaaggcagcatctgctttctaggaggcccagggagcttttactcatggcagaaggcaaagtgggagcaggccagagcaggatgaagagagaggaaaggttacacacacttttaaacaaccagatctttctgagaacccctagcacaaaaaacagcatccaaagaggggaaatcagccccccctatgatcccagtcggccctcccattcagggcctccaattcccaaaactgggggaaattaacaatttttgacatggagaatttgaaagcaagggcccaacaaattcccgaacccttatctcaaccnnnnnnnnnnnnnnnnnnnncccggaaaaattccttggggtggcgcccccttccaccctttaaaataa

SEQ ID NO: 416326 - DNA, 1178 bp, Homo Sapiens
  misc_feature (43)..(61): n is a, c, g, or t
  misc_feature (83)..(83): n is a, c, g, or t
  misc_feature (227)..(523): n is a, c, g, or t
  misc_feature (709)..(721): n is a, c, g, or t
  misc_feature (852)..(891): n is a, c, g, or t
gagagagggcacaggaaggggtcgacgcgcggagagggcggannnnnnnnnnnnnnnnnnntgaagaagcaggctgggtaccnggtccgggaattctcgcggatcaaagtcagaagactaacattactcatctttactatacactgcaataatcaagacatgtgacactggtaaaagaatagatactttaaaaaaaagaaacaaagaatagacaattagatcaatgnnnnnnnnnnnnnnnnnnnnnnnnnnnnnnnnnnnnnnnnnnnnnnnnnnnnnnnnnnnnnnnnnnnnnnnnnnnnnnnnnnnnnnnnnnnnnnnnnnnnnnnnnnnnnnnnnnnnnnnnnnnnnnnnnnnnnnnnnnnnnnnnnnnnnnnnnnnnnnnnnnnnnnnnnnnnnnnnnnnnnnnnnnnnnnnnnnnnnnnnnnnnnnnnnnnnnnnnnnnnnnnnnnnnnnnnnnnnnnnnnnnnnnnnnnnnnnnnnnnnnnnnnnnnnnnnnnnnnnnnnnnnnnnnnnnnnnnnngggggcggtgcgggggacttccaggagggtgcccggagttcctcccggcgtctgtgggatgtggggggcgctggcgcggagcttggttgtcgagtcgggtgggagcggaagtgtaagcggtgtgttcgcggcgagcggatcaccggaagcgggtgtcgagggtgggccaccatcggctggtccccnnnnnnnnnnnnnaaacgggcgggccggtgctggtgcagagcctgtccgtgggcgtgactggcggggcggggggctgtcgcccgccggggatgagcgtggcggcgggggtggacgctggaagggggtcggggatgagtgagaannnnnnnnnnnnnnnnnnnnnnnnnnnnnnnnnnnnnnnngcgcgacgtggcggtgggccaagattgccgggggcgtgacagcaaaacgacaacagtcacccgcagtcgtgggagtgggcgcgtgggcgggcggcgggattgatgtcgctgtggcgtccggcgcaacgcggcccgctacccgcgacatcgcgggtgtacccacaggaagacgccgacgtggcgagggcgctgcagccgtaggttccggacagtgggaggaattagtgtgtggggtgagccgtgcggagatgatgggcccaatcatgtgatgggggaccatgacgaag

SEQ ID NO: 416327 - DNA, 542 bp, Homo Sapiens
gcaattttaacagtatctcattgccgaggtgcaggctgcaggcatttttcataccacaccctctgtcctcaatttcaagttgcaaaggctatacaagagctagtgtggctacgatatcagaatttcacttcccccactcagctaccactcataggacaaggagcctacccaaggatcaacagtctaaaaatattggggacctgattgctcctgcccagcttgcatatagggcagaagttccacataagcaaaggcaagctgagaaagtgagaggctaccttcctacccagcaccccattcatcataacagcctgctgtccaccccctgcaactctggagcactagcataaagattacaatcaggggatgtggtaattcataaaaatagacagctccaaagtgccccttaaaaactttatttaaaacagagtgtagaaaatttcaacctaagggagtgattgaaacagtaattaagaggaggctggtggatcattgagaaggagcaactaaatcataagccaaccagtttattagagttcaag

SEQ ID NO: 416328 - DNA, 513 bp, Homo Sapiens
  misc_feature (172)..(172): n is a, c, g, or t
  misc_feature (283)..(283): n is a, c, g, or t
  misc_feature (345)..(356): n is a, c, g, or t
  misc_feature (391)..(405): n is a, c, g, or t
  misc_feature (450)..(460): n is a, c, g, or t
gcgattgtgatataatgatataatgttaaaagctgctttttttggctttttgcatatctagtataataggaagtgtgagcaaggtgatgatgtggctgtgatttccgacgtctggtgtgtggagagtactgcatgagcagagttcttctattataaaattaccatatcttgnccattcacagcaggtcctgtgaatacgtttttactgagtgtctttaatgaggtgttctagacagtgtgctgataatgtatttgtgcggggtgacctcttcccctagattgnatccccttaacggttttggttaaagaaattgccaaattttttaacttgaaaaagggaatttnnnnnnnnnnnncccttggggtttgggaaattgggaattcccttttnnnnnnnnnnnnnnnaaacctgaaaaaaacttttttggcccaaaaaaccccgggaaaacnnnnnnnnnnnaccccccccaaaaaggggggttttttttaattaccccgcggggtttggccccc

SEQ ID NO: 416329 - DNA, 372 bp, Homo Sapiens
gcgatggtgacttcaccgaagggagctttattgtgccggagccactgccagctaccctcctccaagcaccgactgccaaaacatcacagtccaaagaggggtgctccgttcccccttcccacctcccccccttcacctccctgcctatcagcatccagaagcaattctttgcatgggtgcttcttcatcctgatcctgactggcagctccaaggattaaactcaggtcctttggagcagtcgctttatgcacattagccccctggggtgttgaactccaaaacctctattttttcccccgggtctaccctgtatctcacaaaaccctagttagccactgtggtacacagtctttcttccattccaggctatc

SEQ ID NO: 416330 - DNA, 532 bp, Homo Sapiens
ggatccatgaggtagtagctaagtgggaagcggaaaatccaaacccctctgtgtccttcccctcactttccccttccaaatctcccagtcacgtgcctggctaaagccaagtcacgtttacaaccaaactacagtggggtctgggaaaggtagtctttagctttttaacctccagatgtagattcttttgcccttctgtcagggagatgacaagtagtgaaaaagcaagcaaaacagcaagaagtaataggtctgcatattccagaaacaaaaaggtcctaaggtaacttcatgatccaaagatgaatatccaaatgtccatcaatattggtaaccaaataaacattaaattaaacaatacgatagcatattaacttctcaaattagaaaataccagtgttgctgagagtatagagaaataagcaaaaattttgcatactctttattctagaaatggtacctttcaggaattaaacatccatacctataataaatatttggttacaaggatatttatgttacttacaatagc

SEQ ID NO: 416331 - DNA, 262 bp, Homo Sapiens
gcaatgagcctcactaagagaggcttagcttagtaagtcagcagtcttcaagggttttgaattaatgttgctaaatgttttcggaaaggacagctccaggagtttatttaaactgtcctagcctgtccttctacagacacaggttacaatacaagcaattttacgtatcccatcttctctttgaagcagcaggcgttgttggggtggagaggcgatgaatgatcacatcacctggcatcacctatttttaataggaatctaa

SEQ ID NO: 416332 - DNA, 885 bp, Homo Sapiens
  misc_feature (65)..(142): n is a, c, g, or t
  misc_feature (257)..(257): n is a, c, g, or t
  misc_feature (423)..(432): n is a, c, g, or t
  misc_feature (581)..(667): n is a, c, g, or t
  misc_feature (762)..(776): n is a, c, g, or t
ggtccggaattctcgggattcttttcatgtgaaaagtagacaccagaatagcccctcgtcccccnnnnnnnnnnnnnnnnnnnnnnnnnnnnnnnnnnnnnnnnnnnnnnnnnnnnnnnnnnnnnnnnnnnnnnnnnnnnnnagatactgagtccatgcccactgttgtggtcaaggccacagtaggctttccctgcatgtgaagttgtctcagggaacttaactagatgtgtgggttagccaaagccttgtagcanagtaacatattttaaagcagccatcatttgataggagtaggcccagctgtactctaggaagtaggctgaagggagccacttggggtaagaaggcacctccctccatgcagtgggtgtgactcatccacaggatcctctgtgtgagatttctctaggttcttagggnnnnnnnnnnggggagtataagcctgatacccgtttttccctgccggtgtggagtgtccctgaatttggaaaaaatatttctcaagcttttatattttggcaaaaaatttgaaaattttaaaggggaattaaccccttggaattaagacctaaataatnnnnnnnnnnnnnnnnnnnnnnnnnnnnnnnnnnnnnnnnnnnnnnnnnnnnnnnnnnnnnnnnnnnnnnnnnnnnnnnnnnnnnnngaacatatctttaaagaaaatataatatccccaaatatttataaaaattccccccagaaaagaaagaaaataccattttttgtggaaaatattgnnnnnnnnnnnnnnnggaggaccaataaaaatacaggggacaaacaaatgggggtggttttcccttacccccacacattttttcccacaaatattttattataaaaaagaggcccttgttgtac

SEQ ID NO: 416333 - DNA, 466 bp, Homo Sapiens
ggctggaccggtccggaattctccggatctcagtttggctttcattatatgttcgagacaaaaattttgattaaaggaagcaaagaaacccttggactgttatcattcccctacctacatcccctatagtctacagaatctacatctctggaagagtttccagtcttaacaaagggtttgtgctggggagagggatttatggcgagatgtggttctgctatttattttaagttagaactcttattctgagagttttccatagaaacacagtaagatatgtggttaagttccagagtactgttaatattacaggtatgttcaggcatttgttaattagcctagaaacctaaccactgggtataacgtttccagaggaacatatatcctgaaattcaagtaaccgcttcactagagactgtctttcctaacttgtttactcagcattaaaaaggtaatgattttggca

SEQ ID NO: 416334 - DNA, 931 bp, Homo Sapiens
  misc_feature (85)..(445): n is a, c, g, or t
  misc_feature (533)..(793): n is a, c, g, or t
ctggtaccggtccggattttcccgatatcagtgtgatgatggatgctacacggacagggtgcctgagaaatatacaggggggatnnnnnnnnnnnnnnnnnnnnnnnnnnnnnnnnnnnnnnnnnnnnnnnnnnnnnnnnnnnnnnnnnnnnnnnnnnnnnnnnnnnnnnnnnnnnnnnnnnnnnnnnnnnnnnnnnnnnnnnnnnnnnnnnnnnnnnnnnnnnnnnnnnnnnnnnnnnnnnnnnnnnnnnnnnnnnnnnnnnnnnnnnnnnnnnnnnnnnnnnnnnnnnnnnnnnnnnnnnnnnnnnnnnnnnnnnnnnnnnnnnnnnnnnnnnnnnnnnnnnnnnnnnnnnnnnnnnnnnnnnnnnnnnnnnnnnnnnnnnnnnnnnnnnnnnnnnnnnnnnnnnnnnnnnnnnnnnnnnnnnnnnnnnnnnnnnnnnnnnnngggacatttaacacagcctgaagagaaaggatttcagggtgttcagaacaattccccaaaggaagtgatgtccaagagagactaggannnnnnnnnnnnnnnnnnnnnnnnnnnnnnnnnnnnnnnnnnnnnnnnnnnnnnnnnnnnnnnnnnnnnnnnnnnnnnnnnnnnnnnnnnnnnnnnnnnnnnnnnnnnnnnnnnnnnnnnnnnnnnnnnnnnnnnnnnnnnnnnnnnnnnnnnnnnnnnnnnnnnnnnnnnnnnnnnnnnnnnnnnnnnnnnnnnnnnnnnnnnnnnnnnnnnnnnnnnnnnnnnnnnnnnnnnnnnnnnnnnnnnnnnnnnnnnnnnnnnggacatgaaatgttttttagccacccttttttcttaaaccggtccaaaaaggtagaaaaccaaatttccaaatgggtcttcttcaccttggattggaatccaattggaaacaaaaaataattggcctggcaattttct

SEQ ID NO: 416335 - DNA, 824 bp, Homo Sapiens
  misc_feature (379)..(488): n is a, c, g, or t
  misc_feature (504)..(526): n is a, c, g, or t
  misc_feature (547)..(740): n is a, c, g, or t
  misc_feature (750)..(750): n is a, c, g, or t
ataccttgtgttttagattgacctagattttcaaagtactctttttttgtggtaagatatatttggataaacattttggaaagcaatttgacagtaagtattagaaatcttaaaaattgttctttgatctggtagttctatttccaggaatctattctaaggaaagaattctaaattcttaagaaggttatattcagagatgctcaccaaaatggtagttacaattttaaaaagttaggcaacccaatttctcacaatagggtattaagtaaatactgttatctaggcagtatattattaaaaacacagaaaaccaaatgttgaccttaccttgagcaagttgcttaatctgtttcttcatctataaatttgatataannnnnnnnnnnnnnnnnnnnnnnnnnnnnnnnnnnnnnnnnnnnnnnnnnnnnnnnnnnnnnnnnnnnnnnnnnnnnnnnnnnnnnnnnnnnnnnnnnnnnnnnnnnnnnatgttctcgataaaannnnnnnnnnnnnnnnnnnnnnnctgaaacagagtttcaccctnnnnnnnnnnnnnnnnnnnnnnnnnnnnnnnnnnnnnnnnnnnnnnnnnnnnnnnnnnnnnnnnnnnnnnnnnnnnnnnnnnnnnnnnnnnnnnnnnnnnnnnnnnnnnnnnnnnnnnnnnnnnnnnnnnnnnnnnnnnnnnnnnnnnnnnnnnnnnnnnnnnnnnnnnnnnnnnnnnnnnnnnnnnnnnnnnnctgacctcanggtgatccgccctggcctcgggcttccctaaagtgggtgggggatttacaagatggtgaagcccacctggtgga

SEQ ID NO: 416336 - DNA, 137 bp, Homo Sapiens
  misc_feature (13)..(13): n is a, c, g, or t
agggctggtaccnggtctcggaattcttccggatgttgaacagagcagtgactggttcagctaatcatctcaaagtgccaagaaatgtatatgtacctcttaactctcaaacatccgacacaggagcatactggaat

SEQ ID NO: 416337 - DNA, 369 bp, Homo Sapiens
gctgggtaccggtccgggaattccctgggatgtgtatattcttcatatagcatgtgtatattcttcatatagcatgcatatattcttcacacaccatgcatatattcttcacataccatgcatatattcttcatatagcatgcattcactgagcctgaattagatgttttttgagaaataggagcagatgatttacttttccatctcatacctcaacaggttctttcctgcctttgctcacactgtagccccagactggcatggcccctcctcttcatgtatctcaagtctttctaaggcctcactaaaatcctaccacctgccttaagtttataaatcctcaaacacactaacttacataatcatttt

SEQ ID NO: 416338 - DNA, 243 bp, Homo Sapiens
aaatgaccactgcagtgcagggtgaaaaaccctggaggagcttggcagtttctctgaattgaggagacatgactgggcttccagggagactcaagtttgcagggcacagtgtcagaagaaagctacacagagagaaagagagctctggagatgtacagaaggcccccttgaatattcagcagagtagtgatcaaactacatataggggaacaaaagtaagaaccacaccaggcttctcactgg

SEQ ID NO: 416339 - DNA, 196 bp, Homo Sapiens
atcttagcacatatattgttattaattattgctaaataggccccttacatatacgaacacttgttatttcatcattaccatcattgccatcatcaacatagtagaaacagttcacagctcccaggcgtgtactaagctgtgagcatgcattaagtcacttattctcgtaactaggagatgggagctataattactc

SEQ ID NO: 416340 - DNA, 696 bp, Homo Sapiens
ggctggaccggtccggattcccgggatgtctctgcagctcaagaccagctcgggctaaagcgacgaaatgcagacgattgctcagttccccagcggctctcaggaattgacagtctctaaattactgcctgagaagcatatcgcatgccaactgacaaaaggaggagagcaaaaaatccttacaggcggcggagcatcctctcttcctctctggggaggaggtgtttctggtgttcttgtcgctggacccggaaaccaaatgaaaaatatgtgattacaaacacctgggagggcggcagagcgagaatgaaaagtagaataaagaggaccccaaccttccccatgtaggaggcaattgggctaaaaaaataagaagaaatgagacaataaaagtaacaaatgaacctgcaattgctttgcttccgggagctcccatctgatttcagattggttctccaagtcaacttgggtagattagtgtatccacgtgatgcaaaccgacctccgaggagacccgggacccagtcagcacaggacctaacccttggtgagtgggctgtcccggtggaagacagtacactgagcagtgtctctggccatcattgtgtgtgcttttgctgtccctgttgcacacgcctgagctttgagtgacttcatggggggacatgcgttttactcttagaagagcacacagaa

SEQ ID NO: 416341 - DNA, 1021 bp, Homo Sapiens
  misc_feature (606)..(606): n is a, c, g, or t
ctggatcagaacagctcttttagaggcaggtaaaggcagcccaactttatgggccttcaatttttcatgactatgcagctttcctctcttcctttgttagaaacaaaaagggggggtcccttcccctctgttatccagtcatctgcaaagaccccagccctaacctgctggattgcacattcactacagtaacttttgaactttctctggagggaggttaaggattctaataccagaaggctgggcctagcaaagagctatttgaggataacagccctcctttgtgctcctctatccggtcgctgcctcgttctggcctatcatcctccaggatgtctctggtttttgccattgctctccatctttggagtccattcaagcatcagtgcccctccaaaagctcagcctgcttctatatcattctgattgctggtattaccacgccctttcatatcaccacatttatcttcctattatatcaattagcatgaccattacatggatgacacaacctgcaaccccactatttaataccccaataacaaacttaccaagacgtgactaataatactatcctaaagcgatctcaagacccgcaaccacttntactgtattattatttttactttttcaaccaatcttaacctcattcatctttacacacataaaaattcatctcagccaattaggcagcataaatccaactacggacactaaccgcaacttgcttttttggctcccattaaaactctttttccgcctgcccatccagttgttatccaaatagaaaataaacgaacccaaaacaaataaatttgtcaacactaagacagacttttacatttgcacatcccttacatttcataattgataacagcaataacaaaattacacataacaagtgtttaaccaatagagagataatagagggaggtgactatccgttgttcattaaccgcacatgtactatgcgctaacagcggtacgagatatattgcatcccatcgtgttttgtgaatac

SEQ ID NO: 416342 - DNA, 1120 bp, Homo Sapiens
  misc_feature (723)..(723): n is a, c, g, or t
ccctggatctggagcagaatgggcagtgagtagaggagtaggggttgaagtgagaaaggaaatgattccatagttcccagccccaggcttctcaactctgcagtgactggaggtgtggagtttgggagtgacctgccccaacttggactttacaaggtaattgttgctcttacattcagggcaagtctgtagagtagcacagtagaagtggggagaacagatcaagaaaggatggctaaaccaaggtggtagtaatggagtggtggtgggggggcaacaacaacaaccctatagcccgagtcaccgacgccccaatatttcgtaacgaacaactcaattaagtagagtaagccgaacatgttaccagagcctactacttgctaatgcattgtttctaccatatctactggtattaagaacagctatataacaatgcggacgaatcattgccgtatggttaaaatttcctataccttgacagtaagaaataatgactataaaaagcgaacgcgccccaagacaaagtcaagaaaacatgtgagcaatataccaatctagagcgtaagagacagaatgcgagaccgaaacagggcgcgagacaaacaggaggaagacgtaagcgacggtggaaaagatggataaacaatgaaaaaacagagaggcgaagagaagaaagggaacgagaggaaagggaaagacaggaaaacaaaaaaactagaaaantgtgtggacgcgaccagttagttagtcaccaatagtattgtattagaataaaccaatgcacgcaagaacacgaagaaacaaagtaagatatcaaatataatacatgcaactgtacacacaaggtctggcgagtaaaccgatcgccgactactagaagcacgccgaataagctgactaataatatataacgtaataaaattccgacgtattagaagaatcggggcggtaacgaaacaggcggcgctatattatcgcccgccaatgaacataactcttgtataatccgcgccctaaggtgacactttagagtgtacggagcgtctccggaagaaaaatgatgtgtagtccttgcaccggaaataataacgcgcgtttagaacaccttgtatcgatatcg

SEQ ID NO: 416343 - DNA, 1384 bp, Homo Sapiens
  misc_feature (1265)..(1265): n is a, c, g, or t
  misc_feature (1267)..(1267): n is a, c, g, or t
  misc_feature (1310)..(1310): n is a, c, g, or t
  misc_feature (1350)..(1350): n is a, c, g, or t
ataatagcattatttccttctcttctttttccgtttgatcgcactgtctgttccgagtacggaattttttggatgtctagctccaagaccatgcacttgacccccacaccagctagcttagaaggtccaaacactatttggcactaccagatccttccacttagcaaagacagcagatcctggtgccagggcacagggctcacctggatgtggggaggagtgtctcctatatattgatccttttttttgatcaagcggatcttcctttacgaaagaacttggagccatagaggaagaaagaaactatactatgttcgtagtagtaagactgtcgtgtagaggatgttgccgtctatcgtaatttgatatgttactaccttggatattattcgcgatgtatccacagacaggattattatcgccttcactggaataagcttaaccaattgtggtactttgacctttttgatgacatgtttttacgcatctttttttattcttacgttttatattttaccgtaacggttacaatcggcttacgtatacgccctccgttatgcttcccctactttttgttccgtacttggcttttttctaatatctggatattgttcataagcgatatggtatcaaagtgaatagtcccgataaaaaccgattgcatcaccgcacaaaatctcttaacgcagtcgatttaatactacatgaatttataacttataattcataccttactaacccacccaaacagttgcacacttttaagtatgatattttatatatatttgtactttatccaccccaatccatccgcctcctctgttttgcacttatccagtccctcttatccctatcgcatcttaaagccactttctttgtatacaattatctgctaacacgacatagttcgaggtaagcgaccggagttcacatcgtgtcgtagtatcccgaatcctcaacttattgtatcgtttctttctccagccaatattatttcaactactatacgatatttgtcttccgcgacatacgacgctcattcactttggccatattttgtattctctgacttatagtcactcgatattgtgtgctatagttccgtaccgtcgctcactctatgtgtcatggtttatatgtcgcactgtcgtatctcccacaattatattgatatgttattccacctacagatttatcgcgacctccttctgcgcacgaagatgtgtcgacatatgtcgttggcttctgcagagtatatgttgtgntntaacacccccactctacagctcactgtattgtgacctcgctgntaagctttgtgagaccacacgctaatatagtcaaacctgntctcgccccattagttttttatcgccttcatcac

SEQ ID NO: 416344 - DNA, 1040 bp, Homo Sapiens
  misc_feature (76)..(147): n is a, c, g, or t
gatgacatggtgatgacatgggagaggggactttgtggcacccatactaggagtgcaagccccaggcctaaagggnnnnnnnnnnnnnnnnnnnnnnnnnnnnnnnnnnnnnnnnnnnnnnnnnnnnnnnnnnnnnnnnnnnnnnnntccttggaaggattctggagagcacttggcacagcgcctgccaggcagtgagtgtgtggtaactgtcagtaactactgttgtgatgactgcgatgccccaccccccattcctttacagcagacctcatccttgcaccgcctctacttcactctgacaccatcctttcctcctctgatcttcctgctggaacaatgaaaccgaacacctccctctctacccatccccttccttcctgtgataaccagcccccatgatggaatatttggtgtttctctttacctctttgtctctggacgtgatagattggaacagaaccttctcgtttgtgttaataccaattctccgcaaagcatggatgaaattttttgaataaattacgtttagcatgcatttgaatacagagattgagttaggaggacctgatcacgccgccctatccctatatactcatattaaaaaataattatgtagacgagtatatgccatattcatagttgtgattacttttttacttatattataccatgtcagtaacaccgaccatccctagttatgagcggaccgacgggtgtgttatgttttggccccctagcgcaccgttttacgtggcttcccaccagagtataaagtacaagtgtaagtgtgaagggcgtgaaagatggtatgatgtgtgcatacagttgtcgccgatttataattctgttaaccgtgctaccatatcctttagagatgcgaacgtgtaaactttatgttttatgaatgtttttatcgaaacttacataacatttatgtccgatactagaaacacttatatttattatccaaatcaattcgatatataaacaaccacattagcaccctgtgttcactcgacatcagaattaaatcacac

SEQ ID NO: 416345 - DNA, 933 bp, Homo Sapiens
  misc_feature (242)..(269): n is a, c, g, or t
  misc_feature (279)..(536): n is a, c, g, or t
attcctgggattgagacttcagagaacctaggactgcctctgccttcaaaatgtctaattcaattgaacaagcaaatcttataaatgggacagtgatccagacaataatatacaaaccaacatgtgatgtatataggtatacttctgtatctatgtggggcttagtttatatgcaatatttcacaccaagcgctttaatcaggacctgagaattcagaaacaaagatttgattgcagcttcnnnnnnnnnnnnnnnnnnnnnnnnnnnngaaacagaannnnnnnnnnnnnnnnnnnnnnnnnnnnnnnnnnnnnnnnnnnnnnnnnnnnnnnnnnnnnnnnnnnnnnnnnnnnnnnnnnnnnnnnnnnnnnnnnnnnnnnnnnnnnnnnnnnnnnnnnnnnnnnnnnnnnnnnnnnnnnnnnnnnnnnnnnnnnnnnnnnnnnnnnnnnnnnnnnnnnnnnnnnnnnnnnnnnnnnnnnnnnnnnnnnnnnnnnnnnnnnnnnnnnnnnnnnnnnnnnnnnnnnnnnnnnnnnnnctggttgcaacttccaactagttcaacaacttcctatacgacataactccgtgagaaatggccgaataaactattttttcccaaccaaaaaaagagtatggtgacagatataataaacaatagccgcaaacaatgatataaaacaagcataaaaatatgtaaatatatcacccctattacccactaagatcaagtcaattacagaaacacgccttacttgcccattaaccttttacgcctggcggcttagatgatagaatactaagatgtccaagcgctgactattcaatctttttttctgtttttgcccaaacagtttaaaaactaacatataaagacatataggaaacgttattaatgaataaccatttatagtaagagcttcttaaccgccccc

SEQ ID NO: 416346 - DNA, 975 bp, Homo Sapiens
  misc_feature (15)..(15): n is a, c, g, or t
  misc_feature (139)..(421): n is a, c, g, or t
  misc_feature (423)..(441): n is a, c, g, or t
  misc_feature (824)..(828): n is a, c, g, or t
  misc_feature (830)..(834): n is a, c, g, or t
  misc_feature (837)..(840): n is a, c, g, or t
  misc_feature (842)..(842): n is a, c, g, or t
  misc_feature (846)..(846): n is a, c, g, or t
  misc_feature (848)..(848): n is a, c, g, or t
  misc_feature (850)..(851): n is a, c, g, or t
  misc_feature (862)..(862): n is a, c, g, or t
  misc_feature (884)..(884): n is a, c, g, or t
attcctgggatttcngaatctatggtagacatgagcaggtatgtaatgttgtagtacttataattgaactgaggtcaaaagttggtaggactataccatgaagagatcaaaaaggacaatctttaaagcgaaagggccnnnnnnnnnnnnnnnnnnnnnnnnnnnnnnnnnnnnnnnnnnnnnnnnnnnnnnnnnnnnnnnnnnnnnnnnnnnnnnnnnnnnnnnnnnnnnnnnnnnnnnnnnnnnnnnnnnnnnnnnnnnnnnnnnnnnnnnnnnnnnnnnnnnnnnnnnnnnnnnnnnnnnnnnnnnnnnnnnnnnnnnnnnnnnnnnnnnnnnnnnnnnnnnnnnnnnnnnnnnnnnnnnnnnnnnnnnnnnnnnnnnnnnnnnnnnnnnnnnnnnnnnnnnnnnnnnnnnnnnnnnncnnnnnnnnnnnnnnnnnnnttcaaactacccgactaaaacatgctaaggacactgatcacagaaaaaggattatatatatgtacgaaatacatgaaaataaattaagatcaatacaaacccaaaagggtctttaataaaacctcaaggcccaaaaagtccatgaatccttgtaagccttttgtttgccccatcctatggctcctggtagggaatacccctttaaggatcgtgtgcaacaatccccctcatgcccgcttaatttcaccaccactgttgctattttgagttccccagccgcatttttggcgcaacaaaaaacatacgcacagatatgtgataccataacggtcgatagaagcttgtcagccttatggccaatgttataattgtggaacgcatgnnnnngnnnnnatnnnncncacnanannatttgattttncattttttatccaaccacaccngtaatcgcacaccataacccatatttattcccaccaatagaatataaaacaacattaccaccaatatttctacctgcgtttattcacaacg

SEQ ID NO: 416347 - DNA, 951 bp, Homo Sapiens
  misc_feature (185)..(185): n is a, c, g, or t
  misc_feature (315)..(373): n is a, c, g, or t
  misc_feature (429)..(438): n is a, c, g, or t
  misc_feature (512)..(521): n is a, c, g, or t
caagaggggaaggaggagaaggggtaggaaggctagaaggaacagctggtccggtccgagattcccgggatctgcatcttcagatgagagttacatctaaacaagaggtgctttcttgaaagcttgccacagagggctttatgcaggaaactcacccctagtcaagcaatatgtttatgacctgnggaaaaaacccaaatatggacctaatgagagtcccctcactggggctcctaggcaaaaatttctgcccgggaattatgttaaattgggggcagaatgccccccaagcccagaaattccctggggggcccnnnnnnnnnnnnnnnnnnnnnnnnnnnnnnnnnnnnnnnnnnnnnnnnnnnnnnnnnnnggggaaggggtttcctgggctaaacttctaaaaaaggccccaagaggttatttggnnnnnnnnnngggccaattttctcaggacccagagaataatcccaccggccccacaaaaggagggttttttttatttccccaannnnnnnnnnctttaataaataataaaaaccccacccaaaaacatgtaaatcaggaaaaaagtccacaataaaatatcccccctccacaaaacataagtcgttattcaccccacacaaaaaaatatgattaaaataaataagagaaattaatccgatttttattactaataaatgtaaaacgcacaaatcatatctatacactcattttacttttataattcacattctcaccttttgtatacacataaaccactaatataaccgaataccaataccctatatcacccacatattatatcgtcatcgtagagcccgctatctacattcattacaccataatcacatgattacttccctgagttgcccaaaagcatacaatatttacacccactcagcgtttgcccctatactccctccttcttttagccacaactaccaa

SEQ ID NO: 416348 - DNA, 593 bp, Homo Sapiens
  misc_feature (438)..(447): n is a, c, g, or t
ccggaattcccgggatcgagactgtggctagcatgttctacataattcacattccttaaagtttctattaggtctttttaggaagaaaagattgtcctcattcttttctgccttgcaattatacatttcttgacacttttcaaaagagacactaacagcaagagactttttcatctgagaggtctgagcaaaagctctctttacctgttaattatgttaggagtctatcatgacagcaattgacatgcgacccttacaggtcttccttattttgtggctgtaattacatgggaatgtcatttgtccaggttttgtctctgtgtatctgtcaggcttagagatgggcagataaacaattctatggagagactgcttttcattcttggactaacgatgaataccacacatttgtctacggattaaaggtattactcattnnnnnnnnnntgtatacatgtgtatgcacagcggagggagggagaaagcaaggggaaaaacagttatggcttatactcaatttgtactctgaagaaataggacttgtttatatttcatgtaaaaatattaaaaggattggccaggtgcaatgtatt

SEQ ID NO: 416349 - DNA, 982 bp, Homo Sapiens
  misc_feature (436)..(514): n is a, c, g, or t
  misc_feature (534)..(632): n is a, c, g, or t
tccgaattcttcggtctttgtggtgcggacagtccatatcttgactgtggttgtgaactacccaggaatggttctgaggtccccccagtccccttttgttccctgctggctggaagcatttcctacgtggtaccacctgactgcctaagaagacaatcacggatgtgcaatcatgtcaaggcacaggcagtttcctggaaaaaagaacaactcctttccactatctcttcactaaggaatagaaaagaatttcacttgggcgattttaaagtagagagcaaatctgctctgctcagactcgcccttggtgtcaaatcactatttatataacaaaacctttaacataaatgaaaacaatgtaatgtgtagaatggtagaccacaggctcagagacacaaaggtctgggtttgaatccctctcccctgcctattgtgnnnnnnnnnnnnnnnnnnnnnnnnnnnnnnnnnnnnnnnnnnnnnnnnnnnnnnnnnnnnnnnnnnnnnnnnnnnnnnnttaaaaactggcttaaatannnnnnnnnnnnnnnnnnnnnnnnnnnnnnnnnnnnnnnnnnnnnnnnnnnnnnnnnnnnnnnnnnnnnnnnnnnnnnnnnnnnnnnnnnnnnnnnnnnataaccccatgttactaacgtaaaaagcggaagcggaaatatgataccacctttgctacatattacttgaaatccattacggtagcccgtaagcctagtgccacagacaaagaaccggcagttactatggccgtcggagcctatctcgtgcataaagaaaactgcgcccaacttagccccgacccacccctatggtccaacgttacaacaaacatgcacagttgtgtaaataatataaaaaacaactaacgagatagaggaggggggctggtgtcagtaaagattagagtcatgacagaaatgtatggcgtttgatgagcgccatgcgcccatataatgaaactgatgga

SEQ ID NO: 416350 - DNA, 1015 bp, Homo Sapiens
ccggaattcccgggagtgagtgggagggtgcagtgggcttttcactagggtccaggatggggtgcagaggggtcttgcggctccagccagaagaccccattttccaagccacccaacttcccggttttccctgaggaaaagaacatgtcctggaaagagatgtggcgctggcagaggccagagcattgtcattaggagacagcctccattttccctaaccgagaccagtgccttggaggctggggatggaggccaggccatcgggtgaccgtgggggccaagaaaactgcacatggaatttcttgttagcgtttaggatgctggtgaataaaacaggccgtggtgtgtgccccactcaagtggggtctgtggtgagacatctgtgtcgaaagccactgcctggggaaagccagttgcgagcgcctcctccactaatgtcttctgcctctatgtgccctgcgtgcttacaaggcgcgttgtcagcgcgcgcctttcaaatataaccacactctgtaaattacccatttggtagggtggttatagttaaatacctgtccaccaggagcaaacataaaacgaaaaagccgctgcatgaacacaccacacaccatacctccactctaatgtcgttcgggcctgcgggaactgccctggttttccacgctatacatgaatcacaaaacctttctacaacaagggttatgttacaccacggggcgccataatccgtactctccgtagtgtatattgataaaattacagagttagaaacctgcaaccaaaaataaactacagtgtcaattcactcggcgtttacttcaacgatctcacactaaatataccagcatcatagtaacgctcgtgttcacaagcgcagcggataattctaacccttatgcatatcttgtgcaggggccgcattagttcgcagttccctcgcgcccgctgcgagtaatggcaaagttgaacgttcccctatatgttatgacccgcatgtccaagattaatagtagct

SEQ ID NO: 416351 - DNA, 627 bp, Homo Sapiens
  misc_feature (250)..(287): n is a, c, g, or t
attttgttccacattaaattaataaattagcacaggaaactcatttctccccattaaggccaagcctatcccttgttctgtattaataagcttctgctataagtggtcacctgaatacaattcctttcctgctacaaccttttttattgtacttataaaaataatttataaacatacccttaagatataaaataggctatatttctcttgggtcactgtatttaattattctaaccctactgttattgtnnnnnnnnnnnnnnnnnnnnnnnnnnnnnnnnnnnnnncttctgagcttttgaacatcaccactgggggactggtagtgaaaattgacacagtaataataaagtgttttacagtttacagggtactcttgcagcatcatctcatttgaacctcacattaaccttttgaaatagaaagggcagaaagtgcaagttcatctctctggtgaagaacctgtttgacacaggcagttgactttttcaggtcatacagtgagtcaggctgggagtggacttgatcttttgattccaagtcccatatcttgcaagcatggcattaattactttctacaccagtgactctcaaatttggctgtgccttggaatcatccggagagtt

SEQ ID NO: 416352 - DNA, 875 bp, Homo Sapiens
aaatgtctacagcagcgtttaattgaatcctagtctgtccaactccaaagctttacctgcatttggtagaaataaatttagattcagcaaacattgttttcctgggggttgtttgaggaagggaacatatcttgacaggtgctttctataacattattttatttaatcacccgaagcccatcttctctttatcacacacttttaataagctgataatttttatgtgagtcttgagtatgcccttttacaacagaaaagtgggaagataagtgttcacctttatgccaataacaaaatgttattatcataaaccagaagcgttccccagaggcagtcagtcttagtatatagctacaaacagatatattagctcaactttaattcatgcaaaactaagattattgtctttgctaaactttcttcaaaattcagttggtcagttccaaataactctgtcaagcaagtgaattcattctctttcctggaggtacgtttcacagctaactattcttggcagacacactgagaatcaatgctgctttaaatcagacatttcgtagaagacttgctacagtttttctgctgccagtgtgggggactgttctcccggtgtgaaatgtttttaagccaaaaccttttctattgcattctgtggtataatgtgaagtttcagtaaaatgtttatcgaaagagcctaaacttatctaacctttcttcctgccaaaaggacccaaggttgcttctaaaataacctgggctgcgtggcacccagcctaaaagaatgaaaaaaagcattttcttccaccggaaaatgaaaacactacggttttaatccttcttggaacttcctcgaagtccccataattttatcccca

SEQ ID NO: 416353 - DNA, 628 bp, Homo Sapiens
cgaatacctttaacagaatgcagtttagtctgccaggaggcatttatactggtgatagcatggatgcgggagcaaagcagagggtggccaaggcccagcaatcaagtactgtccgtttaccttaattgtcatacgtccaattcacagctgttgcccttgatgtgtgtctgagagaggttctgtctaatagtgttttcaatgtgaatgaatgatactacaatattcactaaatatgtatttgatacgatcatttatggacttattaattgaaacaagcacatttctagatgctggggcgacagcaatgaatcatataggtaaatttcctactcttacagagattactttggagagatacagataaaaaaatttaatatgtcaactgagtaatagatgtgatcaaaaatagaataagaatcctacagagtgatattggtgtaataagaaaaggcccctctgagaaggtggcatttgtcagagacctgaagggtatgtgagagtaattcatgcagaggaacccgtgagtgcaaaggtgcagctgggaggctgagtggcacgtgaacttgacataaaaggagccagtgtggcagcagaggtgggagtgagagggagaatggcagagatgagc

SEQ ID NO: 416354 - DNA, 857 bp, Homo Sapiens
  misc_feature (590)..(640): n is a, c, g, or t
tagcttaaggcctcttctatagatgctataaattatgacttccataaagaaaaatttgcttcctttcctaagtccagctctagttctcttccttcagtgaagttctagagacagccgaggtccaatcctcagaaagcagtgtctcctcccaaatttcaaatctacactaatggttcacaaagaaggatgctcaaatcaatctgccaaggagcagaaagaaaatactaaaaaccctacttgtattgttaatctgcagaaagacaaaattagtttacgaaatacatacttacatttgcatcagcatccgtaccagtaactacatccacctatcacatgtcacatataatacggaccatataatgagaaaagtgatagattccacaatatggagagaaacattcaccatcacagaactgtaacattttgcaatattcacgtattcaattaagtggatgtatggtttatattatctcaaataagagaagcttttacattatgggatgtggccatgaaaatcttctataccaaacagaggtttactatcttgtgggcaaactacttttaaaactgtcgttgaggcccggcgcgtnnnnnnnnnnnnnnnnnnnnnnnnnnnnnnnnnnnnnnnnnnnnnnnnnnnaaaacgatgtccagaaaaaagaaaaccacggggaaaaacccctcctcttgtaaaaattctaaaaaatttttcccgggcaggtcgcctggtaattcccatttatatcaagaaagccttataggccgaaaaaagggtcctggaacctccatgtaggcggaattttttgaattataaccacaaaaccttagacccctctgcaatttccctactttggggc

SEQ ID NO: 416355 - DNA, 892 bp, Homo Sapiens
atatttagtacttcagattgtattacagattacataaatcactccagttattttcaacatagtgaagcagcttcgttgtctggggaaatacctgcagttcgttgtcttgtgctgtgccgattaatgacacagactcacacacggagtgggttaaggaacagaaagtttattaggcaagaaggaagagaagagcttccccatagagagggagaagcactctgaatggagtaaccccacttgtggggaaagcagtcagttatattgggaggctcagggaggtagtgtctgatttgcatagggcccaggggattcctttgaccaggtgtgtcattcacacaacccatgaaaagactggccctcccaccctaatcttttattctgcaaatgcggcttctacctggctgtcgccatgatgcctgcacatgtggctttacttggctggtgccatgacaactgcacatgtggcaacaaaggaaagtgagcgggaagagtcatattgagtggacctggctgttagccacctgcatttacttctgcaagcctgtaatttacatacctatgcttccagcatggcttttcaggctgctttctgttagaaaagaaatggtttgggggctgcttttttattaaaaggaaaagcctttctgaggactcttttaccctttctagctgcctaaaaataatttcttaataactcctgtattaatagtggggtctaatgtgagaaattaagtacttataaaatttttcaagtatagaagaccattatttatgctggggcatctatttatagaaaattgttaccagaaaaaacacctgtagaaactaaccctggctaaagtaacccttatccgctggccgttacccggggaaaactggaagaggaacaaag

SEQ ID NO: 416356 - DNA, 895 bp, Homo Sapiens
  misc_feature (138)..(146): n is a, c, g, or t
ccggactcatgcactcaacaaacacttattacatagtatgtgccagcataggggatacagtaataaacaaaacagacaagttccctgttcatgtaaaccttggacttatggggcaaaaagacaataaataagcagacnnnnnnnnnttacaaacactctcaatgaaggaaaagagggtaacatcgtacattgatgggggactataaaattaagtagtaaggaaaagctgcacttgagaaggtggtatttgggaagagactcgaatgcctagaataagccaaccagatttggggcacagcactctcaacaaaggctgagtaacacagccagtctgagggaggacaggtctacggaatgagagccgaggcaagtcaaggcaacatcacgtgggtcctgagggtatgagccttccagagggtgtgaggataccattagaaggttctgagcagggaatgataggatgtgatttacattttgtaaagctgtctctgtagaggatagtttgtaaaagtgcttgaggcaaaactgacaagacttgaagacttgcacaacagaactgaagaaatgagaagaatcaactcctagacttctgggatgatcaatgtctaggatggacattggtgccatttgcaagatggagaagaccgggggaggtacggatttaaaggagggtatgtaaggagaaagaagaatcctatgagacaagaccagaacatgtaaatacatgaagttttggatttcttactcttcaaagacattttacctcctgtccccgaagttcttcacagagttcagggataagaaaaggctgcccaaacaagttgaagttttgaataaagtaggtaacttttcaaaacactttgaaaagaaccattattattaagaaattaggacc

SEQ ID NO: 416357 - DNA, 888 bp, Homo Sapiens
  misc_feature (319)..(625): n is a, c, g, or t
  misc_feature (681)..(766): n is a, c, g, or t
ccggaattcccgggatctattttgcagcataagacaaccggaaaatgacctgtagtgcctactcctctagttaattatcttccacctctccaggtccatcttattgactgcattgaggtcccacaaaatgacaaaatattgcaattatacataaatagagatcccattcttctttaaacaaagtataaacactgttgaaatggtacaccatggctttaatttttgatagataatttaaacatcatccttatttatatactaccacatttcatgaaacttctatccttcaaaaagctccttctggacgataacctgaacnnnnnnnnnnnnnnnnnnnnnnnnnnnnnnnnnnnnnnnnnnnnnnnnnnnnnnnnnnnnnnnnnnnnnnnnnnnnnnnnnnnnnnnnnnnnnnnnnnnnnnnnnnnnnnnnnnnnnnnnnnnnnnnnnnnnnnnnnnnnnnnnnnnnnnnnnnnnnnnnnnnnnnnnnnnnnnnnnnnnnnnnnnnnnnnnnnnnnnnnnnnnnnnnnnnnnnnnnnnnnnnnnnnnnnnnnnnnnnnnnnnnnnnnnnnnnnnnnnnnnnnnnnnnnnnnnnnnnnnnnnnnnnnnnnnnnnnnnnnnnnnnnnntaaataacaaatccaactcagaatgttataaccttggagtacaatatttttcctannnnnnnnnnnnnnnnnnnnnnnnnnnnnnnnnnnnnnnnnnnnnnnnnnnnnnnnnnnnnnnnnnnnnnnnnnnnnnnnnnnnnnaattgaaaaccggccggggccaaaaaagcaatacctcatcccctccaaagaaaaattataaggggcgggccgcttctaaaatatcccctcaagggggcccaaaccttacacgtttaccaacc

SEQ ID NO: 416358 - DNA, 1011 bp, Homo Sapiens
  misc_feature (99)..(234): n is a, c, g, or t
  misc_feature (354)..(529): n is a, c, g, or t
tggtaccggtccggattctcggatcccccgcacccatagacggaggaatcggcgagttcctgtttaacatgggacacactttcatactgtggaagacannnnnnnnnnnnnnnnnnnnnnnnnnnnnnnnnnnnnnnnnnnnnnnnnnnnnnnnnnnnnnnnnnnnnnnnnnnnnnnnnnnnnnnnnnnnnnnnnnnnnnnnnnnnnnnnnnnnnnnnnnnnnnnnnnnnnnnntactgaaaaaacttgaataccgagagttaaatggaatgtgcaccttccaaatgagtagaggaggaaaaatgcccccgactccaaaacagcaaaaccatctgagtcaatacatcagaagannnnnnnnnnnnnnnnnnnnnnnnnnnnnnnnnnnnnnnnnnnnnnnnnnnnnnnnnnnnnnnnnnnnnnnnnnnnnnnnnnnnnnnnnnnnnnnnnnnnnnnnnnnnnnnnnnnnnnnnnnnnnnnnnnnnnnnnnnnnnnnnnnnnnnnnnnnnnnnnnnnnnnnnnnnnnnnntagctattcccggatactgaggccgagaaacctggcttaaaccccgcaaagaataaattacctgtgagcccaagatcacacctcttaaacctctaacacttgagaattctcataaaaattccccgactctttgtagcccattacgcccgatatcctgtattcccccgcctggacccacaataacatccaacgtattttccctcagcccatttccgaacatcctcctatgaattaccattaatatgaacatcccatacgaacataaattagcaattataatctagccacgacatgttacttatcccgtcaacatttgaaactgtcaacaccccccagcccaaattgtgtctccaagctaatacatactacaataatacacaactcacctccacaacacacccatacgttaacgtcaagagcatctgtcatgtactgacctaatatactctcgaatttaccccgatgtgctacaatttaatctt

SEQ ID NO: 416359 - DNA, 778 bp, Homo Sapiens
  misc_feature (748)..(748): n is a, c, g, or t
  misc_feature (755)..(755): n is a, c, g, or t
  misc_feature (760)..(760): n is a, c, g, or t
tttcatcatgcagaatttgttacagtgtatcataaagcacaattaggaatgttaatactactcactatagattaaaatctcatagaggcattttagttcccataattaggcacaaattttcttttggaaaaattcaggcttaattgtctgattttacaataaacaatacagcagatgatagagacagactttacccatactcaatcatacttcctttcaaattaaatgtagaaagtgatttttttccaaggaaaagagtatgattggtagcagttgattcactcaggtggtagaaatcacagggtttatttagaatgaaaaacacaaatgcttgtgttgtttcttaagatggaaagccacactaggtactgtacataccagcatgctgtttttcttcacttcaaggcagatttgtattctcaaacaaattaagaaaacttcctgacagtccacaacagagggcccaaatgagagaagggggtctttcttgaagacaggagaaggatcgcctactaacttagaagggagaggaggcaactgctggacccagagcaccttaacaggagggaggaaacctccagggcactacctgactgcggaggaatgacaagaatatgataatgacactacttactaaaggcagaagtctatgagtacatcagggaaaaaagcagtttttttgggtacttcatttaataagaacaaatgaagaaatcttctagccagaagaaaacaattaagaaactgnaggtagntgggnctcaatgccctggtaaac

SEQ ID NO: 416360 - DNA, 808 bp, Homo Sapiens
ctggtaccgggtcccggaattccctgggatgcaaataacagaaacgacaatttcttgccaaagttcctattttacatgtttctcatgccttttgtgttggcaggacagatgagattcacaaaaacaatcttaactgaggtacctttaaggttcaaggcatgctataatgtgcataacctaagaatgcccattgtgctagcccctacctggtaactttgcaggaaacaattgctctttacagtccaacctacattttttcaataacacggcagggatattgacctataaaagtgtgccccagagcaaaatagatttacagtaaaaggagaagatattgcactcagcaaagggatagttacagttcccagagttatgggctggactgacatacaagatcaggcaactcatcatggtgataaaaattgacttaacaagaaatattttcagtggattaggactctgaagcagagtcaaaatgtatttaatgacttgagctgcttgttaaaactgcaggtttctgagacccagcctcagaattctagatttatgatgtgatgacagagatctacatttttgacaatcatccaggatgattttgacagacaatgatgtttgacaaacaataatcttgatatcgaatttttatcggttacagggattttattattcaggaggtgaatggggtgtttatgttcaattttaccaaattcctattcaaaaattaatggggaaaccctttctccttttttcccttaacccattggcagaatacaaatcactgcaccttcaaaaaatccccccctttgag

SEQ ID NO: 416361 - DNA, 505 bp, Homo Sapiens
ccggaattcccgggatgttactcctttgttttgctttcttgtttttcttttgaaatcattaatgagtgttccattttattcaataattttcatgagtcaattgagagactgatgtagtttttctccttaaacctttagtatactaaattccacttttagatttttctaacattaacatcttacattctagaaataaaccaccctcaatcataacgcattcccttttgtatacactgctgggttcagtttgttatctcattcaaccttcacattatgaggtaggtgctttacaatctttttttacagcttgttatttagtaatgatatgaccatgaataaaggtaaaacttggcctcaggtctgtctgactttaaagcccaagattttaatcgtctttcatgcttctctggatgctttgaagttaacaactcacgagaatgctcacgacaattcatgccagccacacatctgttgaaatatcctgggatagacaatgggagaaaat

SEQ ID NO: 416362 - DNA, 436 bp, Homo Sapiens
cctgattgcgtctctagcattgtggttcccgaaatcatgcctgtcctcaaagtcctctccgagatatgacatcttttccatgaaatcttttctaatctgtctccaccctctacctttcaaatttcctcaatttccaaaacttaaatgcctcacttttcattgactttccagccactgccttgttaccagtattactgcacatctttcatttgaataatgtgatgccttgttaataagttgaatataaatgcctcaaaattatcccccatgtgtttctgtggtgcttcctttcctatagaacttattttgatctcccttgtagataaatttacagtctaataaaacaacaaaaaatgtataatatgtattcctctgtaaacctttttaggtttttttatggattggtttggtttcagtttagttacttttaaagatc

SEQ ID NO: 416363 - DNA, 636 bp, Homo Sapiens
  misc_feature (115)..(398): n is a, c, g, or t
  misc_feature (402)..(410): n is a, c, g, or t
tattccctctgaaaagctttggattatattatcctcttaaatctaggctgctagttttctctggcacataatcactgcctctagccctctctcttaaagacagtgtctttatcannnnnnnnnnnnnnnnnnnnnnnnnnnnnnnnnnnnnnnnnnnnnnnnnnnnnnnnnnnnnnnnnnnnnnnnnnnnnnnnnnnnnnnnnnnnnnnnnnnnnnnnnnnnnnnnnnnnnnnnnnnnnnnnnnnnnnnnnnnnnnnnnnnnnnnnnnnnnnnnnnnnnnnnnnnnnnnnnnnnnnnnnnnnnnnnnnnnnnnnnnnnnnnnnnnnnnnnnnnnnnnnnnnnnnnnnnnnnnnnnnnnnnnnnnnnnnnnnnnnnnnnnnnnnnnnnnnnnnnnnnnntttnnnnnnnnngcgtcattatcatttggtgacatcaaactttaccatcagaatcacccagatgacttgttaaaacacaattttttaggttctaccctcagagttgctcattcagtaggtctggagtggggcccaagaatttgcatttctagtaagtacccaggtgataacgctgctgatctgggaccacccttggagaaccactgacttaaaccatttgtaacacagttagaaggcc

SEQ ID NO: 416364 - DNA, 902 bp, Homo Sapiens
ctccggatcccatttccattgaggcagtggcgtggcctgtcctgggagtggtccagcggtagcaagcccattccatccttggcctcctagccttctgagttgctatggaaactggcgaggtcctggagtttgcatggcagccctcttggcttttgcagctcgttgctgtgtgtcctccccttctgaggctggaaggcagattccaagacttggtcctcaagttgatggaggcttgaaaggtctcaggcagacctgtatttgattccatttcttttccctgctgttgaaatgcctctgggtggacagccacccacccccaccaccccagcgaagacagaaagggcaactggaaagtcatctcacctccatttttttcctctcccttttgatggattatggttgaacccagcagtgtcctcgctaggtgagctgcacgtttactgcacgttctgcactgggaatgcgtgttctgcccatcgtgtgcccttgaattctgtattttgttctaagcagcttttcaccccacacttgtcactttctgcagctagaactcttcttttaggctcagctcactgactgtcttgggaagaggggctgggtgtggcccaacagtgacctcctgtgcactctgaaaggacgcctcctgcaaaatggttaataggcctcatatccaacttgtttcccacaaaattttttttcccgcccaaaatttttcccacagctgccattataagctggcccatgttccccatgccggaacgcattgattttggacttcgggtgattcggatggatgcaccggttaccttgttacgcttgtgtttcctcgcacgacaattctttttaatacgaactcacaaaaagtagcgacttatagtttttccccccgtatccttaatcga

SEQ ID NO: 416365 - DNA, 877 bp, Homo Sapiens
  misc_feature (130)..(257): n is a, c, g, or t
cgggatccgtagtgagggttcacattatgaatgtcatggttccttccggctcttgattttccatgattcgggataagaatgattttcctctgagtatttttaggccatgagactcagtataacagtcaannnnnnnnnnnnnnnnnnnnnnnnnnnnnnnnnnnnnnnnnnnnnnnnnnnnnnnnnnnnnnnnnnnnnnnnnnnnnnnnnnnnnnnnnnnnnnnnnnnnnnnnnnnnnnnnnnnnnnnnnnnnnnnngaaaccagactaatgttgtattcattatctgggataaaggttagcctgtatcatcataatcaaaaccacacgacacagtgtgcctcacagtccagtgagccaaatccttgcctgtgcacactgtacccttagacctgagcagggggggcctgcattggaccctactttggagggccctgctctgaccaccctgaccacttccttcctgaccaggccaggaatccacggagctgaggatccaaagaatgggatcctgaggcttgagagcctgcctgactcttccctggacgtgcaccaagccactggtgtgcacacctataggttgagatagggggctcgcgtttgcctgggggctgagcttttgatgggggtgctgaaatgtctgggattgtttccatgtgtggtcccaagacctctttggaaaagatggaactggtaatggtggggggtccaaaatttggcctccttaaaatcacaatcatttgggttaactaaacccccgaaatatggaaaattacaatttacgattatggcctttattaatgcatttattattatatcatggggttaaccaacaattcgccctttaccccgctttccccagttttttctttttaaag

SEQ ID NO: 416366 - DNA, 893 bp, Homo Sapiens
  misc_feature (717)..(763): n is a, c, g, or t
agagattaggggtgtgtgcccagcacacctacaggaggtagggggcagggagctgcagctcatctaggtccttctaaaccctggcaaatactggcagcgtcaggaagggtgttcaaagagggcactcgaccatgatgataatgacaaagagaaaagaaataagggaggaagagggagagaaacgagatccaggtggcaatgtcccagggagttcaggtctaatgactggattcaatgatgtctagagtgtgttcagccctggcactgccactcagcccaaaagcagaggaaggaggggaaagttgtgggctggcctctgagcaacccatgttgctgtcacttaagcctcaccagatccctatcagggatggccatgcctggtgtattagtctgttcccacattgctataaggaaatacctgatactgggtaatttataaagagaagaggtttaattggcccacagttcgacaggcagtgcaggaagcatgatgctggcatctgcttggcttcaggggtggcctcaggaaaacttatgattatggtggaaagcaaaaggggagcaaacatttgatatggccagagcaagaggaagacagagcgaggagggaggtgctacacattttttaaccaaccgattctacaaaaacttccttcagtatcaacgagaaccgccacccccaggcatgggtgttaaaacccttttccttgagaaacnnnnnnnnnnnnnnnnnnnnnnnnnnnnnnnnnnnnnnnnnnnnnnnctttcccaaacaaaccgggggaaattaacaatttttaaccatgggggaattgggggcgccagggaaaaccaagaatttctctaaaccccgtaatttcccccccggggggtttttcctcaaaggggagaaa

SEQ ID NO: 416367 - DNA, 409 bp, Homo Sapiens
agggcggggccccagggggctccaaccttggaatcctcaagtaattttggggaaggctaaaggggggccaaaaccacctcaaagagttaagaaattttgtaaaatcaaccctttaataataaaacggttataaaaacccctttacttttctttgttctttttccccacttacccagtcgctagtcatctccagatacctttgtttgatagcaagatcatatccttccattatccttccgggttaactgtaatcacaccatacgattataggaatgaaacgctagtgagaagtaatttaaactaccaatgtatggggggagccgttttataaatgataccacatttatagacgcgttatattgaccattatttcgcccgcacaaggccgtcttttgtacgattataatac

SEQ ID NO: 416368 - DNA, 1013 bp, Homo Sapiens
  misc_feature (118)..(268): n is a, c, g, or t
  misc_feature (448)..(448): n is a, c, g, or t
  misc_feature (490)..(501): n is a, c, g, or t
  misc_feature (559)..(560): n is a, c, g, or t
  misc_feature (562)..(571): n is a, c, g, or t
  misc_feature (574)..(574): n is a, c, g, or t
  misc_feature (577)..(577): n is a, c, g, or t
  misc_feature (672)..(672): n is a, c, g, or t
ctattgaattttgtaacacatagaagtaaataattttaaaaactatacatcgaactctgtgggatgtatcaacaggagtgtatatagacagatttttagttttaaatagtaacattannnnnnnnnnnnnnnnnnnnnnnnnnnnnnnnnnnnnnnnnnnnnnnnnnnnnnnnnnnnnnnnnnnnnnnnnnnnnnnnnnnnnnnnnnnnnnnnnnnnnnnnnnnnnnnnnnnnnnnnnnnnnnnnnnnnnnnnnnnnnnnnnnnnnnnttttttcttttcttggtggcggggtgccttgtaattcccaacttacttggggacccctaaggccaggaaaaagggcttgaaacccgggaagcggggccttggcaatgaacccaaaatcccgcccattggaatttcaaccctggggccggcaaaaacggagaatttttgtttttccggggncgattccttataaaccccaccctctacaaatacaaacccacnnnnnnnnnnnngggggcgctcaatatccaggcactacacacttgaaggctagacatacggtacgaatgnngnnnnnnnnnnacnaantaaatattttttttatcaaataattaatatacccatttcttatatcacacatcaatcaccaaaatacgattcatttttaactatcacacacaatnataataactaaaccaacactccaaacattacatattagttcactttttactctagcaattcacagtattcatctcctatattttaccgacacaaaacactatatttctaccctttaatatacgatataccgtatacactcgacgtattacaacggcccgttattatattcttccaacatttatctccacaaccccactataattctctatcattttcgcgtactatacagtatatacttcaacgttaatatattctccaaaacgcacgtttattataattcacaccctcaaccacacattaaataatatatagcaagcacatattatatccacgccaatgg

SEQ ID NO: 416369 - DNA, 903 bp, Homo Sapiens
  misc_feature (12)..(12): n is a, c, g, or t
attcctcgatgnatctctcagggccctcattcacattagctggtggccatggcaccactgtgcacataaacacaacctacatctccaaagagggcagctcacaacaaaagtggcgtctactctctatggtgtctttcctctaaggtgttttttcatgagggtagcaaaatgacagaagcatccatgggagatggggagtcttcacaggacgggaagaagaccatacaaatccataaacattgagcatctgcggtgaaccagaaaccatgcctttctttcatgttgcaacatcagtggtgactctgtaaacatgattttgctatttgagagtaactccagtcttgtctacaagtttacagagctaacatctgtgatccttccctttcagaaacaaatttaacattgtggacgcagttaaattagacctggccagaacgggtatgactgcaaactgaatcatctgagggctggcatggttcacttgggactgaaagagattgggcaaggggagccgggtctatatcgggcaagacacctgtgattgaattctgttaaataagcataaaatttttatggaaggacctataataaaaacggaaaagtggattccgaaaaagttaaacatagaataaaaagatgccactaaatccttactacacccccggaatgtaaaaaatagagcccataagatatgcataactggccatcaaataccggcaaattaaacaagctaaacttgtaatacctttatcgttaccatggggacttgcgaaccatgactctggagccgtttccccgaagacaatatacaactatatgccgacacatttgtcaccgtacattttgcggccgttgtgcaatcaacacaccaacgatccactttagtatctacgtggccgcagg

SEQ ID NO: 416370 - DNA, 1332 bp, Homo Sapiens
  misc_feature (662)..(662): n is a, c, g, or t
  misc_feature (765)..(765): n is a, c, g, or t
  misc_feature (779)..(779): n is a, c, g, or t
  misc_feature (860)..(860): n is a, c, g, or t
  misc_feature (1013)..(1013): n is a, c, g, or t
  misc_feature (1028)..(1028): n is a, c, g, or t
  misc_feature (1089)..(1089): n is a, c, g, or t
tctcggattgcgtgtcctacctgcgctagctgctggctctgctgcaacatccgacgtgtcttgtgcctggcgacgtgggctgctcgctccgcgcctcccgggctcgctctgcggctccaggcgcctcttgcaccagcgcgagaggagctggccggccgcacgccgcctgctcccgggccgctcccctctccaggctccgcacagaccctaggctccaaggggcagagggagaggcagcaaagggcgcaaggaccagcttgtgggggtggggaggggtgctctccgccgagagcgtgcgcgagctcgcagagtcaggccaccccgggtgagacaatagcggcagcagcgggcgagagaggggaagccatctcccggacacccggcgcactgcacggcgacgcgacgctcggccagaccctgcctgcgacaggcaggcaacccgggccgccgggctccaggccgccaaccgccgaatcccgcccgccgagcccaggaaagggcaggggggccggacttggcctgtaaaatctccccgatcctaaccctaattacaacacattcgaaaccacaggacccacgcctattccccccggcccttccacgaccgcctttatccccgtcccatttccttatactacaaaacacataccacactcatatancgccgtgctcgcaatgcatccctccccactcatattcccaacccaataaactcattttatttactacaccacctcgtgcaagtctaaaaacacacaccaccgncaatcacttacccngcgttgttcttactgttggcaacccggttcaaaaccattacaagaagtgagggcacaccacgaccaaatatcactggtccnagtccgtgtcaacgccacctagaaaaattggttgattatgaaattgaaagatagcatcatcctcggaggctgtctttccccctcaccgataggagtgcaccaataacctttctacaccatccaaccaataatcctaatgtataaacgacaaantaatgtaaaacatgnaaaagagtccaaattgtcacccccacctcacaatacccgcttctctccccaccccccaatntaaccgctgcgattattcctttttcctctcttcgttaccacacccacaatgaacaaatccccccgttgtcccggcaccactcagcgcacagtgaggttaactccgccacaattcccacctcccgcgcaaaaagccgaggtttaattacatatttccgtcgctctttcacacccttctgtctcgtcgtcactcgcgagcgccatctcattatctaacggaactccacaaccaatcgggatatac

SEQ ID NO: 416371 - DNA, 919 bp, Homo Sapiens
  misc_feature (727)..(727): n is a, c, g, or t
tttaagaagtcagggaatcacaggaatgcagactgtgacaagagaacataactattagtacaaatgtaggaaacaaactcaaaagagtaggggtgaaaggtgctgatctaagtaactttggaaattactgaagtttgtaagactaaaggcaaaaggaactgcaagtaagcagttcctagttgatacaagttgtttcccatgggggttatagggaagcttaaacattccctctggaggtttgataattaagtctgctgaaatgaactgacaataaacagattaagaagagaaagaccattttaattacatacatgcaaatggaagcctcagaaaaatatgagactcaaaggaggaggcagatggttgaaggtttcatagcataaaatgaataggggcttgaaggggaggtgatgacagttatgagaggaaaaggagaggaactgcatggtgaacaaagattgtcttatgtaaataaagtctctcaggtcataaaagttgtttaggagttttttattgctgctgaagaataggcaatagcctgttttggtgtggtgacaacttttaatctcctctggtgataaatctttcctggttgtttgatgaaattcctagggaggagtctcaacacaaatgtattccttttggaagaacttccctcagtcagagaaagggaacttcaggagagccccctccctgcacttatggggaataggggtgagaaaacaangagaaaagcccggacagggcctcccatggggggccaggctttctaaagggcccttttcaaattttcccttttaaatttctaaagtggccttcaccccatggtttaaaaggggaacccataccggtttgggggggtgtatatcaatttttttcctggaaagccctttaaaaccaggggaatatattataattt

SEQ ID NO: 416372 - DNA, 271 bp, Homo Sapiens
attctctaacacaatcccgacaacgactccgagaggtgtgtaccattattaccttcattttatacctgagaaaagtaaagtttgagaggctgagtaacaggccaagggtcttccatctcataagtggcagagtctaatagattccacttgactcttggaccttcatttcccactgccttgtgtattattaaaatttaagtctgcccatagctttcaactgaaagaaaataggcaatattagaacagatcaggctgagggcaaattacaact

SEQ ID NO: 416373 - DNA, 841 bp, Homo Sapiens
  misc_feature (517)..(698): n is a, c, g, or t
  misc_feature (755)..(755): n is a, c, g, or t
tgaaacctagtgtcctctggatcaatgtttgctgaactgaactacactgctaacctcaaagtctgaattttcattattatttctctggacccattcatctgccttgccacatttgtgcctggaatattaatcatcaatgattaatggaatcatcaatggcatcatcaatcattccatcagattctcagacttcagacttcataatacgttaggcctgaaacctcccttcgaattagcccatatgaaaggagtagcagcagtgaagatcaaagcaaaactagctgagataaatccccatcatctcctcttctgcatcatttcttattaaggatgcaagaaacgcaccattgtttagaagtgacccgtgtgtactctcgctctgctacagcctcacaaaagaacagagaaccatcctcacctagattttctgctcttattgccaatcaataatcagtggtgctggcaattaatccaaagcctgaaagattaatttctttagatgataacagctatcacnnnnnnnnnnnnnnnnnnnnnnnnnnnnnnnnnnnnnnnnnnnnnnnnnnnnnnnnnnnnnnnnnnnnnnnnnnnnnnnnnnnnnnnnnnnnnnnnnnnnnnnnnnnnnnnnnnnnnnnnnnnnnnnnnnnnnnnnnnnnnnnnnnnnnnnnnnnnnnnnnnnnnnnnnnnnnnnnnnnnnnaatgcctttttaaatttcccaagcctaacttcaagggagggccttgaaaaggccagngaaagaaaatttggctttggaaaacccccccgggggaaaagggccgggaaaagggtttccgccccaaatttggaaaaccctcttgg

SEQ ID NO: 416374 - DNA, 751 bp, Homo Sapiens
tttcgaaattttcctttgctaatctaaccaatgaatacagcagtagttagccagtagggggacaacaagctatctgaacaaagttgagttattagataccaaagaagaagaaaagattcttgactatcataaaccaacaaaaggaatggtttaaccataaacactgagtttctttgcacaaacaatttgggacagtttggtaaaatcttttgtataattttggaaacggacttcagattaaacgattaaacacacatatttatcttcattctcccctgaaaaggatagtaaaagaacatgaagggataaatccaaaggggcaaagaagatagaggaggagtcatcagcaaaagctatatttcaacacaattctgaagaatagagagggtcgatggaggagtgaaaactagtttaacagaacagtgaaagctacactctaatatggccatagtggtcagtacagaaagagcccaattccctacaaaaccctagagtggtctgggccttggagatgacagagatcactagaagaaaatgctgatgaggggccccaggatcccggaagggtgagggagaggtgagcagctaaaagcaagaggccaggtcaatgttggcacttggagttgctggagtctcaggtgcccctgtccccactccttcgcagtcaggcatgagaaaagaaggagagagggctttgtcccagccagggcacaaaaagaaaagggccagggaaataaaggccaaacctggt

SEQ ID NO: 416375 - DNA, 943 bp, Homo Sapiens
  misc_feature (604)..(604): n is a, c, g, or t
  misc_feature (716)..(736): n is a, c, g, or t
tccggaattcccgggatttttcgaaatgcaaaagaaaaagaactaaaaggctaaggtaatgccatgctgttaactggggccaaggactgtatttgtcataagcccagcttctattttttaattgaaagggccgattaggggtgggaaaactatggcctgtgagtccctctgtgtttataaataaagcattactgaaacacagccatgcacattcatttctgtattgtctatggttgctttcatgccacaatggtaaagttgagtaattgcaatggaatccatatggcccgcgaagcctaaaatatttactcttaccctaaaaagtttgccatctggagtagatgaataactccatggtagatgaataaatcacattttatattaagatattttagtgtaaattgcaggtatccttacattttacttctaatttctttattgaatatctcaaaaataatgttgctgtataaccaaattgaaatcattatacttaataaagtaatagtttttccttaatgaaatttgatatcaagtcatataaaaatttcaattgcctccaaaatattatttacaactggtttctccaagtcaggatctaattcangattattccctgcatttgggtgcgtgtgacacaaaagtcccctttaatcaaaaaatgtaccctttcttcatgacactgaactcctgaaaaaggccatgcccttttgccccannnnnnnnnnnnnnnnnnnnncactttgaaactgcttttcaaatgggtgcccccccaagaaaggtttgcccccccaaaaccccgaaatttcccttcagactgagaagttagatcccaaaatgaatctagcctgctgagaataaaccttgcggttagcaagaaaaaactctccccctacacggtaaacactgaaacgccgcaatacccacaataacaaaaacaattata

SEQ ID NO: 416376 - DNA, 1172 bp, Homo Sapiens
  misc_feature (957)..(957): n is a, c, g, or t
  misc_feature (966)..(966): n is a, c, g, or t
tgaagcttcccaaaatgcccaggggctagttttgacctggtgatagcgaattttaagaatgtaaattgcatttacagagttggcaagactggccatagactggctctctccctaaaagggccttgaacacagggagaatatccagaacgggaccttagagaaagcatcaaaagtctgccatatttcacatagaaatgagaagcttaagctggggactaaaagtatttcctgatatcacatttgagcataatctctgtaacgattgacaagcatggggaatggagaagaaaaggcaaatatcagggttttttttatgccattacagacaaattttactgcagcgttgtttaaagatcagagaaaaaagcacaatggtcagccaaaagaacattgtttccagaatttttcaactccatacctttttacgcaatcgcaatccttcacgtattatgctcgatcattgcctccagataacgagggtccctcctataacccacgcgcgttccctcatatttctagccccatagaaaagctcacctgccgatactgcaacgcttgccgatgccaggaacatactttccttgccctttctcgcttttatcgaacccggcgactctattatagagttgtgtttatcgcggctatcgggattattggatggagcacatttgttttgtgcacttggtactatgcgcaccccgtttcgcctactgacttatcacgtattacagaatgaccaactcccaggctcctatacgtcattatcgtcaagcataaatctgccagtggatgtgttcacaccttcactctccgacccatctcctctttactcgccacccacttttattatccccacacacttaaccacatatatgtacaatacgcatttatactccgcttataatccgtattgcccgaccgctgttattccatacgacgactcttgtttactaatanaccaccaantattcggccacgcactccacccagtatgatgcgcataacttatctagtcacacctaccacaatgttcaactatacacattagatagagtttatgcacaaggctcacgtcgtatgaccgacattattccacttcgcacgccacgaaccgaacgtattgtctacgttctgactatacacctatcgatatcgcgacacacactgtattc

SEQ ID NO: 416377 - DNA, 1051 bp, Homo Sapiens
gtgccctgtgtttgttgtcaccaccactatagtatatattactatgcgcgtccggtccggaattcccggggatccaaactatatcaaactagtacttcatatttcttacatgtattaggattcccatatcactgtactatatgtagcaaaacataagccccacctttaaggaggttaaactgaagaagacaaattgagggccacgtgttcagtcattgaggcttgctcagaagtacgaaaaaatttaaaacattcagaaccaactgaaaggtcagcaccgtgtacacaagacctcttagcaatacaaatgttcacttacctacattcctggaaagaatcaaattataataatcataaaattattagaagtttttaaaaacatggctttgagaatttcgttcattcaacaagtatttatgactgagacttattatgtgcctagcactggcctgccttgagatacgaaatgattgcacaaaatccccgccctccaggatccctcattgtaccatgggagcctgaaaacaaacagggactggataacacagtaaagtggggaggtcctgtaggcagaaacctatcccagaattgggaattcaagaatgagttttaggctgaagaaattttaaaagaaggccaaggtaagaatagtccacttgaaccccaggaagttcaaagaccttccctcgggcaaacataatgaaaacgcctaccccgaccgagaatttccctatgataaaaaacaacttatttttggaaataggtgaccctttaggtttatgaaagttcgaccgtgccttttagaagagcgtccatttagataaagtaattggacattggggaacgattaaccaccacgcatacacctttcagtccacacctaagaaatgttcggtttttggccaatattaacagactttttatcgcgttcggtagtatataaaccataccgtttgtttaaccaattttaccaacaatattaaccacactaatttaccccatatggcaccaccaacaaatacacccgatttatatcaccaattatagcgca

SEQ ID NO: 416378 - DNA, 631 bp, Homo Sapiens
attcccgggatctctccctggccctcaaagttatgataaatgatagcacaaggaaaagataacctaccatgagagtaggatcaccaaggccaaatactaaaactcccagctgactggcccatacactgcagcctctgttcgtgtttattttttctgctcactcttggtttcgtcaatcagtatgatagacgataagtcctgactagagcagcccgcgtcctgctctctcacggtgggtagcatgttgtggttggcgccgagcagtcggaggatcgcccgcatcaggagcaccaaggggatgaggttcggagcagtcttccagcagccggctccttggagaatagcaggcaggagcgttatcagcggagagtggagttgccaagaaactgaccacacattagtagctttgtttgggtagagtctaagggggctgtagctcatagacttgagacactttctgttaaatcatccctggatttaagtgttaaaagaaagcttgttcaaaaagaaaccaggactgattgccgcaggcagtcctgtgacaggactctcaggattgagagtcaggaatttgtggagttgctgtgctgaaatgcaaatggacttcaaattttttcgactaaaaactagg

SEQ ID NO: 416379 - DNA, 999 bp, Homo Sapiens
  misc_feature (696)..(731): n is a, c, g, or t
ggatctcaaagttcttaaagctagaagcctgagatcaaggcatccacagggctggtttctcctgaggcctctctccttggctgggagacggctgccctctcaccatgtcttcacgtggtcttccccattcccggtgtctctttgcatgatctactctcctttacttagaaggacaccagtagtcggattagagcccgccctaacttcctcattttaactcagccacctgtttaaaggccctatctctgaatacagtcacattcggaggtcttggggttaatgcttcaacatatgaatttggggggataccatcagtccataactttctctttccttttttatatctgctttgatattaaacatgctgaaactagaaatatctgggcttgtttggagcacaaacttccctaagttttgattctcttttctatgcccttttcccctgagtttgatcctcatttcacttattgatggtgattacatgggccatccatttctgggaaaaaccacatttaaacttttcctcctaaccaggcaaagatttctcttcatgtgaataaaagaacattcgaatttcacagatctgatcgccaaaatagacaccctccatccatccccatgatttcctccctaaatcgatcgttccctttgcgggaaaagaagctgatttactaagttcttttaattcctcctaannnnnnnnnnnnnnnnnnnnnnnnnnnnnnnnnnnnataaactcagacgcccaaatttatgtcgacactaattatttatggaataccccgcaaattgcaaaatgtacgccgcgtcgtcttctttttatgccccttctcaccttattacgtatttattttcctaccactttccagtcgtttcccattagccaaacaaccctcacccagcccccctattctcttatacaaaatcaaatatagcactcacattaatacgcacttttgcatttctatcacgcccgcctttgttcccttgctaatatac

SEQ ID NO: 416380 - DNA, 994 bp, Homo Sapiens
  misc_feature (156)..(193): n is a, c, g, or t
tcccatcttatagatgaggaaaagtgagttacagagagtttgaaaatcatactgctagtgaatggcccaactgggatttgaacccgggtaatctagttccaaatctgtgcttgcaaccactgctgtagtgtcttattgcagcacatagtcttctgnnnnnnnnnnnnnnnnnnnnnnnnnnnnnnnnnnnnnncacgattcattcatgttgcatatagatgtggtttatccattttttcatgctttacaatatttcatttgtgaatatactgtaatttatccattctcctaccaagggatttttggattgtttctagattgtgtttgttcatttttgctgtttttgaaattgctgttctgaacattcttctgtatatagtatccttgtgctagagtttctcttgggtttctacctaagagtgggattgctgagccctcaggtatgcgaatattccactttgggagataatgctaaatttatttccaaagtattgtacaaaatctagtttccatccacaatgttatacaattttgtcctatttcctacgttcctctgccattttctctaataaagacaaaaatgtcttaaaatattccgccataaattaaaccaaatacgaggctccacatccattttcaccacccccccttatcagccatacgttttttcgaaactatactataccgccttaacttaacatatcccatatatgcaccattttatccttcgctattacagaccacatacgattatagttaatacggaccaatttacaatatagaaattaccacccccatgttcacgtagccacccccaattccattttttgcgaagataaccttatttagaccatttattataactatcatatgaatgttccgcaataaagtgtgtcgatgctttctataagcgcagtattcgccccagtaatatttacgactttttttgacccgacaataagaggacaatttatatctcgaatggaataatacg

SEQ ID NO: 416381 - DNA, 1015 bp, Homo Sapiens
aaaacaacaaggctgggtaccgggtccgggaattcccgtggataataaatacgataataaatcttgttgcatctctgtgagggttagagataatgtaattatgaggtctaatgcagcaccctgcatagagacaaaactcaataaatggtattgtggtttctaactcctcaagtgagggacttgtagaattttacaaacattttgcacacctttggcaggcacggttctgtgttcaggcgctacacatattagatgggtaatgctcacatgcttggtaaagtacagaatagcagagtccttgttttcttattatacctcacagaaccatgtaactttgaggtctcatccagtgtctccgactctgccatgcagggagttgaaggggaggactcaggtcccctagagggagaagtagtggcagccggtaccattccctggtggcagcaggcagagctgatagaaatctgcaggtctcaagcttgtcataagatctggactcaagacttacgcatccttgggccctccagggcacgggctcaccgcctcctaatactccaacgtatcaaaaaggcaagataaatgaaacttgatacttagaaaaaatggaacattaataccctatcaatttatactttaattataacctcataccataaactcatattattacattatttctttcttcagaaatcaaacaaatacgaaaatctaaccctaatgttttaacaccaatactttttcacatatatatacactaccgatcattttatacccagacacccccgatatacgagacaactccaccattacacgcccgaaccagttttacacgaacaaagaccgctcgtcatataaaaaagagtacatacatatacccttcaattacccccgccttgaatcactgtcaccaaagttgtagtactcccaacaaacatattcttataacaattatcacacaggcgattttatgtacacattgcaaattagaaaccacaccaaaaaaagttgtaaacaa

SEQ ID NO: 416382 - DNA, 1047 bp, Homo Sapiens
  misc_feature (213)..(320): n is a, c, g, or t
aaagtcccctttacctctgagccccaggaatctgaactatctgtggagcctaattgatcacaatagatggtttctgtctttccttgggataacaatttgcactaagaattctttagtcaggtatcagttctcattgaaggcctggaagaaagtgaactccgagttcaagcaagttacccttactctttgatgctatataattcagtatgcaannnnnnnnnnnnnnnnnnnnnnnnnnnnnnnnnnnnnnnnnnnnnnnnnnnnnnnnnnnnnnnnnnnnnnnnnnnnnnnnnnnnnnnnnnnnnnnnnnnnnnnnnnnncttcttaggggtgttgagaggatcaaatggaaaatgatacaatacatgccccgtaaacagtacctctagtgcataagattacagttggtttttatgtaggtctcatataaactgttaatatatacgacaccggcggaaacatagccgttgagagatgtctatttatacatttacgtaagcagtttggtatttatttattaaagcggacggattaagtgagcaaaaatttacacactttaattatatctatacgttacattaaagaccggtcatggctaattctattatccctgagtctcacattagtcttcccctcaaccgagcttttacgcaggttttacgctgcattgcggagcggtttagccaagacttgataaggacatatatgtatctcagcccatctcagttataccaatatcgtggtatatttccgttttgtaccaccattcccgccttcgcttgtttcaggccaagaccagctggtatgtttcattccctcgctggttgcctttcccgtgtgcggcccacaatatagatatagtagactccgtgtttttgtgttggagtgatgagcagtatgtacccgcttattttggacattcggtggatatacaccctagcattaatttatccgcattatcaccgcagcttatacgcggtattgttttgaccccttatatgtgtcgtcgcctgtgcatacgtgtttatatcggctataagtgtgatg

SEQ ID NO: 416383 - DNA, 1089 bp, Homo Sapiens
  misc_feature (230)..(379): n is a, c, g, or t
gcgagtaaatggcagttcaatggtcttttaggaaaaaatttactggaaatatactaagaggaataacactaaggaattcaggagctacaagaattcttggagttctgttatttcaggtactttctttgaagtattaagtacatattatcagtaagttttgttgtgttcctattctacgtagatcatattatcagatagaatgtaaagatagattaagatgttcatgctgnnnnnnnnnnnnnnnnnnnnnnnnnnnnnnnnnnnnnnnnnnnnnnnnnnnnnnnnnnnnnnnnnnnnnnnnnnnnnnnnnnnnnnnnnnnnnnnnnnnnnnnnnnnnnnnnnnnnnnnnnnnnnnnnnnnnnnnnnnnnnnnnnnnnnntactttaccatacaactcaaacaaatgcgaagatacagcttccatatggtcgattgtaccctgcgttggcaaaaagactttaaacataccagcacctagatcagagttgaaataaaaatgcggaatgattatgcgaaatacgaaaaatagaccctaagtcaattgtacaaacataattacatatcaaataacacacacactttatttagctctctttcgatgagatacttttattgctgatttaagagaaagacgttttgaaaagcaaaaaaggtacttgtctaaccgtctttttaccacgagatattactatagacagatgtacgttaacaacccgccaatataaaacaactatcatatttaaattcacaactatactttttccactatgtttttccatcgcgctgattttttttgtcgccggttccaccaaaaaattttctacacacacaaaatcaattttatccagcgaaataaacctatattcacagatcgacaccccacccactaactaatattaataacctaccccgagtaaaggccgtgaatagtaacaacgggaataaaaaatcgagtgaacactataaacatataatctaccactcaaaaccctattatattatggatataaaaaacccacccgcctctgggtgtgggcatctatagcggatgaattttagcgccgcgccttattatcgtgtggcaacttg

SEQ ID NO: 416384 - DNA, 614 bp, Homo Sapiens
ggaattcccgggatatctttaccaccagcagggtcaaagcatattttagttcaatgtacaaccagctgaacaatttaataaccgagcacaaagacagcctttggcacaatttttcacaatccctctcaaacttaagagcaactactagttcttcatgggctttatctctgatttactgcctcagaacttcctaaggaggacagagctcaggaatctgtattacaagtttcccaggcaacgaaactggtttcagaaccacagccttaatacatttggtatgtgttggagagcagaaagataagggccatacttcagagctctagtcccataaaaatcccacaggaggagccactgtcacggcttctcctcacatagatgggcttgcacaacttaagagtaccaaggcatacagcaggagcggtcttcccgtgcctactttaaacacttccatatactaattctaaagtacagtaattctgcatttttattggaataaggaaaaaaacacatctgactagaaaatctggtatgggaattgaggaagaaatttctctcttttatgcctagagtattttatctttcagagcaagatggggagtttaaagtaacatgat

SEQ ID NO: 416385 - DNA, 911 bp, Homo Sapiens
ccggaattcccgggatctcctaataaaaaatagtttgcctcttgctgtcttttacctacagttacatcagatgcattgtctggtgcctttaagtagtctctgaaatctgactcctcagccttttggatgactccagccggtggtggccctttgacaagtgtggccccttctcgtggctgggcacagaggctgtttcactcgttttctgtgataaaaacaccgcagtaaacatcctccgtcctgcgtaacttcatgtccacattgctgattgttttgttgtgtttttttctgataaatttctggacatgaaattctcggaagccctgctgggcccggagctggctaggtactcgggagggtgctgggcttcctagagccacgcgtccacacctgaggacagcttggacccagctgtaaggaacaacgtgcacttcttgaatgtctcacgctgtcttccaccgctttgtccatgatgtcacagtacctctcgcctcccctcccaatgcctgtcttgctaattctttcttatctttccagactccagcataaccttctccaggaagcttttccaaaacccccaggctaggaacctccccccccaaccctgaaatcaaaccccagcaaccccgtgccctgcccatctccatcataactgcatctctccgggtccccggggcaaaaatggccacttcccctgtagctctaatgatcccccctatggacaaaagctcggggtggagaattacctcggaaaatttccccctttctggtaaaaaatgggtcccataaccaatttaaaacccatttgtttccgtataacccaaagccattgaaccacatttggcagaacaccatatgacaagacaattaaaacacttcgtcatatccgtaccaaactatttagaccccca

SEQ ID NO: 416386 - DNA, 1035 bp, Homo Sapiens
  misc_feature (266)..(288): n is a, c, g, or t
  misc_feature (290)..(385): n is a, c, g, or t
attcccgggattttatattttcatctaagcctgatgataacagcttttctcagtgaattctgagaaatatgtaaagtagaatttatatttaaatattaaacagctttcctttttagagatagggccttgctctgtcatccaggctggagtgcagtgagtgggatcatggtttactgtaaccttgaattcctggactcaggtgatccttctgactcagcctccccagtatctgggactacaggcacgtgccactttgcccagctaannnnnnnnnnnnnnnnnnnnnnngnnnnnnnnnnnnnnnnnnnnnnnnnnnnnnnnnnnnnnnnnnnnnnnnnnnnnnnnnnnnnnnnnnnnnnnnnnnnnnnnnnnnnnnnnnnnnnnnattatacgctattacgccgtagcctgagagcgtcacaacaaaatagaaaggcgggcgcctaaagaatttgccaacaagagtgcaagagcacgaagcttcgacgatttcacttgaaaaaaacgagcggagataggagaaaatatgtataaacccgatggaacgagaacattatccatacaaacgactataaagtgaccagagtctcgttagtgaatcccctccgtatcgcgtgttgtaatccatactttctcggctgggtgtaaaaccagttgtctatatgtcttcccatttaaaattcaaaaaaacgcccccattgattgcaatttgccgcacactttggtagatagagtaggttctgctcgcatatgagtccgctgtttaatgatagtacggttctttccgctgaccaattatgtctgcacgcgtagcacactaagtgtgaaggtgttcagcgtttactcggcacggcccgagtgtaattcctacgtccctatgacggttgccagccctattatttcacaaattgccgcaaattatacccatatgcgagcgatttactataataccggctccgtttttcacgaccagtgtaggatgactcagcctgcacgttagccaaatccctacgccctttttatactctacacacc

SEQ ID NO: 416387 - DNA, 612 bp, Homo Sapiens
attcctgggatgtcatgggcctttttagtaactataacagctttattagtatataattcatgtactatttaattcaaccatttaaagtgtgcaagtcaatattttttggtacattcacagaaatttgcaatcatcactatgttaaactttaaaacagtttcatcaccccaaaaagaaaccccatattagcagtcactccccattcccaccaaccactctagtccctgctaaccactaatctgtcttctgtctctatgggcttgcctgttctggacagtttatattaatggactcatacaacatgcggtcttttgtgtctggcttcctttgcttaccacgttttcaaggctcatccatgttgcagcatgtatcagtactttgctcttctttatagctgaataatatgttattgtacagacataccatattttatttatccactccttacttgatggatgagagggaaaataatatggcagaatagaactctccagggattgcctcctacagaaacatcaacttgaacaatatctacatgcaaaaaatctttcacaggagctaagaaaataaggtgaagagatcacactacatggttatagcacaattagtaag

SEQ ID NO: 416388 - DNA, 446 bp, Homo Sapiens
ttagaactgctttggacttgctaacagtaacactgaaagctaaaaggcagtagagaaatatcttcaaattctgacggaaaatgatttccaaccaagaattctatgtattctgtcaaacaatcaagtaagatagcaatcccattttatcaaccatgcaaaaccctaatttatttctcatgcgccttttcctatgaagctgccagaagatgtgccttcttaaatataaagaaacaggggagtagggggatagaaaaacagggaatccaatataagcaagaagaaaactccaagataatggtgaagggatgttccttaggatgctcccgcaagcctaaggagcaaacagaaccaatgggagccagccgatggtaccccgaagaaggtccctggttttaaaaggaaaggaaggggggaggaattaactggggaaagttaaagggggatag

SEQ ID NO: 416389 - DNA, 641 bp, Homo Sapiens
  misc_feature (493)..(503): n is a, c, g, or t
tccggaattcctgggatgagaattccttcagtgccttcctctttggagtctatttaggatatgtggagaattgtgacaaatatttcttatttgtcctgtttggttgtcaacatgcaaatgcaaagtttgtttcttttctaatggttataaatacttgagaagaaatacgtgaaaagaataaataaagtgcagtctcctgcttgcttcctcaaattagaatgtttgcctctatgaactgagtgacattaatgagaaaaccctgggaaaatatcaatatttcttaattaacatcttctgggtgggctttcttaagaatgctatctctgatcatttgttatgaaaaaatatggcaatctgtgcagaatggagttgattttcgacaattgaatgcataaaatatactttaaatcagatctgttgtagatacagcccttatttaaggaaattgtcagaatgtactttaaaacttgtgtggttaagtgatttttgtgannnnnnnnnnnaaccacgttgaaattttgacaagcttttggcctattcccacgactccccatctgggtcctcaaaatgattccttacttcctcgaacattggctctcaaacaccattcccttacacacagagccgtggggctgagagag

SEQ ID NO: 416390 - DNA, 423 bp, Homo Sapiens
agaatttcatataaagaatggttagtagatttggaggaactgaaacagcaaaaggagaacactgaaatttatcacaaaggtagcaagtgcaggatgtagttcccatccctaggactggggaaacaaagggaagaggctggaattattgaaacctagacacttagaggagaaattttgtggggcctaggacccttctgaggaagggcacctctgagaaagaggcactggccactggagctggtggcccaggttaggcagagagcaacattgctgtgaggctgattctgcaattgttgggggaaaccactaactgggattcagctgatgccactgaaacaaactggcccctgccaagggtgaagaagcatttgctggggtatcttgagaaggcacaaattaagcccaatggagaaagagccatgg

SEQ ID NO: 416391 - DNA, 825 bp, Homo Sapiens
gctagagacctttctcctccttcagggaatgtgcccagattaacctgccaaaatactcaatatgcttttgagactctggaagtcatcaactgaagttatcatcaactaataatgcttggctgtattgtctgtcttgttcaactgcagaattgtaagctccataaacatggtgacaatgcctatgttatatacacacacatgtgccctgtagataatcaattaacacatgtttttccactaatatgcagattatacacaagtaagctcagcttgggcagacaaaaaacttgggaacatttcacatcctctcccatcaccaatatttgtgtagcttttcagtaaggatggataagactctagcttgcccttgaatctaactgacatgtataatcatttactaagtgcctagttctctttgtgtgttagtccattttgtgttgctataaaggaatacctgaggctgggtatttatttttaaaagatgtttctttggctcacgcttccacaggctggacaagcatggcatcagcatccactcagcttctggtgaggcttcagggagcttttagtcatggcggaagggaagaggagctggtctgtcttgtggcaaaagagggagcaagagagagaggaggaggtgccagcctccttgaaacagccaactcttgcatgaactaacagatcaagaactcactcattgccatggggaggggactaagtcattcatgagggatccatccctattatccaacacctccctgcctagccccaccttccaacattgaagaatcacatttccaacacgtgtattgtggaggggggaca

SEQ ID NO: 416392 - DNA, 863 bp, Homo Sapiens
  misc_feature (356)..(445): n is a, c, g, or t
taaaaatggcatgtgaagggggggaagggtaggctgagccacagcccgttccagccggctgaaaaaaataggggtgcggaagttttcaccaagaggattaaagatgcttgaatggccaccacctcttcctctagcattgccaagacaggagagtcatgtcctgagtctttcccattcaaaaaatggaatcaggagagtatggagtatggagtcaggagagatggttcagaggtcactcttgccttggaatatgtctcatgatgctcagttacaagacacagagatgagtgttttgtaaaaggaagcaaaattttaaaaggaatgctaaaatgaggtcaaaacaaggggcttactcnnnnnnnnnnnnnnnnnnnnnnnnnnnnnnnnnnnnnnnnnnnnnnnnnnnnnnnnnnnnnnnnnnnnnnnnnnnnnnnnnnnnnnnnnntaacaaatggaaacaccctaactaaatcaagtgacataaccaggtaacagttcactgctaaaataaaaaagattaaatatcataagcataacaaccatatacagtcaagcagcatgcaagaaaatccttcccgtgcagccaacgtctagtgggaggcggcctctgaatgttgtgctcatgcccttacagcgaagatggcacccggaaatattgagacaactgtcaactttcgccctccactccgttcctcctaggtattccaaggtcatcaaaggcctcttcctggcaaaaccaactggcccactgcttggcctatgggtaatgcctttctggccatttttgggaaagggaaaacatgccaaaggcttttcttttcaaaaagacctttttttccgtggggaaaacttggaagaaaaac

SEQ ID NO: 416393 - DNA, 233 bp, Homo Sapiens
accggtccggaatttcgggatcactttctggctatttcttcttaaaggatacatataaatagactagatactaatactttgcttatacttagaatttcaattaaaaactggttttgcaaactttaaacagaagatataaataagagataaaaactttagcttgtgactgaaagaaataggtatttctttacaagttttgaaagtgaccattcttaaattaagaatttccttgg

SEQ ID NO: 416394 - DNA, 833 bp, Homo Sapiens
  misc_feature (101)..(170): n is a, c, g, or t
  misc_feature (263)..(448): n is a, c, g, or t
  misc_feature (546)..(753): n is a, c, g, or t
ctggtaccgggtccgggaattcctcgggatctccaagcaggttagcagcagtgaacgactttggggttggctgggcagtattaaacattagatagtcattnnnnnnnnnnnnnnnnnnnnnnnnnnnnnnnnnnnnnnnnnnnnnnnnnnnnnnnnnnnnnnnnnnnnnntggtggcctatggccataccatcctgaacacgcccaatcccatcagatctcagaagctaagcaggtttgggcctatttagtacttggatgtgnnnnnnnnnnnnnnnnnnnnnnnnnnnnnnnnnnnnnnnnnnnnnnnnnnnnnnnnnnnnnnnnnnnnnnnnnnnnnnnnnnnnnnnnnnnnnnnnnnnnnnnnnnnnnnnnnnnnnnnnnnnnnnnnnnnnnnnnnnnnnnnnnnnnnnnnnnnnnnnnnnnnnnnnnnnnnnnnnnnnnnnnnnaaaatgattaagatgacaagatgataaattttgttacatgtatttctccacagttaaaaacaataaaataacttgatagtcattaaaatgagttcaannnnnnnnnnnnnnnnnnnnnnnnnnnnnnnnnnnnnnnnnnnnnnnnnnnnnnnnnnnnnnnnnnnnnnnnnnnnnnnnnnnnnnnnnnnnnnnnnnnnnnnnnnnnnnnnnnnnnnnnnnnnnnnnnnnnnnnnnnnnnnnnnnnnnnnnnnnnnnnnnnnnnnnnnnnnnnnnnnnnnnnnnnnnnnnnnnnnnnnnnnnnnnnncccctggaagccggagggttggcagtgaagactgaaaaattgtggcttacctgccaccttacaggcccttggaaatgaaa

SEQ ID NO: 416395 - DNA, 169 bp, Homo Sapiens
agcagtgtggagaggaaaaccctgcccaacttttggataaaactgaaccttaatgagccctaccccagtacagaagtgtccctgacttcttgctggtctcttgtcattgtgtatttgctcatcatgtagatcttaaaagtctattatcatgtgggcctctgaaacattg

SEQ ID NO: 416396 - DNA, 379 bp, Homo Sapiens
  misc_feature (56)..(84): n is a, c, g, or t
tcattgtgacctagttctaaaataattcttaggctcttgttaccatttgtgtatcnnnnnnnnnnnnnnnnnnnnnnnnnnnnngtatgattggttctgttctcttccttctaacatctatccccgttcttttaaatcaatgtcctctgcattctcttgaggtctggcatcattttcttctcactggattataagaaaattcagaacaactttgttttactttccatccctcttgatttatattgccatttagagtttgtcacatcttcccacctggagtataagattgtgatagcaagaactaaatcttgtatttcttttttttaaagcatacttaacacaaaatgtatatttgccatgtacttgtaatacgttgtgg

SEQ ID NO: 416397 - DNA, 709 bp, Homo Sapiens
  misc_feature (44)..(334): n is a, c, g, or t
ggaatagtgttcatgatgtttaggaatcaccaattctgggggtnnnnnnnnnnnnnnnnnnnnnnnnnnnnnnnnnnnnnnnnnnnnnnnnnnnnnnnnnnnnnnnnnnnnnnnnnnnnnnnnnnnnnnnnnnnnnnnnnnnnnnnnnnnnnnnnnnnnnnnnnnnnnnnnnnnnnnnnnnnnnnnnnnnnnnnnnnnnnnnnnnnnnnnnnnnnnnnnnnnnnnnnnnnnnnnnnnnnnnnnnnnnnnnnnnnnnnnnnnnnnnnnnnnnnnnnnnnnnnnnnnnnnnnnnnnnnnnnnnnnnnnnnnnnnnnnnnnnnnnnnnnnnnnnnnnccactcaatctgtggcagcttgtgatggaagcccctagcactcttatatggtgaccttagcacaagcagtttcataggcttgatgaaagtgaaagccaaactgacctgaataaagagtgaaaggaaaatgagcaaaaggagatagtaaatgtggaaaatccttgagaaaaatttgcccagaaaggaggagatggcttgatagctagaaagacacacagagtcaaaattaaggttcctccaagatagaagattttttaaatgaaaaatttatatttaaatgctgaccgactgcatcaagaaggagagagatttgaagatgcagatgaccaatgggaaaaacaatggaacagaatcccctgaaaaagtcagggaaaa

SEQ ID NO: 416398 - DNA, 853 bp, Homo Sapiens
ccggaggacctcttaggtaacaaatagctactaaagcaaaaaatacataaggcaagatactcagtagtcactctaaacaacgttattaaaagtgtgtctctctccccagcacaaacgctcaattagctgaactgatagctcttacaagaggacttgaattaaacaaaggaaaggtagctaacatttacacagactaaaagtatgctttcttggttcttcatgctcatgctgccatttggaagaaaatacattttcttaccgctaatggatctcttttaaagtatcaccagaaaattattctccgtttttcttccatgaaaaatagcaatgatgcattgtaagggacatcaaaagggaacagatgaagtagccgaaggaaatacgttagctaatcaggcaattaagtcagcagcaaggaagccttgaggcatcaacacacttcaagcccctctaacctgggaaggctccataagagaaattaagcctcagtactcccctgcagaaatagaatgggccacttttcgagggtatatttttagacctcaggatggctacaatcagaggatggcaaactccattcgccagccttcagccaaaggaaaatccttagaatctttcaccaagtttttcacttaagaaaggataaaacttatcactatgcccagagattgttttcagaagagaacttactaaaaacagtcaaataggttgttaattcctgtgaagtctgtcttaaaataatccactgaacaggtggctcccttcctcctaaaacccaaaaaataaggaagctatcccagggggaaggaactggcctgaatagacttccacccggcatgtccaaagaaacaaa

SEQ ID NO: 416399 - DNA, 552 bp, Homo Sapiens
  misc_feature (151)..(151): n is a, c, g, or t
  misc_feature (158)..(158): n is a, c, g, or t
  misc_feature (176)..(176): n is a, c, g, or t
  misc_feature (221)..(221): n is a, c, g, or t
  misc_feature (349)..(410): n is a, c, g, or t
  misc_feature (455)..(500): n is a, c, g, or t
tccggccacccggttaccttttgatggatgtttagttgttcccttcttgctcttacggcccctgctgtggggaataactttgcatatgcctcttgttgtgtgagtgcaagtacacctgcaggatatattccccgaaggggaattgatgggncaaaagncaatgagatttgtcatcngtgagacagaatagaaagttgcacccattttatactttcaggcancatttgggaaaatgcttggggtccctattgcccctggccaaaaatgtaactatttaacctgggaatcctaaccaaacaaaggggcgtccgtggtggagatataaattttccttttttctctattcccnnnnnnnnnnnnnnnnnnnnnnnnnnnnnnnnnnnnnnnnnnnnnnnnnnnnnnnnnnnnnncccaaattgaaacgcgcccgggttttatatttttagggggggaannnnnnnnnnnnnnnnnnnnnnnnnnnnnnnnnnnnnnnnnnnnnnaaagaagaacctctgtgaaaaaattaaaaccggggcgcccaaacaaagcgtc

SEQ ID NO: 416400 - DNA, 845 bp, Homo Sapiens
  misc_feature (789)..(789): n is a, c, g, or t
agcctgctaggaaggctgtcagtttatatttctattggtccacttcttgcacttaaaatggctcagagagtgaagccattcctattttaaagctccccttctgctgacagctttcttcttagccaaagccaggaagaagtatttgctattacccattgttttagatgtgctaacaccatgctaattgccaatagtcaggaatggtctttcttaataacaattcctgagttatttataattaacccattgtttatatcctagtaatgttattgtatttgaagtgattgaaaatagcttaatctgtcttaagtgaataatttctccttgtttaccttattcccagcaaacttcctttttcctgataatacaaaagtaaactttattctatttcatcctaagtgatgaaactattttgcccatttatgaaacattttgaatacttacaattggttattttccaggaaatattgggaccttgccttgaaatttagtatggtttatgacttggtttatgacaccagacagaagctacagatatgaatcctctaaccacctgttcctattttcctacccttcattaatttgacttttgacttttgataaagttatcacatattaaaatatacgtgggtgctaagccttatactgtgaatgttccagggttcaaatattttatttttactgccttccccaggcattacctccataaatgatagaacatactttctttttgtcatgagaagtaattggttgtttctttttaaccctgtctcgtttgcattccagaanaaaataataaatccttttaaaatttattaaaaaataatgaaggcaacaagttaata

SEQ ID NO: 416401 - DNA, 505 bp, Homo Sapiens
tgtgacatagtatttgaattgatgacatcttccagagtcagtcagtagctctcaacacatcttattttccagacactgtcctcagcaaaaataatactgagaggtcagggcacatcaatctgcagggcataaaaaggcggcatctgaaatactcttttctcacttctttctttgcatagataatgcattgctttcccccactgaatagggattgttgccatagtaatgttttaagaacactcctagatcaatattagaactgcagaaagtgtctgagatattccatgccatttgtgagtctaaagctatgtccccactcttgtttatttgctcaactgtaaactaaagatttgagcaactctcacaattggtcagttctgtgatgtgaagaattagtcagtcaaccaacaagtgtcctgtgaatgctcccaagcagaggattatgctaagcattaaacaataaccagcaatgtcaaatgcagaggctgtgtatctgtcaatatgg

SEQ ID NO: 416402 - DNA, 508 bp, Homo Sapiens
tcagaagtcataaagtagacagaaagatgactcgctaaaagcagatttttaaatatagtatctgaattatgtttccatgtaaactattaacaatatcaaattattggtaaatggatatatatatacacattgttatgggtattctaaattagatgttacatttaaatatataccaaaaactctagatttgggatgacatgctatgaagacaaaatctctatgcttcataaatataaactagttgttcattggcattttaatttatgaagtacattttacattggaggcaagtcagttcagcctttctgtatgaaaatataggtgtcaatctatgattactataaaagcagtccacataccttttctcttgttaggagctgcagctcaaagccaaggtggcaaagtgtccccactgcagcttaaagtaccatgtcaggtcctcagagtggaccttagggaagtgaacatcagcatccccaatcatggtaagtttctaccatgagctccc

SEQ ID NO: 416403 - DNA, 288 bp, Homo Sapiens
tggatgtttcttttaaaatttctgttaatcacacaatttctgaattagtaaattctccctgtacaagttagaagctacacaatgactccgactacccccacttcttaatgtaatctagagttagaactgctgcatagcacatgttcaataaattcatatggcttatgtaagtcaagatctgtttaagtttctcttgacctgtaaaatagtcaatgtaaaagcatttactttgctgctcatttattttgactgcatgtactttgctgctcaaataaaatatgtgtggtt

SEQ ID NO: 416404 - DNA, 249 bp, Homo Sapiens
  misc_feature (43)..(125): n is a, c, g, or t
tccggatgaaagaactggatatcaatatggaccgaataaactnnnnnnnnnnnnnnnnnnnnnnnnnnnnnnnnnnnnnnnnnnnnnnnnnnnnnnnnnnnnnnnnnnnnnnnnnnnnnnnnnnntaagagaaaatctttgttattttggggtaggcaaagatttcttagctagcatgtaaaaagtacaaactgttagtaaaatactgataaattaaaattttgctctttgaaagccatcattaaacat

SEQ ID NO: 416405 - DNA, 277 bp, Homo Sapiens
caattggcttgggccataggaacttacagcctaagcagtagctcttccacctctcagtcagcctgttaatagcttgtatttattgtcgcctttgctgctgcccctgctcatgttgagattatcatttcccacctagatacctgcctacttggtgttgctctaccagtcttttcgcctcctttactcttcctccagattgcaggcttcttaggatcagggaatctctgcttcccactgctgcatcccagtacccagtgccagtgtttattgaatgaga

SEQ ID NO: 416406 - DNA, 933 bp, Homo Sapiens
  misc_feature (26)..(26): n is a, c, g, or t
  misc_feature (737)..(788): n is a, c, g, or t
tccggattcccgggatccttggagcncacagacctggcaaggccaggtgctcgcccagagtgtgaaccacgtaccaaaaactgcaccaagagtgccaggaaaaaaaatggaaaatgctgtctgtttcacgaaaagtctgtttaaggtgccgtttatgaatgagaaaaggaagctatctcaaggcactctgttttccagcaggtacaggcctgggagcaaggcacctccagggaccccaaagctgtttctcagagtgtaccctgcccccagccagtcagctcaatccccacagcaaccactcctagcttcagctgggccccgaggttctggggaaatactgcccctgatgtacggcttccgctcctgcaaactgtagcaagaaaaggaaaaacccacctctccttccctacctaagcccgatttcaaattgtcctctacactctgcagatgagatctgatttctaagatctgatggtttcttcttttttaatgatcctgaaggtgataacagctcaggtcacagatgttagattggagaaagaagtgtcatggaaactctaactctgttggatcgtggggagaggcttaagcgcctgctgaaggaaggtcacatgtgtgttccaagggtccctttaccaccatttggccccaagccaggcaaatccaaaataaaactcctccaccccctgtccaaaccttgggcccatcattcctgaattttaaaccatttcacaccnnnnnnnnnnnnnnnnnnnnnnnnnnnnnnnnnnnnnnnnnnnnnnnnnnnncacaattaatgacctacaaaacctttcttggcaaatttgacatttttaccccatcaatccaatacccccgtcccgtctccactcattttcgctacaggtctataaaccccgcactttccaatcacgtacacttctcaaccacccg

SEQ ID NO: 416407 - DNA, 691 bp, Homo Sapiens
  misc_feature (226)..(275): n is a, c, g, or t
ttacccagggcaatgatagtgcaacaccttgttatcccaaactacctcaggaaaactgaaagtgggaaagggatcccctttgagcccaggaaaactttgaagtctgccaatgtatcttatggaacgggccctatctgccacctcttggtatgaaccctatatgttggccttttgatttaatttcaaacccctattataacctcttcattaaacattgataacattnnnnnnnnnnnnnnnnnnnnnnnnnnnnnnnnnnnnnnnnnnnnnnnnnntgccttatacacacccaccaactaattattcccctttatttattaccccccatagattttttacgctatttcacaccgactgccccatttttccgcccatattccaccatcccctaataaaaccttcctctcaccataagtaattagatatacttcaataatagataaaccaaaaattcatgttaaaacttagcggatttaacacaccccgagttatataatattaccaatataaacccataatataacccctattatgtgaaaacaatccaaaactttattaacaacttccacatttttttgtccctaataagatcccatacactattcccccatacattatattcaccccccatttattaacatacccatatattaagtgccgccttgtggttttacgccttttcttaaaaaca

SEQ ID NO: 416408 - DNA, 955 bp, Homo Sapiens
  misc_feature (673)..(733): n is a, c, g, or t
attctcgggatgctgaaggaataacttgctgccagatcgctttgagagcacatctctgaatttgcttactcagtcattacacagataatcatgtgtctgacacggtgctaggtgctgggtctcatgttatatgtgttacatgctctcatagtctggactagaagagaatgtctcagtgtgtcactcctatatatacacgtatgcctgcacacacgcacacagaacatgtagggtgcataactgggagccccgacctggtctggagccaggagaggagtcctggaagtggggggatgctgaagctgctctttgaagcatgagtaggtgctgtccaggcataaaggcagggaatagcattcaggcccaagggaacagctccagggaggccttgaagccagaagcttactgaatgtaaagaaagtgcaggcggttagtctgcaaacagccggaatgtgttcccattcatccagagagaggtgaaaaataatagttaaccatgtagcaaagggaaaataaaagatggataagtcctcagtagttcccagacattgtgcaaattggacctaactcagggggcgccacaacaaactactccaaaaatagcaatatatatactcctacggcagattaaaaaatgaataggaatttcgcattgagcacactacgataagcnnnnnnnnnnnnnnnnnnnnnnnnnnnnnnnnnnnnnnnnnnnnnnnnnnnnnnnnnnnnncaaatgcacatcacaaaagagaaataacttagacagagcaacgtaatatgaaataaaataataacagtagagtgtaacaaagaaaataaggatattgcaagtaggtaatgagtgccgctatagagatgcccctctccaagaaagagacagtctacaattaattagaaattcggcaaagggagtggaagcatagaatttaattatacttgcgcaccctccaat

SEQ ID NO: 416409 - DNA, 967 bp, Homo Sapiens
  misc_feature (253)..(370): n is a, c, g, or t
  misc_feature (453)..(549): n is a, c, g, or t
ccaatcttatgttctacaataatgatgatgttatctacaggagtaaattggagaagttacaaatcttgtgtcctctggaccgatggaatgcatatgatttatgccaacaacttaacaaaattcaggctcacttcaataatcactaatcgtgtgtgtttgcaatgaacatacaaaaactatgcgtgacgtcctattgatgaagggatatttttggaataaaaaatatgcaatcataatccataaagagagtttnnnnnnnnnnnnnnnnnnnnnnnnnnnnnnnnnnnnnnnnnnnnnnnnnnnnnnnnnnnnnnnnnnnnnnnnnnnnnnnnnnnnnnnnnnnnnnnnnnnnnnnnnnnnnnnnnnnnnngaatttaatattagaaataaatttattgtttcatctctaaattgttctaatatttataaatagctaaacaaacttttggtggnnnnnnnnnnnnnnnnnnnnnnnnnnnnnnnnnnnnnnnnnnnnnnnnnnnnnnnnnnnnnnnnnnnnnnnnnnnnnnnnnnnnnnnnnnnnnnnnntatacataagaccgcgtatgactacctctcaataataaagatacatggaggcgcgtatagaaatgcgaatatatataaaccttgtgtgtcgcgcctagaaaaataaaaacgcgtatgcatttgttccgaattattatacttctcgctgtgtggtgagataaatagagcaacactagaaacgtcgatcaaagtgtctcgattccataatatatgacgtattgtagctatgaaagtcgtgcaatgcatatattacatatgtctctagcggtatgtctgtatgtgcgatctagaacgagatatttaacatgcacgcgaagcagtgtagtatatatatctatcttatagtaatctcgttttttattggatacaatcgctttgaatctaatcaacaccacgcaaccacatcatatatccaatc

SEQ ID NO: 416410 - DNA, 976 bp, Homo Sapiens
  misc_feature (331)..(480): n is a, c, g, or t
attctcgggatgtctccttagctgcttagctacgcggcctagcagatcatcacccatcagtaatcctgtggctagatccaggggaaaattgcttatgtccaggccccacccctgtcactcataaataccccttgtgggggtggaattttagtgttttcagctaagaaaaccacattttctctttccttgcctctgctaggactgtgagcatctcatagtccactccctaaacactttctggtaacacctagttttccgcctgagggtcagaggctagaatcattgcctgcacagcaggactaccttggttcttaaaacttggatcacccannnnnnnnnnnnnnnnnnnnnnnnnnnnnnnnnnnnnnnnnnnnnnnnnnnnnnnnnnnnnnnnnnnnnnnnnnnnnnnnnnnnnnnnnnnnnnnnnnnnnnnnnnnnnnnnnnnnnnnnnnnnnnnnnnnnnnnnnnnnnnnnnnnnnnagagggccaacttgtcgtcacaggaaatatgggaaagttgcgagaaagataaaataactaagaatcacggaaggcagaagtatatcgaaatgaacgaaagaggggagggattcagaagcgtctaagcatggagagatacttatttatacaccatatggtcgaccgggatacaaaatacgcacgtataactgcacgtgactcagcgaacataataaaggcgtgaaggtacgaatggcatgataagatatcacaaaatagagacacaagaaggatgagaaaccactcgtgagagggtcgataggaggggtgaacgtgtaactaatatagcgcaaggggataagtataaacagatatttataatatagttgggtccccaagtgcgtggtatagtaaaataaatagtgattaagcattaaaacaaaattgtaaagaattacctgataaaataaatacagcacgtgattatataggagtctacaacccagagcgtgcgaca

SEQ ID NO: 416411 - DNA, 798 bp, Homo Sapiens
  misc_feature (341)..(403): n is a, c, g, or t
ccggaattctcgggatcttgcctcgggcagatgctcctggaacaagagctgcggcctcggtgctgatgctgagtgctgtgacccagcctccccctacttttttcctaagggtataagcttcactctgcctggggctttggctgtaagttggagtctggctttacccactgtgggcacccaaggccaaggtgggtctgattcaccactgtttcctcaggcctgccaggctctgaatatgcctttaggaatcattctggaagatttctttcttcactggactatataagtgcctctgtgagaaaacaggccctaggggcaggtacttagtcagtttagtcatnnnnnnnnnnnnnnnnnnnnnnnnnnnnnnnnnnnnnnnnnnnnnnnnnnnnnnnnnnnnnnnctcatttcccaagagatctttattaagcacccactgcatgtcattgtgtctaggcttattcactgtgtacctctagcagaaagttaaggggaccctccatgcttgatggccagaggtcactctcagctcctacaggtcactctccggtccttaaacgtggccctctccatcttcaaagccagtaagagcatgtcggatccttcttatccttccagcctctctgtcatccccttctgcaccccaactggaaaaaaatttgattttaaaagggattggccaggacccaaataatgatgaataccaaataaaattcaataattatttccaaataaatacacccagagtcattattattattcaagttgagcttacaaacggcaggattatccactaac

SEQ ID NO: 416412 - DNA, 1235 bp, Homo Sapiens
  misc_feature (1041)..(1041): n is a, c, g, or t
  misc_feature (1086)..(1086): n is a, c, g, or t
  misc_feature (1115)..(1115): n is a, c, g, or t
  misc_feature (1151)..(1151): n is a, c, g, or t
  misc_feature (1190)..(1190): n is a, c, g, or t
caacaacagaattttgccctgtggaaattagcatttcaagggcaaagacttacaaatctagacactttgaagtcctattttggaaaagtaaccttaccctaataaaactagcttcatcacattgcttggttttatcacgctagtaaataaagcccagcagtctgcatatcccaccccaccacacacacactttctacgtgcacacagagctgttctaaaagttgagatagtaaattcacatcttaacttatataagaggaacttgagaggaattgcatgcacttatgtaaacaaagcgcaatatattatacgtaaaatcatatggaaataatataaatgggagagaagaaggaaggtgatggtacaaaacaaccaaaatagatgcactaatacagcgcggcgaccaaggagtaatagtaccaagtaatgtatgcaaaagagaaaagaaagcgcacagtgtgataaaacataagacaaaagatgaccgatataggtaataaaagctatacaaacatgttttgatgtgtctagttagaggggagatggtgggcgaagcaaaaaaagacgcgatccgagcatacatatctaccccaaggaaccagaaatagaaaaaacggtgccggtaataaatgagaaaggagaagcgtgtgccaccacccgcgggaaagaacgatatagttagcgccgcctagtaaccaccacgttaaattcaatagaacatgtgtaaacactaatacacatatcaataaatatcgatacagtacaatacataaaatataagataaatatatgagactgcaacacaagaaagaggcaaagatagatcgagagaagcagcgtgtgatattatcgcgctaacccactaattacgagccctcttcatggatcattaatagaatcttcgtctacacgtacactctgcttacggacgaatgatatcaaagacaacataaagtcgtgtgagagcacattccgtatatgtctctcatgtcatacgactacggcgtgtctatcatacgcacgcatgcgcgggacacacgnataagtcattacccactagagtcagtaagcatattgtatagctangatatgaaatgtcgttacacgaaatgganagaacaggaactaagagcacaatgcgtacacgcgcnatgtaggtcgcgctctgttcagcgacgaattgtaggctngagtgaagtgatgcgtagcacgatcactccgaaatactactgctt

SEQ ID NO: 416413 - DNA, 998 bp, Homo Sapiens
aattctcgggatggaatggcaggttcacttgtcatgagcctggacagcaaaggcttcaatggcaagctcagaggtcagatacctaagctaaggtgagcctggatcagtagttggagttggctgagacagaaggcaggaagaccgtgagagtcacccagatgtgtgattgtatttcttcctgaactgagaatgtagcaatgaaaatgcagagagatgtgcaagagattagcaaggccaaaacaaccagacttggtgtttacttaattacgagggaagacgcgtcaagcccagtccaatggggacatccacagtccagcctggaacaattacgaggctgatggtggcactgaccagggttccatgctgagaggagaattgtgggaggagaacatgacgattccttgtcagtatctttcaaactgatgcacgtagcatattccaatgagacacgcgacgtacatgggaagggaagctccggtaaatctggcacagcgaaaacacctgacggccaaaaagacgggccgcgggggcggaataccgaacaatctaaatgaaccgcgttaacttaaagcagcaataaatgtgaacagactttgggatgaagagtattaaagaattaacgatacgggcaagcatgtaagatgggttcataggcgggacagggaagtaaaatgaagttgaggtaaatatattagtataattggagacagaagaggtaagggaataattacagaatgctacttaagatgattcaccacacatttatagtgtccccgattagagcgggtgaagttactacagggatagaacaagtgtcaatatgataaaagtccaagtattacacctaagagagctttctctcggcgtacgaattctgtagtgtgatcacattcgactattatctctttccacaccgccgacgccagaagaatacgttgtcgatctcttcgatgttgttgttttgctcaatcgctgcatcttatcttcacacaacatca

SEQ ID NO: 416414 - DNA, 699 bp, Homo Sapiens
  misc_feature (34)..(35): n is a, c, g, or t
  misc_feature (427)..(439): n is a, c, g, or t
tccggtccggaattctcgggcagccatttatttnntgcctttgaaaggaaaacaatccaataggaacagtgagacctaggcactggtaactataatccagtgtagaaattgagagatgccgtaagaatgggagattaaagcatttaatcaaagggaaaggagttaagtaagaatgtgtagaggatttaggacttcagttgattctgagaggagatttaaaatcaatcaaaatcaatgagtcaggtgtttccaataaaacaatgatctgcaattcagaattttgttgtgctgatggttactgcaataaaatgtttcacccccttgcaaggctcatagtctaaaggtataagatttggatagtagaacaaatccattatgtgattcacactcctacctatagcaaccaaatgtgacatgaagaataacnnnnnnnnnnnnntcccgtacttgggagacattaaacgtacatgttttattagtccgtttctacactgctataaagaactacccaagactgggtaatttataaagtaaaaatgtttaattgactcacagttctgcagacataacaggaagcatgactggaagccttcaggaaacttgcaatcatggcgaaaggcaaaagggaagccagcacttcttaccatggcagaccactaggagaaagagagagggaaactgggaagttgccacacactt

SEQ ID NO: 416415 - DNA, 1101 bp, Homo Sapiens
ccacaccacacctctcacatcataatatagtaaaaacagatggtacggtccggattctcgggatcttgtatgtcctggaggctgaatttgaaactacattgtatgaatcccaaacctctgtttttccctccaatatgactcatagaaataccctagaagagagggaagtgttttctgctaactgccaaaatagattaatcattaataaaagaaaagggtgtaaggaaattaatgaacaatttctttctgttacaagcctctcttttacaagcatttgcttagcaaattgtgtattttggcattgggttgaaatgcttaatcacctttccattctctcctcccacttaaataagagttaaggggaaggcaggaaaaaagtttagtcaggcaaaggaagcaactggtaccttcttaacattaaaggagctatttccttctgtacttggaagaggaaaatgtagctagtggggctgtctaggacctccgtgacagaaggaaatctttatttttctccacaattgggaaaatgatgggcacgcagactgtaaaattacatcactcgcttttaagtttactgaaaatcggcattataagtaatcatacaaaaacttaactacacatgtgtttaatgccctgaataagatctaatcatataaaaaaataatatagagaaaatataacatacaatatgatacgcgcggaagaatgagtcggagccggaacaaaggtgacgcggtgggcggtgtacattgtacgctagtcgacacaagcataaaatctataataatacagaaaaataaccgcgcttcggaattcacgagaagaaataagaagaatagaagaagataaaacacataagactaggagtagcagaacaatgacttaaatatataaattttcctaaccaacaattttttggtgtttaacgtcgagctatgacacatatatgtttgaatccgatataacgtagtatgtcgtgcgcacggtagaaaaaatagtgccgctagagtgagaaaattactcgattctagccagactcgatcgaaacgacgccgctagaaactatgcatcagcgattaatggagaagatagaggtataag

SEQ ID NO: 416416 - DNA, 677 bp, Homo Sapiens
  misc_feature (197)..(265): n is a, c, g, or t
accggtccggaattctcgggattctttatatggcttcaattactgtctagtgttatttcatttcgtagaagtcccttgaaacttttctgtagagtaggtctagtggtaataaattcccaaagctttgttcatctaaaaatgttttaatttcttacatttgaaggacagattttctataggattcttggttgacagcnnnnnnnnnnnnnnnnnnnnnnnnnnnnnnnnnnnnnnnnnnnnnnnnnnnnnnnnnnnnnnnnnnnnnagcacttgggagattttcaaggtccaatgccttctggccttcaaaatgtctcaagagaaatctgataatggtattgctgatctcttgtatgtaagtcagttatcttgctgcttttaagatcttctttttgtctttatctttcaaaagattgattataaagtgtcttagtgtgggtctctttgatttcattttgatgtgttttgaatttttttactgttcatacctgaatcttcctcatttaaaaagtatataaactactaattcatagagcgagttcatacaacatttaaaaataagcacccgaccggatttctctgggtgacaagcgacagaatgttctccaccggctccccccaaaaattggtgaatatcgttcttaaagaagttaggttaacataaaccttaaaaactc

SEQ ID NO: 416417 - DNA, 968 bp, Homo Sapiens
  misc_feature (797)..(820): n is a, c, g, or t
aattcctgcggataacttttaaaaagagttagggagctcgtaataggaagtgcctttcattataactacattttgcagagcttcatatttatatacaagcctcctaggtgatacactgttagcttgcagactttcctatgcttcatttctcctgttgctttcaaagaaggcaggagacacgtttaataacggagtatctggtgataagaattgcttgggcaaaccagctcatctggactctttctcagtcttggaagtgggaagaggaaaacttgtttccttcctgcttcttaaggatattctgagggtacactgatcaataacactaaatttggaatgaaaataccatgtgatgagtttagcctgctgatgcttccagtagatccttgtatagtttcaagatttaagttttccgatttcatataaatttcttaaagtcgaggaccttataagggtgcaatggatgtttgctaaatatgaaaaactgacttgaatttgcactccttaatgttgcgtatccgctctagtgggcaggacctaaggccttaaaggggaacttcctttctccaattcatcgaaatgggactctcaaatgaaaacctggttgtctgaaatacccccgccagtgtggcttggggaagcgcccctttttcccattaaacccattataactatcccaattaacttccccaacccctttcttctccccgggcacgacacacggtaaaattatacaacaactttctcacactaccaccctttaacaatatacccctacgcaagccaataagaatatnnnnnnnnnnnnnnnnnnnnnnnnacttttcactcccttaattcaagaacttcttaaaccaaaaacacacaatactacgtacttccccatcccaccccccacacttttaaaatcacaaattaataaaccgatcacataaatatattcttggcttactcgaatcctgctcccg

SEQ ID NO: 416418 - DNA, 709 bp, Homo Sapiens
  misc_feature (307)..(373): n is a, c, g, or t
tgcatgattataaagtaaaagtcaaaaatatttaaaaaaggatggtcccggtccggaattcttccaaaacagatttgtttcttcacttctatcttgggggaaattgtcattaaatttaaaaaaattttactcacacacaatattatctattttaaaatatttgtatattagatgtaatatataaaatatgcaaatataatcatgtcataatgatttgtttgttttcattcagatgatatttttccttatttttcttagagaccctactcctaacccatagttataatttagtgtgaagcctccaggnnnnnnnnnnnnnnnnnnnnnnnnnnnnnnnnnnnnnnnnnnnnnnnnnnnnnnnnnnnnnnnnnnncatgtttttagtcactgattttcaaaaatgaaatccagttttacacatttgtgcatgttgcttttctcactcaataacactgtgtggaaatccctctaaatcaatcaattgggctcaaattcactcttaggggtatatgtgccataatctatctattcattttcccattggttcccactttcataatccactgcttttcctacccttaagaaattacacaaaaatgacccgattaacataccatgcacaacatctaatcactttttgcgccaaaataaattcacaagaaaataataattaccccctgatcaaatatgactaataattaaaccgaat

SEQ ID NO: 416419 - DNA, 1024 bp, Homo Sapiens
  misc_feature (944)..(944): n is a, c, g, or t
  misc_feature (989)..(989): n is a, c, g, or t
tgtcactgctcttgccatcttggttttaagtagggagagaccaataagtcctacacgctcacccgaatactaaacttataactattcactttagtgttatttttttaaagttatatttcatttaatttctccatgcatatgttcaaattgccatataatttcagttattttatgttttagcagtgttattggtctttcacctttattcaatttcagttttcattatgagaaacacacacaggaaatgttgttaagacagcaactatatctaaaatgattctgttctcaaattgtatgtttacagataatcaaagtagtaggaagaggggaacttaaacatcatagtgatagatggttcttttacacctgaaagcataaactgacctaattgattgctcctcttaaataatttttggaataaattaggaagctaacgtacataccctatactaagaactatggctgcatgcaaccacccaaactcacaaacaacgccggacgcgctagaacattttttaggaggcaccgaccgaacagcccgtcgaaaacgatctaggttgtctagcaccctgacgcccgcgcgcattttgtacaacaccagaattatgggcttgtgggcaagcacaaaacgaagccccgtgagttaaacgcggacatgacgccactgatcgccggacgatttctgtcagcaacccgcacccgccttattaatattagcgtgataagcctgctcagacgagagatggcgcgtaaaattgaaggatctcaaccaggtagtcgtgagcacaccaaacctaattcgtaacgccgctatcaaggataactcgctaaccacgctcagggtcattgttaagaagactctggatcgtatccacccgtcctacgccactattagaccacccccgtcacgcggcacaccactattgatacgcggccgcctgtgntgtgcgaccatataaatcgacgctcgtttatgagcgacccgatcncttattcgccacacagaccaaacagtatataacga

SEQ ID NO: 416420 - DNA, 658 bp, Homo Sapiens
gtccggaattctccggatgaggatgtgatgtagaggaattaaacagccacatgaataagagattttaacaaaagttgacctttccccacgttttctctaccacttttttaaacatcagtgttccctgggttcctctttttcatctggtattaattactcttcctatgccataacatctaacactgcaaatttctcaaaccacatttattatggtaatgacttctaaatctttatctcaagacagaatacgcatataagccaagaacaactcaaaaagcatcttgacacagcttattgccctctcattcacccttcccactatcaacaacaagctgtttcttcttgtttacctaaaaaaattaacactatcacttgtatagtcaccaactcccagcaatatggctggcaagtcatcttggagtcccctcatctgctactagcactcgagcacacacactctgcaaaacccactgagccccatccactaatctcttcgacttttctcaaatccatcgctctccaaccctgctgccactgaccttcagtttccaacttcatggtttctcatcttgtcctgtcttaaaggttgcaggctaaattcggtctccccagattcagtttctccactagctagagcaatctttctgaagcacaattc

SEQ ID NO: 416421 - DNA, 775 bp, Homo Sapiens
tggaacgggccggaattccccggatgtaaggctggagatgaagaaatttgtgatctggaagtacctggcaatgcatcatccactaacttaataactttccttactggttttgagggcctaagaacccgtttttagtgtcccccagctctatttgaggaacttttattctttgacgtgtcactaattccatactttactatggaaaattgcctgttgaaatcatacaagtcatcagcatatggtacttacaagataggcctcccacccattcataatttaaacaactattatgtattaattataggaaatttggaaaatagatatttaaaggaaaaaagaagtaattccacttattcaggatgaccattgttaatatttggaacatgtagcctttttgatacacatttagtatacatacattaaacatataattgaaagtaggccacctctggtattttgtaatattaagattaatattttaaaacttaatattttttcatatttcgttgcatattcttttaaagcaaggtttctccacctgaacattaccgacattttgggctggataagtctttgttatgaagagctgtcctgtgcactataggatatttaggaaaatccctggcctcctacccagtgtatgccatttaacatcttttccagttgtgacaatcaaaaatgtcacctattgtcaaggggggatttttccccgaggggaaacatccatctgggttgaaaaaccccttgtcctaaaagtacatattttctccaactg

SEQ ID NO: 416422 - DNA, 531 bp, Homo Sapiens
gataggcttcttgcctcacttcccttctcattaccaccatcatccttaagtgattgctttaataacataaatggttgataactaacatcatttataaatcagttttgagtgacttagtggtgtttatttctagtaatttgaatattcctttacaagggaaataaaccgtgctagaaacattttatacttgagggaatataaaaaaagacccaggtcctaacttgcggtttcaaatcttcagataatcttcaagacgtttgcatcctgaattaagtgaaaaaaatgtaaagtggaataaaatgatttatataacgacactctgtatcatccacagaccgattgatcaaacgaattaactttaacttggtaggacgggaaaatttcttaagcggtgattatagcaaaaactgagtggtagtgttaaactcgcacagaactgtattaacagaagaaccatgatcatccttccctattcatctgtcaagcgagtatgtataacctaattacaatgtaataaaaacgagaaataca

SEQ ID NO: 416423 - DNA, 1328 bp, Homo Sapiens
  misc_feature (13)..(13): n is a, c, g, or t
  misc_feature (1046)..(1046): n is a, c, g, or t
aataacaaacaancaaaatgaaacacaacacgccatacaacacaggaagggtacaggtccgggattctccggatggaaaaaagtccccttctacactgtcaaatgtgtgaggggaagcagggtcagatgagactagcatgtgctagagataagatgatgagaaggaagcaagacttaaggaatttgttgtgagaaaagaccgaaaaatattatttccctgacactccagtctactctggagttgccaagtatgtgcgatggatggaggaaacaggagcaacggaaagcaccgaagcagacctcgccgcagagcataatattttatagcactaaagtgctgagacaacaaaaggtagataaaataggaatatctgggaaggatcctcgtgaggagccaacacgttcctgcgaatacatgacaaaaatcccatacggagatatctagttgacaacgatgttgtctaactcgcgtacttccatctatggtatcaccacatgataatggagaagataggtggtgcataaggcggagataatctgtctgaccaactaatccgactcctcatccgggcggtcattacttgtgaaccactagttgataagagaaaaagggtgtaaacggacgataagtcgttcccgtcacggttgtttggggctggagacaccaacctaggtggaggaagggactatgaagtagcatatagaatgtagagatattaaatagagatgtatagtaatccgtactcattgactatactctatataagcggagtatacatgcatactacctatattataactaacataattttatgaaacaatgtaggttggttatgtattgtaactgtgtttttcgatgtcttcagttatttcattgtgttagtataaccgtacttttgtcttggatcgataccccgccatgggagggaccaacttgtttagttataggctcaccctgtgtcgcacagtgtatcgaatggcgaagtcattcatgcaatatgtgagatatgatccataaagcaattgcatggcatatcttatatctnttggcgcggtgccagcgtgggcgtcgttcacatcggcccgagtcgctgccgcttcgcggcgactaacgatacaaagagatgtaattgtgtattgagtagctgcgactcttcgcggtttgtcgcagcactggtgagttgtatgggtgagctctgacgtttatgcagcgtggcaactgattatagtacgcactttgcatcttatggaattactagatacttcaatgtagcatgttttatacatatgtatcagaatctgctataggatgtatactgataatgata

SEQ ID NO: 416424 - DNA, 307 bp, Homo Sapiens
attttccaatggctgcttcttgtcctgggttatcttcagccccagagacagtagtgtttattttagaacaaacccgctggccaggacaccatccacgtgaaacatttcttcctaagcctgaagctttgttgtaaccctgttgtcttcctccttattggctcagcagtgagatgggctggcttgaacctccaggtcttgaaacctgcccaagataccaacaaccacctgtaataaggtgcaggatcccgctcaagcccttcagagcatctgtggatgtgttacctcatatgccctcaccaaatcctat

SEQ ID NO: 416425 - DNA, 647 bp, Homo Sapiens
ttctgatttcaaagagtctaaaagcaatcattatgttgactttgcttagcttagacagaaaccctgagcgcactctctagacactgggagcactgccagttctgcttgttcacatacagtcggtctcatcatttggagattccgtatttgcaaattctaccacctgctaatatttacttgtaactcccaaaacaatatactcgtggaaaattacattggatgaaccacaaaaaagcaccatatgcacaaaacgggggaaataaaatttaaaattaacctaattagagaatttatcaggagcccaacacaataacctacttcccatcggacacgaaataacaagcaaaaataattgtcaacacatgtaataaaactcaacactaatagcaactacaagacaagatagtgagataagcacactaatagatgaccacaaccacacactagtaatatatgtctatatactcagagacgaaataaaagaatctaaaaataaagagctgcagacatgagccagaaatgttaataaggaacgtagtgacagaggtgttgaacagagaataaatctgaaacaaagtgacaatggtataaaggaacatggctatgccgtcgcccttatctatttaaagatcctttaaatctcacac

SEQ ID NO: 416426 - DNA, 1161 bp, Homo Sapiens
  misc_feature (64)..(409): n is a, c, g, or t
  misc_feature (1110)..(1110): n is a, c, g, or t
gcgtgtatatttctattctgttggtccggtccggaatttccgggatgttaggctttgtgtcacnnnnnnnnnnnnnnnnnnnnnnnnnnnnnnnnnnnnnnnnnnnnnnnnnnnnnnnnnnnnnnnnnnnnnnnnnnnnnnnnnnnnnnnnnnnnnnnnnnnnnnnnnnnnnnnnnnnnnnnnnnnnnnnnnnnnnnnnnnnnnnnnnnnnnnnnnnnnnnnnnnnnnnnnnnnnnnnnnnnnnnnnnnnnnnnnnnnnnnnnnnnnnnnnnnnnnnnnnnnnnnnnnnnnnnnnnnnnnnnnnnnnnnnnnnnnnnnnnnnnnnnnnnnnnnnnnnnnnnnnnnnnnnnnnnnnnnnnnnnnnnnnnnnnnnnnnnnnnnnnnnnnnnnnnnnnnnnnnnnnnnnnnnctactggtgggaaaggggagatgagattatggtaaactgtggtccccagttttcagcacatatcgattgcatatcactaagaatgcgccaacacacgagtcaccctggcgtaccagccagccttattttccccatagagctacgcacattgacaccttttgtggatacaattctgtatccttcatttttctcatttagccgtaatacactcggaccctggcattacgagcagtgtttgatttagtctgaactatcaaaaatgtggtttgttcgaatcgtttgtatctgttagtgttcttagtgtggcgtcaattactattattttaccacctcttttcgattgtccttagtataacataatcgagtttttcctctttctattcatcaacatcttttcactatttttatatgacttcaatactcttctgacagtctcgccatcattacttgtatagtcgatgcgagtcgtatattttttgcagcaacaatttcgagtgctcaaacggtcgaagcgtctgaacatgtgcttacttgttgttagcatagcaatgagtttagtatacactgccctatgtgatgttcgcacagcctacaccgctttggtcacgtgccgtctgaactaaagcccactggataacctacccaggaaggcgtatgatacaccagatactactgatagatagcatattctgaactccttncgcaatggcagtatggagtatattaacgatacgagttcatgcttcaaggat

SEQ ID NO: 416427 - DNA, 864 bp, Homo Sapiens
  misc_feature (564)..(651): n is a, c, g, or t
  misc_feature (685)..(783): n is a, c, g, or t
tccggaattctcgggatgtcacctctgtctgttacacagttccaagtcacttcccattttggggtatgtttttagcagtgccccactctactggtacaaatttactgtattagtccattttcacactgctgatacagatatacctgagaccaggtaatttatacaggggaaagggtttaacggacttagagttccacatggctggggaggcctcacaatcatggcagaaggcaaacaggagcaagtcacattttacatggatggcagtaggcaaagagaaagagaacttgtgcagggaaactcctctttttaaaactatcagatctcatgaaatttattcactattgtgagaacagcacagaaaagacctgtcccccatgattcagttatctctcaccgggtccctcccacaacatgtgagaattcaagatgagatttgggtgggaacacagccaaactgtatcagatgaatatgcaaataaatgacaaactgtgatagcaaaactaaaagtgttacttatgtgtgattatgacatggatcactgagaaaaatcaatgaaaccnnnnnnnnnnnnnnnnnnnnnnnnnnnnnnnnnnnnnnnnnnnnnnnnnnnnnnnnnnnnnnnnnnnnnnnnnnnnnnnnnnnnnnnnagtgtaacatgaaaaggaatggctgtgccaaccnnnnnnnnnnnnnnnnnnnnnnnnnnnnnnnnnnnnnnnnnnnnnnnnnnnnnnnnnnnnnnnnnnnnnnnnnnnnnnnnnnnnnnnnnnnnnnnnnnncggtaacgtttaatttttccatatgagcccaaaaactcttttccctagggttttacctccggaggaacccacaaaccaatt

SEQ ID NO: 416428 - DNA, 951 bp, Homo Sapiens
gtccggaattctccggattggtctaacaatgtgatttattgtgggtgctctgaatcatgaggtaccagctcaacctccagacagactggcaactaaggtcagccacgtgggcagtcaatcatgtctatgtgatggagccccacataaagactctggacaccaaaacacaggtgagcttaccttcatgtgttttctcacacattgtttctaggaaaattttgtccactgtttcactggaaaaggataactataagttctatgcatggaactttcctctctcctgtgagactgtgtccttagattattgtaatctgtatatttttgctataataaactgaatcagcaacctaacagcttttagtgactccttctagtgaattattaaacctgaaggtggtcttggggacccctcaaccccaaaattggtgtcagaagtgaggacagtcttgtggaattttgcatattcctactctgatcagttattgaatgtaatgcgtgtcactcctggaaggacaataactttgtgagggattttcttctgaaaaggggacaagcagctaagttttctgctaataacactcccacaattggggaataaaagtggttcaattctgaattgaacagataaaccaaaaatccgtctggaaaatcattcaaaaacgggacgctagttgggaatgggattatatgcaataaagaactttaggattaaatttatttattcctggcgccaaaatacaaattaagagtaggatacgtttactaagttccactcaggaagtgacacaaagtttgggaaacaaagaacggtagtcattgacaacggtggaatgtttcaatagtgtgcgaggcacaggatgttaataaataagggacgttgtgtaaatatctaaataattatgtagggttggtgatgagtcgttacctcatcacatacaacaggtcaattat

SEQ ID NO: 416429 - DNA, 1153 bp, Homo Sapiens
  misc_feature (36)..(36): n is a, c, g, or t
  misc_feature (39)..(39): n is a, c, g, or t
  misc_feature (41)..(41): n is a, c, g, or t
  misc_feature (46)..(46): n is a, c, g, or t
  misc_feature (59)..(59): n is a, c, g, or t
  misc_feature (68)..(70): n is a, c, g, or t
  misc_feature (72)..(72): n is a, c, g, or t
  misc_feature (328)..(336): n is a, c, g, or t
ccccgcgttatccggttgaaaaaacaaggtgccagnggnanggagnaatcgtgagcgcngtgaggagnnngngtggctaaaaagagacgtataattgaattaggatgaaaagcatagaaacacataactcagggctcagaaatgcattttgattgacggagcacagagtcttgccgagaagttgctcctatgcttgaagcccccaagggagggactttgcctgccctgggatgagaatctacaccctcccgatcaggtttttggattttagggatggaaaagaaaaggtacttggagacatcccagagaggcctctgaccgagatgannnnnnnnngttggaatagggctctggtgtctccaagactgatccatgcttggctctgggggccttggagactgtgggcatggaagacaatgaatgcaaagaagaatagtgatgatttattttggaaagtggacctcagcggagaaaaaggagccaaggcgcgagctcgctaaaaagacaaactgcaggtatacaccaagctgtgtggacgcaagaaacggcgggaaagagtagtcccaaataccgaaacccacaatgaggcggtagcgggagtctattaaatgaagaaacgacacagaagtgttgaaaggtctagtactaaagcgaataaagagtgaaccaattgagggggagaggaaggatacggaacatacaagggttgaagtgagagaatatagatgtgtgataagtaacagtatgccgaactcgtgaacttgtacacctgcgtggagcaaacaaggagagtaggagccgggtcggacctgcgagggcggtataattacaagaggaactacacagatataaagcaatggaacagcataattcgattccaatgtatatagcggatacagggatcagatgccatgacacgtcgtcggacttgatggtgaagaggatttcagatttaacgcccacgccctcgggatctgttaacgagcaattgagttatataaagagtaaatatagtttttgtgcctgttgtctacatattcttgtgtggcgtgatccatactaatcttcatatctgggcacttcgcgatagcggtcagcatatgtcctgaagcataaagaagtatacgttgtggaccacacgcgtccacctaca

SEQ ID NO: 416430 - DNA, 976 bp, Homo Sapiens
  misc_feature (182)..(227): n is a, c, g, or t
  misc_feature (496)..(655): n is a, c, g, or t
ccggaattcttcggatacagactgaggaggattatgtacctcctctaagaggaagctccgttgttgtctcttccaggagggccctcctcccaacctcccaggtgtctccttccactacgcttttaaaaaaaatgctcacagatatataaatatattttaccacaatgggtaagtacacgtgnnnnnnnnnnnnnnnnnnnnnnnnnnnnnnnnnnnnnnnnnnnnnnaattatattcatctttctatccctattgcatgggacccagcaaggtttcaacaaatgttcaatgaatggagaaaatagaagaaacttaatatttttacaaaactattataaacttattttctatcacattactaaataattcctcctctactacaagaagggggggaaattataaacaaatagctctaggtcttctatttctgtttgagaagtctaaaaattaatcatgttcccaaaagcaaaaaaacataatattgtaaaggtcaatnnnnnnnnnnnnnnnnnnnnnnnnnnnnnnnnnnnnnnnnnnnnnnnnnnnnnnnnnnnnnnnnnnnnnnnnnnnnnnnnnnnnnnnnnnnnnnnnnnnnnnnnnnnnnnnnnnnnnnnnnnnnnnnnnnnnnnnnnnnnnnnnnnnnnnnnnnnnnnnngaataaaattataaatccctaactatttcgggaagcttttatgcccgcacaataaccttgaaaactggggaaagcagaaatattaccaatgaaaccaacgtattatgcactaatacaattcccagcccataggataacccgaaccacaaaacttgcctcccccccaatcccacacaggtttccaagccccctctaccaccacaccaatactgcggacactaattaacaaactcgaccaagccctcgtgtttatcttacacaatagtttaacaacataaggctggactcttacctgttcataaaattttacaccctcccccg

SEQ ID NO: 416431 - DNA, 1444 bp, Homo Sapiens
  misc_feature (785)..(785): n is a, c, g, or t
  misc_feature (949)..(949): n is a, c, g, or t
  misc_feature (1107)..(1107): n is a, c, g, or t
  misc_feature (1176)..(1176): n is a, c, g, or t
  misc_feature (1215)..(1216): n is a, c, g, or t
  misc_feature (1220)..(1220): n is a, c, g, or t
  misc_feature (1239)..(1239): n is a, c, g, or t
  misc_feature (1294)..(1294): n is a, c, g, or t
  misc_feature (1297)..(1297): n is a, c, g, or t
  misc_feature (1310)..(1310): n is a, c, g, or t
  misc_feature (1312)..(1312): n is a, c, g, or t
  misc_feature (1343)..(1344): n is a, c, g, or t
  misc_feature (1382)..(1382): n is a, c, g, or t
  misc_feature (1412)..(1412): n is a, c, g, or t
  misc_feature (1415)..(1415): n is a, c, g, or t
cccccttccttcccccatgcttattaatatctataaccagaaaatcagggtcggattctcaaaaaggagtgtggaccagcaatttccaatggcctgaactggggttccctaatcttgaagaccaatttcagttatatttttacgtgatgattaagaaacttgagcaaacaatttttggtacagtagggagtcacaaaacatttgtggaattaaccattaaactatgttgtcataataaaaataacctttattaagtacctgttctgtgctggacactgtgaaagaatttgatgtaattttatactcaacaattcagtaacatagatgttgcaccaatttgacgtatgataaaacaacgaacagacagtttggaccaccgacctcacgcccccctatacttttaaaccacaacctgacatatgccttcaagttaccatactgaaaccccaaagagccagctacgtgatgtatcccgcgatccacccatgaaaccaatatcaccatcaattcaatcgccccatctcacatccccccgcccgacatctactcccctacatacgacctgtaacttcgcccgcacttttaatttatctccgcccactccagcaatcttatagccccatatataaaatatgagagaaagcaaacttaccggcaaattcaataccccgacgctagcgctctatgaactgccaaaattcatcccatagcacacccaggaaaagtacaatgccgaccacttagaaaaaacatgaacagatacacacaaacaccaacaaaacaantaacagtagtataataaaacaacgaacagatgacgatatgcgactgattaatagcaaaacgatatataaagtatacaatctaatacgtactatccattccactcacacacgccataacttcttccttacaacaccgcgcatgacgagaacaggagagaccaaangcgtcacatatatactagtatcgcctgctgacatgaacccgtaacaacacgatccgcgcgccttattatgatactaatcgtatactcagcggtcctcacagataccacaacctcacagagagcaatatcgagtccacccaactcaaacgtacaaattntagaccagcctcgcacaccacggtcatctgactcactctgcgatctctctgtgtatggacgaagattgntctacacatgccttcaacaagtgttgagtgtacagaaanncaantcgtcctacgcgcgcgtancacacgtatttctgtttacgcacctcagctcagctcacacaatctctcgcatccntanagactgattactnantcagtgcagcgcgctgtatgtgtcagggaannaccttgcgatgcgctgcagaagcatgcacagcatacanttctggcatgacagtgagtggtatgaaagnagntacactagggtccgatgcgagcaggaccg

SEQ ID NO: 416432 - DNA, 442 bp, Homo Sapiens
taatagtcattacagtcaccctatagcactatagaacactagaattcattccacctatctggctgtacttttgtatttgttaaccaatgtctgatacacccaccttcccctacccatcccagcctctagtaaccattattctactctgtacgtctatgagatcaacttttttagcttcgtcatgagtgagaacatgtgttatttatctttctgtgcctgccttatttctctgaacatgatatcctccaaactcatccatgttgccatgaatgacagaatttcattcttttttgtggttacgtagtatttcaccatatatatgtatgtatgtatgtatatgcatgccacagtttctttattcattcatctgtcgataggaacttaggttgattccatgtcttggctattgtgaatagtgtttataatagtatggcggttcctt

SEQ ID NO: 416433 - DNA, 815 bp, Homo Sapiens
  misc_feature (326)..(577): n is a, c, g, or t
tccggaattcttccaataaacagcttaaaatcgaaggcaatctcaagccaggctgggagaaaaagtccacagagaaatacaacttgagctatacgtcaaaggctaggtgcaatttggaaaggtaagaaagattatcaaagagcaacttcggcaaacttgcagagacaaaaagaacaaggactaagggccctgaacatcacgcatgcgtgtttcggctcttcccatccaacaccctttgcccttcttttagcaacacaacgccactattcgtcagcaaatactctcccttctcatcatctcgcctcgactcccaaaacacaggcaannnnnnnnnnnnnnnnnnnnnnnnnnnnnnnnnnnnnnnnnnnnnnnnnnnnnnnnnnnnnnnnnnnnnnnnnnnnnnnnnnnnnnnnnnnnnnnnnnnnnnnnnnnnnnnnnnnnnnnnnnnnnnnnnnnnnnnnnnnnnnnnnnnnnnnnnnnnnnnnnnnnnnnnnnnnnnnnnnnnnnnnnnnnnnnnnnnnnnnnnnnnnnnnnnnnnnnnnnnnnnnnnnnnnnnnnnnnnnnnnnnnnnnnnnnnaccctggggctacataaggaagaccacatcacaaaaaaccctaaaatcgaacaaatcctccacaggggttggcccacatgtacagaggctgcatttacagtaacctacttccctgctaataagttatctgccagtaaaactacaactacctgtattttctcaattatccacataattataatataaatcagccgctcctcatatataccacccacaataagtaacttttatgagctat

SEQ ID NO: 416434 - DNA, 1120 bp, Homo Sapiens
  misc_feature (273)..(332): n is a, c, g, or t
  misc_feature (870)..(870): n is a, c, g, or t
  misc_feature (1028)..(1028): n is a, c, g, or t
  misc_feature (1098)..(1098): n is a, c, g, or t
tcggaattttgtctctgtaaagttggcagtaatatccccaaacttgaaatttgattatattttttaaatctgtaaatattctgtctcatctttattaagaagagccatgagatatacagacatttcatccagaaggggctttgatctagtggatgagcatggcagcaggaattttcaaacacaaacacgctataatgtggaagtttagtctattttcaagcagtatcttcaatagtggttgagaacatgaaagatgcctaagtagaagtgagnnnnnnnnnnnnnnnnnnnnnnnnnnnnnnnnnnnnnnnnnnnnnnnnnnnnnnnnnnnnaaattattttttaatataactatgattatacggcagtgagatattccacaatccggttaatatattatcccaaataacaaacgctaaacaattatttattgttaagcaatattataaataaaaatacgaaatacacagctatatatagttgaatacccggttacacttccccgcctagtataaatacgcagcaccagaataaaaccaataaaattatgagcaagtagagcgaataaacaaacaagaatttcatttagtacgtttttatagccgtgtgcgacacccggatatttttattttaaaccagattaaaacgctattgtttttttatactacacaaaaacccgcgagatgtttgacgggtaaaacatcacaaatgatcgcccccgccaaatactttatacatgcactccccgcaatatatgttaatgagatagcagattgtgaagcagtacaacggagatgtgaagttagtttgtttgcacgatgtgcagctaatatggatgaaaacaccaacacattcactctatccgctcanttcacgtcaatatacatagaagaaccaccacgctaggaaataaattgtagttgagcaagattagggcggtgaatacacaggggtggcgcgcgcaaatatacagtgcgcgcatgacgcgggcacgcacctatgtatatatcaacgtcgccacgcgtctntcagcgcgtcactcccgccaggcacatgacgtagtaatacacagacatcattattattcgagaacacaantgtacgatatcgtgatagtaaa

SEQ ID NO: 416435 - DNA, 1244 bp, Homo Sapiens
  misc_feature (93)..(93): n is a, c, g, or t
  misc_feature (973)..(973): n is a, c, g, or t
  misc_feature (1008)..(1008): n is a, c, g, or t
ccacacgacatgcgtaacacgcaataaactgttctctgttgtgttttagtgaggctgtgccccgggtccggaattcatccagaatagaggttnggaacccagtcatttcctcacttgtttctgaatacgactgaaaaactgtaaatggttccacttaaccttgaccatgcttctggctatacatcctgtacacattcctcctctcctttcttaaactattccattatttttgtgtcctgggatgggcaggcttttaaccatttctgcaagtgagtaacatgaagcattccaagtttaaactgtggcagccacacagttaatttgtggtgacagcgaaccaacaaaaaaaccacccaaagaaaatctaaccaacctgaaacgaacacaaaaaacgattatatacgacacttcacgccagccgactaaatttatttctctataccacgtattaacttccgcgtcacttttatacacccgtgtagcgcgtaacattaaaatcgcgaaaataactgataatcaattgtccccattaaagtagcccaatgtcccttaccccgaccaggtgctttctcctacctcaggtatatccaccccaccacttattattcctacccctgtctttacgtatatcaaaattttaatactttaattctaaacaccccctttaaacggccgataacattcaattactataaaaacatattcaactcatatatctcaatcacgtccaacaattattaattaatcaccacaatagtaacacagagaaaaaaatagaaaggcacttctaatgtaatgacaatatggatacagcttcttaacaagtcatgaaactatatacttactacgcccaacgtctttctctgttccccgccgcgccaaactcaaaaaaacagcatcaattagttgggagcgattataacagacggaatgagaccaggtgttaatacggaacataggctggacttctgcncagacaatatccattatactcctcacacgacctanaatatctacatgaacccgaacacgaccaataaacatcatgtctctgacctcacagcaaatcacgacaatatataatacaatagcagccttcattacctattttaatgaatgtcggagacatagggagaagtaataacttgtatactgcatactgaccatatatataacatgcatagcgacacctctgagatgagcaagaaagatagtgtcgaattgctacacacgtcttcctacgg

SEQ ID NO: 416436 - DNA, 964 bp, Homo Sapiens
  misc_feature (430)..(556): n is a, c, g, or t
gaagactttattcaagaccatgcaataggtatagggaccacagcaatggcaccacaatattagcaagtaggaatttatagccaagtagtagggtggggtcaatagatgaaaatttcctaagaggaaacatcaaggataaggaggattatggccaaaccaacctaacaggatttttgctgaggataggccagggtgatcaggcatcacttgtgggtggtagaggatgagaaacctgatcaggtattgagggtgatctggcattaagggtgagggattcttgctaaactgacttagcagggttctttactaaaattggattttacaaggaagtgcacagtgggcctagagcaaggttcaggagcctgagtaaagtttggccaagcaaagaatcgttactttagcaaaaataccacagactaggtggcttgtnnnnnnnnnnnnnnnnnnnnnnnnnnnnnnnnnnnnnnnnnnnnnnnnnnnnnnnnnnnnnnnnnnnnnnnnnnnnnnnnnnnnnnnnnnnnnnnnnnnnnnnnnnnnnnnnnnnnnnnnnnnnnnnctaccctacataagctaataaatattatccaggtcccaatggcaagctcctactaacccctgccatctttgtaagcattgtgtatataccaacacttataaccctacttggcaaaagagctctagtctattcaccaacttattagacgctcgacgatatatctcgttttccccccactttattaatatacactcaccctccgagttttacacacagcccgcggaccatcagttaacagctatatatcgattagcccgacccggccacattcactcctaaatttccgccccacgatccatatgtataacatgtgtagcactgcgcgcacgaggcgtaagcgccagtgttaacaacaaaagatcgcgtgcttgctgacatcctgccctatgaactatcacagtagttctc

SEQ ID NO: 416437 - DNA, 290 bp, Homo Sapiens
ctggaccggtccggaattctccggatctcagaggcactccactgtccccggcagaagcccctcacaaatgtctgcttcagccatgaaggaaagaggcatgaagaggcatccatgaacttagagatagatgccaagggggctggtcgcagctgttgtgctcatggccagtgtcttagtccatttgtgcagctacaacaggatacccgaggctggggaatttataatgaatagaaattgatttcctcacagttctggaggctgggaagtccaagattaaaatgtcagcacct

SEQ ID NO: 416438 - DNA, 262 bp, Homo Sapiens
ccggaattctccggataaagatcctgatcctcagagttgtagggaaaactcctagtagccccggggcacagtaaaagggttaattcaccctgacacaagcccacagtttttaaactatatgagagcaaccactgccacagggaaggccccacccctgatgatactgatttgaggttctctgggggaagaaatttatcaatatgagcagagtagagaagactgcccctgccaaaagtatatccagtgaccataaaaagggaat

SEQ ID NO: 416439 - DNA, 916 bp, Homo Sapiens
ggaattttccggaaaatatttccccaaggtagcaaaatcactctcacatcttgtgaagagtacatcaaactgaatgaaataggcgtgaagaatcagagagactgcagtcattattttgagcttatgtagcttttaaatcttaatatttccctgaaatttttttagtaaaataaaaaatgtgagcatatttttttacatccagcaatgacatatttaggagacaagtaacagtaatgtccatccacttaagtctttctgaatgagtagagatgcattgtgaaaaaagtaatttgcagaagcattgacaaaatcccttctgattaccttaattgattctttctgaaaatctccatactttcctcattctttccaagaaactcatgctacgaaaatgtaaagggagtgaactcaacacctaatcactcaagacttcaaacttaaacacattctctaggtctatgattctctgcacattctctgaacagatgctggtttgctctaactcatcagaccagcagtaagaaagcttcagctgacaaaacaccaaaaccttctcttgtcattagcagtggctgctggaataataaaacatctggcatcttcctttactgattaaaggggtcattttcaagacctgtcatccagccccttaggcaataaagacttgagcctcccacatttctccccctttaattcatggttttggcgaatgccggggacccctctacgtgcggaatttcatgcaaaaagggataaagggccaaatgattaccccacggtttttattgaagggaaggggtatacgagaaccccgttattgccaaaaattgtggggtgtctttttgggaacaagatataccccgaaactaaaccgtaaagacacttctgcgagagggtcggagcccccctatggtaa

SEQ ID NO: 416440 - DNA, 971 bp, Homo Sapiens
  misc_feature (156)..(165): n is a, c, g, or t
  misc_feature (580)..(631): n is a, c, g, or t
  misc_feature (697)..(711): n is a, c, g, or t
tggaccggtccggaattctccggatgaatattgtgttttatgagctgggaggccaagtatttggattttcatttacttttatctatacttgtatgtctaaaatactttaaatcaaaattaaaactaaaagaaatgtggaaaagaaggtgaatgcannnnnnnnnnaaatgcattcattagttgatgaacactaaagctgattccatatcttggttattgtgaataatgctgcaattaacatgtaagtatagacatctttgacttactgatttcaattcctttggatatatacctacaagtgagattgctgggtcatatagtggctccatttttagttttctgaggaacttccatacggtttccataatggctgtactaacttacattcccaccaacagtgtacaaaggttcccttttctccatatccttgccaacacttgttatcttccatctttaagataacagtcattctaagggaagatgaacgctgttgttttcatttccttaattattgtttgtttatacatatattttttaaatttattactatttcttttaaacagggtgttgctctatccannnnnnnnnnnnnnnnnnnnnnnnnnnnnnnnnnnnnnnnnnnnnnnnnnnntgggctcaggtgattttcccacctcacctgggaacacacctgccacaccaccttgccccagctaannnnnnnnnnnnnnngtagaaaccaaggcctcgccaatgttacacacggctggttattttatacccgcggcctccaatgtaccctccgccacataaggacttcgccaagtatattggaaattacccgcgcttattaaacacaaatcattttccccgctcaatacacatttttaaactcagagactccgcccccactgcataataagcaagtattttatccacaatatttacgtagaatcgcccatatgattactattttatgaccggcttcccta

SEQ ID NO: 416441 - DNA, 1142 bp, Homo Sapiens
acacactggcagcctagacagacctgtctacactccagccaaatggacaagcctgttagattctggccacctgcataggcccgcccatatcctggctgcccagacaggcccgtctgcactctggccgcctgtaataaatttatccccagtacctaatatcatattttgctgggctagccaaaaggtgttgaaacccacgagaaattaaaaaaacaaagaagtttttaatttagttaaccctggaatttttgaaaacacccaaaagggaataaaaaaaaccagagcccccccttggaaacccaacagggctctttttggggggattgttttaaaacaagagggcgtccccatcagaggaagttctcaacatagagaaaatactatggggggagccgcccacctttttcccacaggaaaactctgggggttaaaccaaacgctgacatccaatgaggaaagattttggtaaacctaaaaaacctcataacatggggtgtcgcctttctttcattattcataactaagagcggcttgtatgcttataaccagaaatgttacgcagatataataaacagtgttttactagtaagaaaggtaaaaaggtctgatatacaaatattatggaacctattttaaaaataagaactgtgcatgctattcggaaaaggagggataaagggatcactctaatgaatctatacacgtaaacgcaattcaaatgaatttaattactattgcgggctaaaatgacacaatatctaatgccatgctaaagttatagacatatacgccaatcttatcgcatctttttgtccccccccggcatgtacataatgtaagaacgggaggagcgagctattttgtccaactgcggcgcgcggggagtgtgaattggagacaagcttattattaatagaaacaacaactaccaggcagcagagactctcgacgtgataattatacacgcgcccaaaaatgataaataatcggaatcgccacgacaggagagacgagccgccacgatttagatcatgaccactagctgtgaccattgtaccgaaatcgattaccgttgaactgtgtgtcgtccacataaaagcgtgtgtcaaggagaaactcacacctcatcacttattgttttg

SEQ ID NO: 416442 - DNA, 850 bp, Homo Sapiens
tccggaattcttcggataaactgtgtatccttcctgaatctcagtcttcttatctacaaaataggaatgatagtttctgcctgaaagggttcttggaaggagcaaacagaagatatatatagagcacctggcacagtgcccggcagagggtgggtttgtagattccctctgtaacttctcagccttgattgcacactggcttttttgtcctgctggcttcctggcctctgcttcgtggccttgcgacttcatgcttaagcacggagcagggttggaaggaagaaacatggagtattggcccctgactggaagcttcttcggacaggtgtacaacccttctagagcccctgtaatagctgcccactgttactggctgccgctgcaaccctcaagataatggacccctcgggcctaaaattttaccttggccgtctcggttgtctactccggtgttcctagataaaacctgtaggcccatttaaatttcaggatttgttgcctagtaaacaacgcaacgccaagcgagctctttttagtaaatttataatggcgacctccatccacggctattctttctaatctttacactactcgctcttcaattcacttaccaatttttacattttaccccccataaaatatacaaataaccccgttcttttacaatcacccataatgtgattgtaaccttatttaaaaacaacccccgctcctccatcaacactttttttaccccccgtcattatttttatttgtatgtaccctcgacgcatgataagtctcctcactcatttacatcttataaaatatttatcatcactaccctctttatttattacttccatctcta

SEQ ID NO: 416443 - DNA, 634 bp, Homo Sapiens
  misc_feature (18)..(18): n is a, c, g, or t
  misc_feature (24)..(24): n is a, c, g, or t
  misc_feature (47)..(47): n is a, c, g, or t
aatttctcccggatatangttatngaagggctaaaactctaaccganatttggaggtttattatctcagaaattacgtatcctctcagtgaccacacagtggctgaagattgctctattttagagataacaagttctaatttttatatttaggtactagaaatagaatattttatcaagtgctctacacactaatggaacatcttagtgttgactgcactgagggctaaacattccacccataagctaatgaaggcattttgagatttatgtaaactctagaaatttaccatgggtttatttcttacggatatttcaaggatttgtgagacttgtgatttgtatataattccagaggttaatttgtataagcaagtagtacaggtaaatacagttggttagaatttcatttctaagacttataggtctttcataaacaattggaaattaagtttttaatttttatagttttatctttgcagacccagtgaaataagagaaaatggttggcaagttgttggctgtgttcattccagttaaaggcagatgtggtatttgcaactgggtgaaaagaaacttcctttctcatacacaggcttggcaagatgacctctactatctccgttcggggaatg

SEQ ID NO: 416444 - DNA, 956 bp, Homo Sapiens
tccggaattctccggatctggattaccagtgaagtcccacataggctgtctacaagctggggagagagaagctggtagtggctccgtccaatctgaaaccctcaaaacaagggaagccaagagtgcagccttcagtctgttgccaaaggcctgagagcccctgggaggccactgattcaagtcccagagtacaaagtctgaagaacctggagtcagatgtccaagggcaggaggagaggaagcaggcatctggcacaagaagaaagagagagagcaagaggtcccagcaagctgcttctccctcttctttcacctgctttgttctagccggactggcagccaattggatggtgtccacccgcattgagcgtgggtctttttctccctgttggctgactgaaatgtcagtctcctctcacagacacacccagaaacagtgcttcaccagccatctaggcctctctcaatccagtcaagttgacacctggtattaaccatcacatcgttattcacagataggacagctttttcagcactggcatttgtgtaggaagcccagtttcaccttcctcactgtgggggacccccctggtgctgacattaaaagacccaccttgattgaatggaatttgtcccaatactacgtgagggagcctcacactgcttgagtgtgaaggcgtgagtctcctcgtctttttggcacttttaaattcccctttcgggggtttctaaggggggttttggatttcgtattacatccataagcagctacggggagttttctactgtgtccccccacggcgagaggatttcctgagagaggtccacaacgagccgccacaatgtcaaacgcgaccgcggcgcccggtttagttgtcggccccgttcttcaccgccctcccccccctctttgtgtctgccctcccattgcccgcactgtcgccgcttcttgacgg

SEQ ID NO: 416445 - DNA, 747 bp, Homo Sapiens
  misc_feature (448)..(463): n is a, c, g, or t
ggattctcggatctactactgaaaggagggtctcttgttactatggcgccaagcatggcaggtccagttcccacggatagccggggcatctaaccaagataatttagagcagaagctgtagctacattctgtacctgtttatcttgagttcctgctagcaggtaccaataatgatggattgtgaacaaacagctctgccttgtttttttagaccctgaaatagacaggttggctttgataatgctttttgactgatgggcactttttgtaactaaatcccattcaaaggcttaaaatatgccgcccaaggttgatttcaagatatattaaattgacctaaagaaaaataagtaggaaaaaaagtcctacctacatatgggatgatgtatggacattttcaaaatagtcacaacccaactttaccatagcaaaaacaagcaaacaacannnnnnnnnnnnnnnnagaaaacaataattgcaaaaacatcaaaataatccctgcttttgaaacaacatttcccctttactactaattacctttcagcaaaacacgaactgccccaatttcatttaaatagtggtccttgaatatctcagttagtcccacgcataagaatgcattaaaccgagctggcttgcttttaaatttttacaaagataagtcctcccggataaagagttattaaaacaagttatcatatatcataaacatcatcctccactacatcggcgccccagatcctgagt

SEQ ID NO: 416446 - DNA, 960 bp, Homo Sapiens
  misc_feature (557)..(565): n is a, c, g, or t
ttctttgacccagaatttgttcccgaccagaggtatgcactagttttagagttgagaattattgtaacatagtgacttcgccaacagaaagccaaggctgaatatgtttctgtccttatctttgtttcccatatgtcgtacaactccacggtagcaaagatctcatgtctactctagatacctccattttcaggaaggatcacaggagtgccctcaacctgctgtgttttttagatgcagtattttcttacaactttatctctttcaggggtccattgtagggggagaaagaaatattcaggatttaaagcagctgctctaaaggctacattcactgcaatgttgagaaggtcagtgccaaaccgtggcctacacatgtcgttttgatgagagcacgctgctcccaaggctataccatggctcctggatattgagagagttttcagataaacataagtcactttgaatggattattctggaaataatttcgttagctctgccaccaaattggcactgccccatcatgaaatgtttatttttcgaaggcattaaatannnnnnnnngttcctccccatcggataagcatatcgctattctgtgggttttaaggttcaaacaagcccacggctcaggaatcttggcctcttgcttattaaaagaatagttgtaccattacacctaaatttataagtcaaccccccaaattttgtatatttttggttaaagcaaggaaatcttaaaaggatggggattatatttcacggaccgtaaggaattttcaaatgctaaaagagtgctttgaattgataccttctgagatgatagcaatgtatgggcccctagaagggaattacattaattacttgacatttatgttgtaataataaacccatggttatgtatcctaactcgctatgtcgcccattttcgcagcgtacgagcacatgataagtcgcag

SEQ ID NO: 416447 - DNA, 419 bp, Homo Sapiens
  misc_feature (68)..(105): n is a, c, g, or t
  misc_feature (140)..(291): n is a, c, g, or t
cacactattatttaatgtccaaaatggtctacattcactttatccttagccctcatccttcaagattnnnnnnnnnnnnnnnnnnnnnnnnnnnnnnnnnnnnnncctcttttcttttatgtagacttaagagtaactgnnnnnnnnnnnnnnnnnnnnnnnnnnnnnnnnnnnnnnnnnnnnnnnnnnnnnnnnnnnnnnnnnnnnnnnnnnnnnnnnnnnnnnnnnnnnnnnnnnnnnnnnnnnnnnnnnnnnnnnnnnnnnnnnnnnnnnnnnnnnnnnnnnnnnnnngttaatgccccttgtttcccagttaatcctggcggaccgtcttctaaaaaaacccctcaaaggggtcaaaccttactccatttaccagttttttctttgtaaaagaagcgccccttccaattgtacat

SEQ ID NO: 416448 - DNA, 643 bp, Homo Sapiens
  misc_feature (83)..(103): n is a, c, g, or t
taatagggaaaaactttatcatctccacaattaacaactcaccactagtgactcgccacaacttcatagggtctcatatactnnnnnnnnnnnnnnnnnnnnngggaaatcaccttccgaacaccactcatactacactctgcccccttagatcgcttcgatctcgtaccccctgttaaaaattttaataaataatagaaacaaatactatttacccacccgcaactctgctgtaacaagacgacacatggacaactcaaaaggcacacaataagtgcacactcccaccagacacacaaagaaccattaattaactccccctcttctcacttctagcctcaccctggtcccttcgccaatctttctagtcactccactcattcatctcgtcgttacgctattcacagtttcgatctgcattaaagggaaaccaatgcaaacacaaaccgatggtacccacagattacaatcgtgttttcgtagtttacattagataatactacagccaactatcggtagatttgagccggcactactctacaactatgcgcctttccagtaccataccacttgaaacaataacgaacattgaagatagtacctaactctcaccctaaccatcaatccagatctctatcctatc

SEQ ID NO: 416449 - DNA, 864 bp, Homo Sapiens
  misc_feature (118)..(176): n is a, c, g, or t
  misc_feature (424)..(424): n is a, c, g, or t
  misc_feature (668)..(668): n is a, c, g, or t
  misc_feature (688)..(688): n is a, c, g, or t
  misc_feature (707)..(707): n is a, c, g, or t
  misc_feature (716)..(716): n is a, c, g, or t
  misc_feature (742)..(744): n is a, c, g, or t
  misc_feature (746)..(746): n is a, c, g, or t
cacaaagacttgtcaacatgaactgctctcaaaacccactatgtatcagaatctcctgatggaggtggatttaaaaacacggattataactcaataattctaaactgtctctctgacnnnnnnnnnnnnnnnnnnnnnnnnnnnnnnnnnnnnnnnnnnnnnnnnnnnnnnnnnnngtagtgtctgtctctgttctttcctgcttcatgcctccatgccaaggtctctctcacttcaccttcccctgtgcacatgtaatggtgccctcatttcaagcatgggggccagctggtgactgcattgggatttgggtttaggaggaagtagaaactctcacagttctttagaaggtgctattttctctattatcccagctattcctgagaccctcccatcaggtgtggtccattgggccctctaatancaaggtgatgccttgtttgctgttgagatcactcaattgcctctcagcattccatgtataataacctctcagcattccatgtaaggaagcaatgtgattgtgagtgcaagagcgagacagccctggaatctagctgaattctatcacagctcctattacttccgatagcactccctggcccaagtcaccaagtaaccagcacatgggctctgttgaaataagatcatgcccctcccgcgaactnaccagggcgcccatttgcanggcaacgccacattataantggaaattntaaacctgagccaaacatcttttctnnntnttttaaagggctcaccatatgcgctcccatctaaaaccacgcgaagaattaaaatttgccgcacacatccccaattcataaaaaaacgtcgtataggaaattctagacccacgattta

SEQ ID NO: 416450 - DNA, 1049 bp, Homo Sapiens
ttaagaaaaaacaggaaaataaaagaaaacaagtttgcgtgaatctgctgcgtacggtccggaattctcgggatgagctcacctagtgcagaatagccttatccctggggaagttgctgaaaacaattagagcaaactgttgagtatcttggctacttggggcagtagatcttagaagagcaaccaataggctaagtaaaaagcttaacaggaaaaactggagaatcagatgtccacaggaggcttaaaaaagctgataggttcctggaaggtcatgtgcatgtgtaaggctgtgtatatgctacgggctgtgttctcagaccacagaaagacctaagatctcacacttctggtcaactctgaggttttgcataaccaggaagcggaatctagaaagtataaactgcctagctgagtgataaaggcgtgccctaacatgcacacagagcccctcaacaactactagaagcttactggttcaaagaatatattaaaatctcggttgcatcatttgctgacccccgaaactacctgagtagaaaacaatcaatggttatatacaacaaagattgaggactttgcaaaagtgattaaaaagagtcaataaatcagacgaaccaagaactaaaccccggagagagggcgaaaaccatcctaaaattcttgactcgcggacattcatatctcaggaagggatcattgaaaatagaaaactgaagaattataaggtgaaactgacagaaggggttatgaaacacaacaattaggacagtcattgtgtggccgaatcttaattagtcagataaggcagagatgcatgcacaaaaaaagcaaggagcaatcttaatagtattcgcagtgtagaaatgaggaatacagagaatgaagtaaatggatccacctcccagtcgaagaggaaatattcgaagcggataaaaaaagatgatagtgcaccgcgcacttatactaacgcgtaggcgaacatgtatggtcaattatccgacactggccgctatcaaattcgacataatacagaggatgttaatagt

SEQ ID NO: 416451 - DNA, 642 bp, Homo Sapiens
  misc_feature (25)..(25): n is a, c, g, or t
  misc_feature (30)..(30): n is a, c, g, or t
  misc_feature (32)..(32): n is a, c, g, or t
  misc_feature (235)..(243): n is a, c, g, or t
taaataacaatattttttttaaatntaaananaaagagagaaacatacaggggtggtaccgagtcacggaatttccgggatcaaatatcttaatttagtagtgaaggcccttcagagcagaggcccaacctacttactcaaagttttctcctagttggcacaaaccctttgttgcagttaaaaggatctgctcaaggtctgctagatgtgcttggtactttgctgcatctgtacnnnnnnnnnaatgctaggatccttttcatgtcccttattttcctataatttccaaaatcctttaagacatgatttaagttctatctcttacctgaagaccatgagtgagggacgaggtctccaaaaatgaatgactctgttattcatttagcatttaccacaggatccttagcattattacggttctttttctatgagcccataacttatctccctaactggcacttttaagcacttagaagacttgttctgtaacttggagttcttggtattcccctgacctcctatgcatattgagtatgcaataaaacatttgtagtagtttaaatcccgggctaatttcaaacaaatataatattttagaaatgttaaatacatttctggaattacactttaaatatacaaatc

SEQ ID NO: 416452 - DNA, 652 bp, Homo Sapiens
tggaaaggtcctgggagaaaggttttgacactgtcagccatgtcgtcagtacccaaactatcaactacgcagaggagatataagtgcccccaatctctcatcatgaaggaccctgcagctctgccaccacggctccagcctggcccctcacccaccaccacgggcccagttggctcctctgtgccaggcagcctgctccaccggggtgctcccagggttgggatgctatgcccacattggccatgcctgggctgcagagacagggagatttttttaaatgcaattctctaccttatttcaaaccgattaaatcagaatcttgtaggtggtgctcaggcattggatttttgcaaagctcccaagtggtgcttccatgcattaaagttgagaagcactgctctaaatttgttttggccccgtggaaaggtttccaactgatttcttatgaaaaaggtagtaaaaacctcctcttcagtttgtaccaataaggttataaggttggcctctgcctgactggagagtggggctgttacaaaaaatgctctaatcctatttatttatggcccccaagcttgaccttggattctcaatggttccaacatacatctccttctgcgttgggtatttaccaagccgatacgttccactcaat

SEQ ID NO: 416453 - DNA, 605 bp, Homo Sapiens
  misc_feature (452)..(466): n is a, c, g, or t
gctgggatcaactcttgctccatcatgtcatagcagatgaatcctgggtgagtcattggccctcccaaagtctcagtttctcatctgtcacccgaggaccatggtcctgcttatcttcaactgacaatgcagtgaggcatgaggaagatcttgtgcaaagctctcatctcagttccagtaggcagcaagggctctggaatggttaaccagggggatttgtagacagaaagcctatttcctagagttctctcttctccagtttcttcccctgttgttcagctatgagacttgagaaagtgacctgattccacattagcaggaaatattgacaagcgtagaagacaagaaaagagaaaacgcaaaagcgtgtagcagctcacaccctacaaaaaaagagaccattaataacacgcaaatataagattatacaacacaaagaagcggacagactnnnnnnnnnnnnnnntaaaggaaacggcaataaaacctttataaagcatataaaagagagtaatagagaaactaaccagcgaaactaacgctaatgagaaggggacgtagcgtatacggaacgcaaaccacacaatataaacaagaaacaatag

SEQ ID NO: 416454 - DNA, 722 bp, Homo Sapiens
  misc_feature (181)..(181): n is a, c, g, or t
  misc_feature (430)..(579): n is a, c, g, or t
ccggcattttcgagaaatagtattgcttattacggcatttcgtaatagtaggtgcacaatacttaatggattaattaatgagatcctgatagctgtgctagtctcattattaaaatagatgtgtgctgtgctagtctcattattaaaatagatgtgtttttgcacctttcttcttcctganatcctttctgcctcaagtcctttcctgctttgcttgccactcttttttacattccttttgaaattgttgttcttcctttcttgaattccagagattaggtttaaagttgaagataataaaaaaaatccacaattctacaaatttgaaattttcattgtaaaaagaataggcttggctgtggtccccttgaacctattttttccagtaaggggaaaggggtttttggccaatgaatcttacaaaaacttnnnnnnnnnnnnnnnnnnnnnnnnnnnnnnnnnnnnnnnnnnnnnnnnnnnnnnnnnnnnnnnnnnnnnnnnnnnnnnnnnnnnnnnnnnnnnnnnnnnnnnnnnnnnnnnnnnnnnnnnnnnnnnnnnnnnnnnnnnnnnnnnnnnnnnttagtggtcgttatctttttcataccatccaatactttcatgtctttatctgcaggaatattttcggcagggcggaacggtttttcccttagtgtttattagatcttatatacccaacactactagacgcgatacttcaaatg

SEQ ID NO: 416455 - DNA, 703 bp, Homo Sapiens
  misc_feature (195)..(255): n is a, c, g, or t
  misc_feature (329)..(387): n is a, c, g, or t
  misc_feature (492)..(614): n is a, c, g, or t
cccaatgtaacgcgcggctctgtgtaaggtggacgaagggggagataaaaaggggagggctaagggaacggaattttccccggaagactaaatacctaggcataccacttttcatctctgttctggtcagaaaactgtcaagcacctatccaaacactgaatactcttactgaagattaataggacctacagttnnnnnnnnnnnnnnnnnnnnnnnnnnnnnnnnnnnnnnnnnnnnnnnnnnnnnnnnnnnnnattggaaatcatcaagaatatcagaaattctgaatatatgggggtctggggaagtaagggggaatatagtgaannnnnnnnnnnnnnnnnnnnnnnnnnnnnnnnnnnnnnnnnnnnnnnnnnnnnnnnnnncacgcgggaagtaaacaaacaaatacacatacactgaaaaagggaagaatagaaatttaacaagtagagacaaaatataaaaaaaggaagagggtgtaaagaggnnnnnnnnnnnnnnnnnnnnnnnnnnnnnnnnnnnnnnnnnnnnnnnnnnnnnnnnnnnnnnnnnnnnnnnnnnnnnnnnnnnnnnnnnnnnnnnnnnnnnnnnnnnnnnnnnnnnnnnnnnnggagtcccacattaccggtgaagcactagagtatatttaacgatcgctctcacataaacacatataatacgccacaacagtttttcaac

SEQ ID NO: 416456 - DNA, 1166 bp, Homo Sapiens
  misc_feature (54)..(225): n is a, c, g, or t
  misc_feature (1059)..(1059): n is a, c, g, or t
cacccgcacaaaccgcaaccctggaggtatggtacggattttcggatctctctnnnnnnnnnnnnnnnnnnnnnnnnnnnnnnnnnnnnnnnnnnnnnnnnnnnnnnnnnnnnnnnnnnnnnnnnnnnnnnnnnnnnnnnnnnnnnnnnnnnnnnnnnnnnnnnnnnnnnnnnnnnnnnnnnnnnnnnnnnnnnnnnnnnnnnnnnnnnnnnnnnnnnnnnnnnngaattatagcttgtcaaagccaggcgtggcggcttccgccagtactcccggctacttgtgatgacgaagctcacactacccctccagccccggaatttaatgatcccccaaacgtcgtattagcctctgaatgcccacccccggcagatcaaaccacccactccacttcaccatgaagcacccccgcctatgtcatcacttcccaaaagctcgacacagagcaacgcgcaaccttataccgcatactcagtgtcgacgttgcgcatattaattgttctcctttagtctaacctagttccgcgatatttctcgacaggatcaatacacgatgatgtgcatacgaaacaatctaaatgatactaaaatactacaatggacaaagataatgcttttctcccttcccacgattcgtccgctgcgcccatcactcccccctatctccgacgcacgccccacgtatgcggtaaccacccaccacccctatcccatgcgatccctctctcgatagcggacatactattcttcaccccactctcccctcccccaaccgctgctgcgtcgccacccgctgtgtcatcgacaccatcctattaggctacttatttgtaaatacactgctcgacatatctatttacgcacaatctcctcttaccgtcaagtgcattaatgcagtggtaacagaaaaacagatcaaaacagagcatttatgaaagcgacgctagtttacacatcatgagacgatcactatcatatagtaccaccgacaatactactcgtgcacgcttcgcattcccaacgtaatacgccccctgtattttattaatagtaataaanacatacaggacatagcctaatataagagatcgtgtatatccactgcagtacagtttactgactagttgatcgctgtctttccatatgcgcgcagacgcgtatagtgt

SEQ ID NO: 416457 - DNA, 1224 bp, Homo Sapiens
  misc_feature (95)..(281): n is a, c, g, or t
  misc_feature (902)..(902): n is a, c, g, or t
  misc_feature (1086)..(1086): n is a, c, g, or t
  misc_feature (1110)..(1110): n is a, c, g, or t
  misc_feature (1126)..(1126): n is a, c, g, or t
  misc_feature (1140)..(1140): n is a, c, g, or t
gcaaaggaacgaggggccacacactcccacctctgaaatttcaaaaaagtaaatagaaaagaattttcaaaataactgactcctgggttcaagcnnnnnnnnnnnnnnnnnnnnnnnnnnnnnnnnnnnnnnnnnnnnnnnnnnnnnnnnnnnnnnnnnnnnnnnnnnnnnnnnnnnnnnnnnnnnnnnnnnnnnnnnnnnnnnnnnnnnnnnnnnnnnnnnnnnnnnnnnnnnnnnnnnnnnnnnnnnnnnnnnnnnnnnnnnnnnnnnnnnnnnnnnnntttataaactaaggtgtgttacatggcctgtacaaaatagtaaacaataaaaacagcaaacacaatccacaaagatctttaacgaataagaaaacaccagttacgatgtaaatacaaacctattcaatagcagcacaaaatctatatccggccgtatttgccggtcgttcaataaccctatgcccatacgtatacaaaacaccacataacaacactaggcagagaaaaaaatcatatatataaatctgcaactgcttagtaccgccgactatctccacctcccccagtattcacacgcagggaattattcatctatttatataaattttcatatcctattatgacgcaattattatttccatcacacacaacccaactaaaaatcgagagacaaactataactattataactacactcaatatgcgagcattaaaatgcaaaaatcgttctgagtcatcgtactactagaacactctcagcatattatcctgtgctcataatagatttcatgttattttagacacgacacgtctacagcgactccaccaaatcatatactatctgtcccaactcgtcaacagactatcacgagtacgtatagactacaagcaaactactanactctgtcaaaattccacgtgcttacacactaatcgcgtgaacgaccacaagcacaacaaccttatatatactgtgtgatcgagatgacacacaacacaaagtagctgggcatgcaacaaaactacctgaacttcactactacacgtattatacttataataacaaagactatatatgtaattnacttatatgatactacactttttnaatatgttgtctatcncgcgcgcgctgctnactcacacattactatatcacttataacttaaatcattatccaacacactcataccgaatcgacaaattgcgatacggatcgga

SEQ ID NO: 416458 - DNA, 246 bp, Homo Sapiens
gttcatcctgtacatgacttaatgatctcagtcttacatactttatccagcctcatatttatcatcccatctttgattttctttgagcagttcaaaaactatgtattccacctgatccgaaatagctattcgagactttctgttctctgaaaacttagaatcacaccattggccaaaaacaattagttggttataagtgatctttctcttaaagagttcattaacacattgacaaatgacatatgg

SEQ ID NO: 416459 - DNA, 1096 bp, Homo Sapiens
  misc_feature (53)..(54): n is a, c, g, or t
  misc_feature (79)..(87): n is a, c, g, or t
  misc_feature (89)..(89): n is a, c, g, or t
  misc_feature (586)..(768): n is a, c, g, or t
  misc_feature (1038)..(1038): n is a, c, g, or t
acccccaccacccccctacagctactcacgctcaaaaaacgaagggaccagannaccgagaactccataagaagggggnnnnnnnnngntgtctctaaaaaaaattgcaggaagattttacctaccaggagggttttgccttccaagagggctttatctcctgcttttaggaaaaaaaatagggagggccagagtaacttcttaaacctgctagttaagtgcctttaatgcaaaataatccttgcatcagagtgacacattttggggtgaaatgttctgaattccttcacctctgtgtctttgtctccatgtatcctcccctctttttataagaccatgtcattgtattttatgacctctccaatccaacaagacctcatcttaatttaactacttccatctgcaaagaccctatttccaaataaactcatattctgagtttccaagtgaacaagaatttgggggagacacccatcccacatcatcaagcatccaacataattagaaattgacttataactggaacagagtcaatttaagagaatacaccttaaataaagaagtcactaacatagatacatatggnnnnnnnnnnnnnnnnnnnnnnnnnnnnnnnnnnnnnnnnnnnnnnnnnnnnnnnnnnnnnnnnnnnnnnnnnnnnnnnnnnnnnnnnnnnnnnnnnnnnnnnnnnnnnnnnnnnnnnnnnnnnnnnnnnnnnnnnnnnnnnnnnnnnnnnnnnnnnnnnnnnnnnnnnnnnnnnnnnnnnnnaagataaaaatatcacatcaacgaacacaattacccaatagatctcttgctaagtcatgacatactcccatattagaacgatcatgatttactaaatggataaaggaataacggatgaaataatacataaaataaaatcaatctattattattataaacatgcagaagaaagagtaatagaagaacccacaataataataattaataaatatcttaaatattccgaaggaaagtagaaaatcgtgggagaagagatctataatgcacctntatttgcgatacgtctcaatttataatattatataactatcttacaaatgagtatata

SEQ ID NO: 416460 - DNA, 707 bp, Homo Sapiens
ttattactctacttcaaatgcaggctcttttttatcccctgtaatttccaaatctgtgttttttcttagatttattttcacctctacatggtaattctttgctgttttctcaaaataaattagctctaaaactagcagttgtaaaagtcttataatacttacatggatgaactaagaattaagtcttggactggctcccacatgtaatgagtttaaatttagttcttgtcgattaaaagagtcaaactctgtaaaatatttaaagagatttattctgaaccaaataagagtgaccatgacccatgagacagccctcaggagcttctgagaacatgtgcccaaggtggtcagggtacagcttggttttatagattttagggagacatcaatcaagtacatttaagaaaaacattgatttggttcagaaaggtgggacaactcaaagcaggggggcttccaggctataggggaatttccatattatctgattaccactctggctgaccttcacctagaagacttggacaacccttgaaacaaaacagcctgagtccatcgcccatagaaatcttcaccaccactactatcattcccccacaaccccgcctcccgcacaaaatgatcggaaaacaaacaaacacgtccacccttcaccgtcgcccacaacacccaacaggacaaaattaataaaaacaaaaatacaaaag

SEQ ID NO: 416461 - DNA, 644 bp, Homo Sapiens
aatttccgggatcccagggctcagccacccagggccagatgcccaggggccttctccgtcccccgactcatgctctgaacccagacttacagttgtcactggtctccccagctcagggaaccgcccttcatatggatgctctgttctcctaacagcatcagtgtccactatttgctgagtgttgatcaggtctgggccaggagccagagctacatgttctggtccaatcttctcaagaaccatgtgcagtaggaatgactactgttgtacaggacatgaaactagggctcagagaggtccctagaactgcctgagctcacccagataggaagtctcagagccactatatgtgtgcatccagcatttgaccagagagagaagaaatgtcaggagaggacccaccagacaccactctgccgtgtccttttaggcctccctatctgctgagagatgcttcggacagcagtttccaacagctgagtgttgttatcacagagcttacttgagcctggcaatgggactagaatccaaatgctgaatgcggaaaatctttccaaatatttgaatgtcaaaatgcagaaagatctctttggtcacttcagcctctattcttcatgactagttagctaacaccaagcagagtt

SEQ ID NO: 416462 - DNA, 895 bp, Homo Sapiens
  misc_feature (220)..(286): n is a, c, g, or t
  misc_feature (296)..(391): n is a, c, g, or t
gtccggaattcccgggatggtagagggaggggagagagggataaaggctacaagtcaccccgagtaaccctcccaacccactgccaaagaatgtctcagcttcttgcaagagtctggaaggaaaatccaagggcaaacccagaaagttttaagttgagtgaatgaatgaatactggagatattttcccagtatactcaacattatgaatgaccagtttannnnnnnnnnnnnnnnnnnnnnnnnnnnnnnnnnnnnnnnnnnnnnnnnnnnnnnnnnnnnnnnnnnaaccctaaannnnnnnnnnnnnnnnnnnnnnnnnnnnnnnnnnnnnnnnnnnnnnnnnnnnnnnnnnnnnnnnnnnnnnnnnnnnnnnnnnnnnnnnnnnnnnnnatagtggggaactgtattgtcagcagcatgggtggctagccctcctgctgtcctcagcaaggcaaacttaaccttagattaaacaaaacacacagatcaatttaaggagaaagtttgtttcacctgggacccagcccaagtctttctggctgtctccagctggaacagaagtggcttggtctcagactgctcagctgttggggaagggatttggcgtggcaaatggcatcctggctgtcccccctgtatcacaagaacattgaattgcttggacactcccaagatttttcggttccccaaaaaattagccccggaagggttttgtgcccaccaaaacaattagcacaataaatacataggggagctttatgtggaatccaccccgtaagaatagattaatacaaacaccagggctgaaaaacaatgaggttacggggagattagaagttcgcccggtccgaaatactaacggattcacacttaccacccactaaaagagttagg

SEQ ID NO: 416463 - DNA, 570 bp, Homo Sapiens
  misc_feature (134)..(134): n is a, c, g, or t
  misc_feature (142)..(143): n is a, c, g, or t
  misc_feature (386)..(394): n is a, c, g, or t
aattcccgggatcttcaaattgcagattaaaatcctgtgaattaaaatcctggtatttccatctcaagtactacacatcaaacagtgtcacagtttgcctaacaaccatacattgagaaataacccgagtgctngctgatgnnactgacgttaaggggtaagacaatggaaagaagcaactatgaaaaatgttctcactgttggagatatcatgataataaaatcaaaagaataaggcaattctgtatttccccataatcttaacaaagtctctctttatgtttgggtaaccgacagtgcaaagggtactgaagaattcaccccctaaaacaagagggagtggaaatctgaagtagtctgacttgggtaaagtccaagggtgaacnnnnnnnnncccccgaaaaccgggggtacccccattacccattttattaccctcaaaaacattccccctgggcccaaattcccgggggaaaaacccctttataactttttccaaggaaaaaaggggttggggcctttacccccccttaaaaccaaaggggtttaaaaccccatttaaaccccctt

SEQ ID NO: 416464 - DNA, 740 bp, Homo Sapiens
  misc_feature (347)..(480): n is a, c, g, or t
  misc_feature (483)..(551): n is a, c, g, or t
gggccccccccgttcgcggctcaacgagagggcgagataaaggaaaagtggcggaacggagcgagaattttccaaaaaagtattacaactactgatgataccgtacagtacctgttgtaaagatgatgaagagctgctgcaaagaaacactgtatcattcactaagttattgggtcaaaggacaattagacctctagttggtccaagcttttttatcacaatgttcattatactgctcattataatgagttgtacaaaattttggagattttcctaaatctaattgtatctgcaatcccattctataaaacgctatttaaggaatttgtcaatacaaaagattagcnnnnnnnnnnnnnnnnnnnnnnnnnnnnnnnnnnnnnnnnnnnnnnnnnnnnnnnnnnnnnnnnnnnnnnnnnnnnnnnnnnnnnnnnnnnnnnnnnnnnnnnnnnnnnnnnnnnnnnnnnnnnnnnnnnnnnnggnnnnnnnnnnnnnnnnnnnnnnnnnnnnnnnnnnnnnnnnnnnnnnnnnnnnnnnnnnnnnnnnnnnnngaaatatttacaaacataactcaaaatacagcataaagagaggcgggaacaaaagaatattattttcataaaaggtgcccacacttttaagtatttccaatttaattttttacaaacgatgttaccacataaacaaataatatatagtaattcaagacaccttgtcgtcagagatacttaaccctaccc

SEQ ID NO: 416465 - DNA, 915 bp, Homo Sapiens
  misc_feature (413)..(466): n is a, c, g, or t
  misc_feature (483)..(558): n is a, c, g, or t
  misc_feature (884)..(884): n is a, c, g, or t
aattctcgggatgcacagttaggtgacgaagaataaaaactgtagactgaacttcatccactaaaaatcttatatacaataagagaaactcctcaaaattgtaatatcaatatgaaacagaaatattattttgaatttcaaatccacagggttcattttattattttgcaaaatttaacattatcacttaaagacaaaagattctgcatgagaacataagttgtgctatatcataaaaaattaaattaaaacttttttacttgtgaataagtcttaaaaacttaatttgtaagatatattttctaacaaattttatatttacactttgtgtaagaatctaatgagatttttctgttacaaagaaaaacagtgctaactgatttatttctctcacctgtggacagtgaatgcannnnnnnnnnnnnnnnnnnnnnnnnnnnnnnnnnnnnnnnnnnnnnnnnnnnnnagacagagtctcactcnnnnnnnnnnnnnnnnnnnnnnnnnnnnnnnnnnnnnnnnnnnnnnnnnnnnnnnnnnnnnnnnnnnnnnnnnnnncaggaaattgtcgacggagcacgttaggataaggcgctaaagagtataaaatggatgaaaaaacgacaaatacggagataaattaaataagcattttttttcaggaacacaccatttaattatgctgtaaaattgaacggagaaagtatcaaagaagtattaaatttgtccaacactaatctttgggtgaaagaacaacaaccacgaaaaaagagaaaaatataagaagatagaaatcaagagagcaattcataataagaaaaggttgaggtctgtcgccacatggaaatgcttgtaaaaaacccgtataaacccctgaaagatgnaaaaattatccatcccattacccaatataag

SEQ ID NO: 416466 - DNA, 1000 bp, Homo Sapiens
  misc_feature (182)..(182): n is a, c, g, or t
  misc_feature (539)..(587): n is a, c, g, or t
  misc_feature (881)..(881): n is a, c, g, or t
  misc_feature (935)..(935): n is a, c, g, or t
ccggtccggaaatcaaaaatggactctggcggtgctcttggcacccccgattttccagggccgggctggtgagggactcggggggcccacagcgagaacccgccgcgcaaccctccgtgagcctgcctgtgcctgagctgaggtcctaggtccttgctgttgtccacgataacttggcttangtgacagtccccctacctgaggaatcctgtcaggcggaggacttttcgggggctcctgtcaatcccatcttttgatctgtgtcgttaactgaatcaccagccgagtttttatttcttcaatttttcaactggttctctcaatatacaaatcactcaccccaacccaaatcattcatatcttacaattaaaccataaatcttccttataattaaacctaatgtttaaattaacttcataaatataaattagatgaaattataatacataataaaaacctatattctctaaaaataaacaaccccaactccctaacattttcgctatacaccaaccaaccaaaccaacaacttattacnnnnnnnnnnnnnnnnnnnnnnnnnnnnnnnnnnnnnnnnnnnnnnnnngattgataatctaagataaaatatttaacaaaaaataatactctcaacacaaaatccaaaatagaagtataatataattaacactttataattccaaaaatatcatttgtaactacacctttattttaattattctaagaacaattgagaaatgaaattgataaaaaacactaaagtaaccatacaacaacactaaacacatctctaaacatgatgtttctcaaagtaaatagcatccctgataaataactaagagaaaagtacacacaaatttaatctaatataaataaaaanaacacacggtagctggttatagcgagaggtaggggtgacctacatcggctaaanataaaaaagtatacaaatacacaacaacacaaattagatacgactatcaaaactgatgtactcgc

SEQ ID NO: 416467 - DNA, 467 bp, Homo Sapiens
  misc_feature (171)..(280): n is a, c, g, or t
tccggaatttccgggatgaaaagtacacaaatggtaaattttcataaaccgcacttacccaaccagcgccttggtcaagaaagagcacataactgccccccaaaacccattattgtgcccccttccagtcatttgccctccccaagggtaaccactactttttatttaaannnnnnnnnnnnnnnnnnnnnnnnnnnnnnnnnnnnnnnnnnnnnnnnnnnnnnnnnnnnnnnnnnnnnnnnnnnnnnnnnnnnnnnnnnnnnnnnnnnnnnnnnnnnnnggggtgaaaccaacaaggcccaaacccctttcacgggggaatttccgaaaagggccaaaacaaaaatgggtttgggcccgggtttttggaaactttttaggaaaaatgggaattccctgcccgggaaagaaaacccggggggtttaaaaaagccaaaaggagttttcaaaaaaattttaccccgcgg

SEQ ID NO: 416468 - DNA, 905 bp, Homo Sapiens
  misc_feature (95)..(108): n is a, c, g, or t
ccggaattctccggatgcatcatgttaatagaattgctatacagtcatcccttagtatctgtgagggattgggtcccctgatgctcaagtccctnnnnnnnnnnnnnnaaatggtatagtttttgcatataacccacacatatcctcctgtatactttaaatcatctataacttacatataatacctaacacaatgtaattgctgtgtaaatagttcttatgttggattgtttagggcataatgacaaggaaaaaaatgtctgtatacattcggcacagatgcaaccatccatttttttcccctaaatattttcaaattgtggttgattgatttcacagatgtggaacccacagatagagggcagactgtatatattgttgtaacttattttaggcatgttaactcatttaacaggttgggtctaattgctcaagtatattactgtcaaacctctgcttataagcatttgacttataagcagaccaagtgtcttcccattgctgctggaatctctttgcttaactccactttctgtatctcagaacttaaagggcacctctggtaaagcttctgtgttttatttccatttcattgtaaattgcataggtttcagtggatttgtctgggaatttaaccccaattacactttttttccgtatatttggtacctcaaataaccaaatttcaaagaaaattcttctgtaaacttgcaattgcttggcataaataccaatgaaaaattccggaaaacccctagagttacagaaatatttagaaacaccaattttctcaaatattccaaagggtaatacaaacccatcccctataaaaattatattcttttaggactataataggggtgggccctatataccaccatccactttacggaaagccagaaaat

SEQ ID NO: 416469 - DNA, 701 bp, Homo Sapiens
  misc_feature (22)..(22): n is a, c, g, or t
  misc_feature (29)..(29): n is a, c, g, or t
  misc_feature (52)..(52): n is a, c, g, or t
  misc_feature (550)..(559): n is a, c, g, or t
gaaaaaaagcagggctggtacncggtccnggaattctccgggatatcaaccntgagtctaatcaaggactgtctcctgcctgtctcacttacagttacatttcagttattatgattgtctatcacctgcaactaaaccctgagctcctggagggttggtgcagcacctcatccatttctgtatttccagcaactagcacagggcctgacatatgctaagtgcttaaagaatgaatggatgcagataaataaatatcacatgaaagactaagaaatttttaaagaagtagtaaacaactcatggaaagtattcagtgagaagtaagtttagagttgggtcttgacagacagttagaagcttaccaaataaagggaagaaaaatccgggtaaagagaacagtgttcaaaagctaatttgtttcctagcctccaggagagaatctttggatctaaagatggtgtgcttccaatcctgaatgccacagggcaaggacaggcagcatgaactgccctctgcagaatgacgaccatatttaaatacttcttttccnnnnnnnnnnccagattcttatactagatagagttcctgcctataagcaaaaagcccctaaaacttcctgaaattccaggtgggtatgggctctaaaacttggacctgcctagaatttttcaataatggattttcctaagataccatctgtt

SEQ ID NO: 416470 - DNA, 938 bp, Homo Sapiens
tttaaaagaaatcttttaaaatctcatcaccatattccagctataacaaaatgctgctatttcagcagtacagccattgctctttcaatttgttctggctggcaaaaaggtggccttgttatgtaactaaagcctctttcataatcaaagcccaccttttgtgtgtatgtgtggatcggggagtaattagccatttcagaggccttgtttctcataatttagaatttgcctttgcatttgaccaagtcaggatgtgtgtcagaccccaaatgtgctgcttgcagacctagcttttcaggactgttaccccctgaaacgtttcggtctacccatgttgtggttacctggtacagtgtgtcaggggctcaaggtgcagaaggagtcagctccttatatgcacctgccagctgagataagaccctaaatattttcttctgaggggaaaacctatttagacccgctgcacagctttcggagcattccccccagacaccctcgcgtgattctcagttgccttgagaattccctgaaaggctgaggggagcaaggtgctcttatttcttcagagtggaagattccacactcatgagctagagggtttggaactggtcaaatctaataagggaaaagaccaaaacacacaaacccccaggaagacagaaaccaaacaataaaaacattttaagccaaaactaaactggattacacaaatttgtggtgattttccgaagtgcttttaacttgtaaagcataaagtttaacacccaagctgggttgtttaaatgcctaaacttttagtccattttaaaaaggaaattttcccaaggaccggaaattcaaaaaagccaagtttttctttaaccagggtggaatgggggtctccaggcctggaagaaactgggcttcttctacccattttctaagaaaccggggggtac

SEQ ID NO: 416471 - DNA, 518 bp, Homo Sapiens
ttgcagtgggttcatgctgtttctttgtgctcctcccccactgtcttcctctttcccctggttcgatccagagatgtaaagttcatgtaacttgaaggtctgcgtaggacagttgattgttgagaggcttgccacccttacaagagcaggtgagccacacagagctgagcaaataccagcacatcagagtctggtcagaaagctgcattgggatttttgctttaagaaagcttttctgtaaatttctttagcaaaggagtgtgtttttcctgagtattagagagttataagatacaacaactctcaaacctgccagtgatttctttgcaagtcataaaaatagagccaaacagacctgaggtcctacataggtctacctcctcaatttaaaaatggggaaattgagcccagtaaaagttaactaacctacacaaagccacacagctggttagaactggcagtataactagagtggccatacagatgatcatccaaactaggatacttttgagagtgaa

SEQ ID NO: 416472 - DNA, 887 bp, Homo Sapiens
ggattcccatgttgagctcccaataaactcaattagattatgatgcattttttaaaatatattactggattcagaattctaacatattgtttataattttgccctgtgattgggagagatattggctgatggaaaaattgaggagggggcgctagcgtgatgcatgaaatgggcattaaaaaacttaacttgttgatatttaaaaaggcctttctatctatgtagttgtcccactcagtcaaagacttttcaaatatagggaacatgtctcatgtgccatttcaagagtcaagattggcttgaatcattctatttttgaaggtactctgaaataaatgttaatacagagtgaatttttgaggattccaacagcaggggaaaaacagtgaggtacatgaggtgagcagagaggcatattttaatggcctggcttcccccagaaacatcactgaaataaacactcatgtgagattgctttattcaagagtgctgtccttagaaagtgggagtgagaagaaagaggagagggtcagggatgagcatattcaatgctgtgcttcctagtagcccaagcttggtatcaagtatgaccagaggtgactttattattaaaccaataaagtttaactgtaaggcaaactttcaaagagtttgtaaaactttttgacctaaaacatttttctaattttctcaaagagattcccctactagctgtatgaacattgacttccccaaatttgaagctgctcctgaaacaacaaggggtggttttgatcccatgaaaacccatccttctgagaagcccttatgaattaatggctttcttgggcacagtccccctttgggaagggagaaaaagaaatggaaaaatttccccctggttggga

SEQ ID NO: 416473 - DNA, 157 bp, Homo Sapiens
tttcagtcagtgaaattgacctatccatgaagaggcagtataaacaaataagatgagaagactctatagagctttaattcattaatgcaaatagaaactcaaaaaaagcctacaggccctagcctactatctttgcattaaaaattttggttggggt

SEQ ID NO: 416474 - DNA, 947 bp, Homo Sapiens
  misc_feature (51)..(64): n is a, c, g, or t
  misc_feature (789)..(789): n is a, c, g, or t
tccggatcagcaggtgggtggctgtctgctacacttatccatctaggtgcnnnnnnnnnnnnnncttagacaatttttgttagaaacagccccgcagctttagcctgcagctctcccctcttccccccagacatttctcttaagagtgatgggaatacattctatgaagctgctgttaggcgagacagctcccagtaatgccagccatcaagtgattcccgtgaggggctgtatgggtgaatgctcggcattgcaacagtgcacagcaggccaccagtctattatccaccaaatctcgagattcagcccaggatgcattcagttgctaaaactgtcacggcagccactcgctgctagctcttaggcaagaaaatgtgcattccttcagaaattcagggaaagccgttgtctctataaaacagaaagtccaaagcaattgcgcagctgcatgatgttcagcacattacatggattcttctcgcatctgcctcttaagttgtgtaaaaatgattatgcaattctaaatttggaaacttaccttattgtatgcaccagggactcaacagagatttttatgtcatattcaagaatagcaagtggtaccaggacactgatttggctagcataaatgttacaattgctaaatacatgggaggcggactaccaaaggattcatgtgtttcaatcaataaatattcatttgaacacgtgactctcttgtgagaccctgtggccagaacccagggaaatgccattagaagaaaagaacccagcctgggtttctggccnccagggcatttaaagctttgccccacccatggtaaccccttaaggggcaccttttccattcaaacaaggcaaggggctttaattgggcgccccgccacttttggggtctcatgggaggccacttaaaagggaaaccccattttggcgcttaaccccta

SEQ ID NO: 416475 - DNA, 953 bp, Homo Sapiens
  misc_feature (183)..(201): n is a, c, g, or t
  misc_feature (206)..(488): n is a, c, g, or t
taacaggagattccctacgtaaagctgggattccaaacagctacactctgaacatgaacaaaaagtaaatttgtcatgaagaagggcagcaaagaattttgcctttcttgattttggtgctgtgtagaagggagaaaaaaaactctccctgagactctataacaagcctgatctaatgtgggnnnnnnnnnnnnnnnnnnnctggnnnnnnnnnnnnnnnnnnnnnnnnnnnnnnnnnnnnnnnnnnnnnnnnnnnnnnnnnnnnnnnnnnnnnnnnnnnnnnnnnnnnnnnnnnnnnnnnnnnnnnnnnnnnnnnnnnnnnnnnnnnnnnnnnnnnnnnnnnnnnnnnnnnnnnnnnnnnnnnnnnnnnnnnnnnnnnnnnnnnnnnnnnnnnnnnnnnnnnnnnnnnnnnnnnnnnnnnnnnnnnnnnnnnnnnnnnnnnnnnnnnnnnnnnnnnnnnnnnnnnnnnnnnnnnnnnnnnnnnnnnnccctctaatgtgggtttgaagcctgaattattaatgctacctgtatggtcagaacatctaaagtaggtaatgtattttgaactgcaacccggttgatggcaccccctgatgactggccgacgaaaacacaatctctgggggcactttagatacggcccttaaagaacccccctagggtaaggtcccccgcgaagatggacttttccgcctgaagctatagcgcgttacccccgacctagtccaccgggagtcgtgggcccccggataccgggcgcaccgctcaaagtcgccctttcgggcacgcccggtactcggccccgcgcgcttcaatgtatccgtggggccggcggacgtacggcgtggacgcgcgtgtgctgcccgcagccgaccccgtggcgccccgaggctgcggacctatcttttccgagctccgtgtcgtgcgatcggtgcccctccggcgtcccg

SEQ ID NO: 416476 - DNA, 474 bp, Homo Sapiens
  misc_feature (172)..(262): n is a, c, g, or t
aaaggtggaaacattgcatggaaaagggaagaatctggagacacttaattcccagtccagctcctccagtttccctcatatctccgccacacaagagaagagaatatggccacttccctctttactagccactaagagcttcttagtctatgcatgggctccccacttgggnnnnnnnnnnnnnnnnnnnnnnnnnnnnnnnnnnnnnnnnnnnnnnnnnnnnnnnnnnnnnnnnnnnnnnnnnnnnnnnnnnnnnnnnnnngactctggattcttctctataaaaaggccatagcccaaggtaaaagtgccaaaaggaagaagatatagctcctgccttcagcatctcagagtggcaaatatatcaaattccatgtggtaataggaacataggcagagaattaccaaagcagagagcacaggctaggagaggccctgaagattgcacagagaggtctgggtcttcaaagatac

SEQ ID NO: 416477 - DNA, 868 bp, Homo Sapiens
ttacatttacttatcagattaaactgtcctttcagaagaactaagaaaatgagaccacgtctaaggagcattattatggggcatgagattggatcctgataggacctgggtggcagagagtggcaaggactagacacaagggcagcccacaggatattcacatttcatggggccttgccaaccagagcaggagtgaagaagttagaagagtatgtcaaagagaaattccaaaagggaactctgaacaggaaggtggccagcttcacagggaaataagtgcttccccagcaagccctgcccagcccccaaatcaagctctaatgagagttcttccagtccaaacagtatccacactctcaagcaaggaaacaaaaagggaaaacagcaaacctaagtcactttaacaatatagctcttccatgttctggacacaagaaggacaagattttagagagaatgacacaaaagcacacattttctcaacaatcagaggttccatatacctgaactgttgccaattcaattcaagtagaagtttatgccccagggatagtgactttgctagtgcccagaatagagtggaagggctctggtaagagagaggtgaaaattaaaagtgacagtatcatgttttggaaacatcattgtaaggaaaataatcaacaggacaaatatactgaggatccagacacttctcttagtaaattggttgagagaaaggggaaataaacaactggagcctgggttagcccttgttttttcctccccatttggaaacttgttctcccttccaaaataattcaacaccaatccccatccccttccaaggcaaggttggaaccaaacctttccccaaaaaccccctttt

SEQ ID NO: 416478 - DNA, 707 bp, Homo Sapiens
  misc_feature (81)..(101): n is a, c, g, or t
  misc_feature (277)..(277): n is a, c, g, or t
  misc_feature (405)..(406): n is a, c, g, or t
  misc_feature (583)..(583): n is a, c, g, or t
tcagatggcaatatttctcatagttctgacttaggcacttgtcttctgtaacataccttgtgtgaaacactcaaaagcttnnnnnnnnnnnnnnnnnnnnngtccctgcatgagggtttccagtatctgtatcttagcctctgtttttcttccaggctctggatctactttgttagatagaaagttgaatatcttcatctcagcatcccacagatacttgctctggcactctctgtctagtccaatcataacctctattcttctagtacagtatgtngatatatgaagatcataaataatcaatgaattctaccaatgccataaatcctaatttcaagcaccaaattaaatttgatacctttccaaagtttgagaaaaaaagcttctgtaattaaatatttttannggtgcagattcatctattaagatacatacaatagtggtaaacctctaaatttatagagttctcttattttaaagttatttagatagtagctcatttatcatcaatgaccttgtcatgttggagatgtaaaactttagctcctccttttgtttggttggatggaagaaatgaagaacngagagataagtgacttgccccaggcccacccactatgttcacccggaaagggcaccccgggtttcccaaaatttttagccccaacccccccttttttgggaaaaacaaacccggggttggtttt

SEQ ID NO: 416479 - DNA, 587 bp, Homo Sapiens
  misc_feature (479)..(512): n is a, c, g, or t
ggagaaaaaatctgccctctgctcaggaaggagaccctatctctatcttccaaggatgtttgctatacaaacatccttgaataaaaatatccttaataagacagttcaagacaaaatttccccctaccactggatgtctctcttcctctatatgacctctccatgtggtggcattatggtcacagcccgatggtctcaacacagctagacattgcatatagtggctggtttccaagcagatggagttgggaggtgccagacctggcaccacatcactccacagcatgctatgggtcaaagcccatttcaaaccagcccaggttcaaggagaggggaaatacacttcacctctgaatgtgagaagcaacatatgctgctgggagggaaaaagttgatcacacctatgtttggggcatatttaccatacttcctatcgagtagaagcagtggtttctatactaggggaagtaagcattgcnnnnnnnnnnnnnnnnnnnnnnnnnnnnnnnnnnaaagaaaagtggtcaatgagaacaggaaggctgggtaagaaatatgacagtgctcaaagtatacctgaaatggaa

SEQ ID NO: 416480 - DNA, 889 bp, Homo Sapiens
  misc_feature (784)..(784): n is a, c, g, or t
ctagttgcaaaacatctgtggcaactgaggtgttttacacttgtctgaagtgcagtggtgtggagagaaggcagtgttctggcctcaaccctgctcttctcatcactggccacctatgaactctggctggctttggggtgaacgagacaccatcactttactctgtcagcctttctgccaggactgattgtggccatttgtaaatggaaagaatgggaagggctttatcgtccacagggtttattttataaagatgaggattctgaagacacatctgttctttgtataacagatgttatttccttttacaattttttttcccaaatgacttgaataacaagtcaatgaggttttgtcctcttcaaaatgaatatcctagactttagggggaaaaaaagcacagtgggaatgaaaatgaatctttttgatttttgcatttcagattcttcatattgcattacaatagtagaactatccccactggaaatcaactgaagtcaggccttactttctaatgtgctactttatctagatagggctattttatttagagagtaacaagacacttaagttattgtttagatacttctctttagctcatattacagagttaactttgttcctggcttacattttgagcttgtgtacataaaactggagggacagatgcaaattgaaaagtggaaccaaggaacaggacacgtgtggatgttgggcgccctgtgaacaaaaattcagatattacatgggggtgcgtcagttatctgaaaaatgatgggtatgnttcataacctaccctatgggcactttcaatttggtgaaaagacaagccccttaaaaataattttcctaaaagggaattaccaggaatttggaaaaaatttccaaa

SEQ ID NO: 416481 - DNA, 903 bp, Homo Sapiens
  misc_feature (376)..(395): n is a, c, g, or t
  misc_feature (515)..(525): n is a, c, g, or t
aaattgccataacaaacatgcagccaatcggccttcaactgaaatttaatacttccttcaattgtgaatgttggtcaccaattaccctggcactactcacttcactacactggccaggagtggcgccccaagaattttttaactaaccaaaaggacgatgaaaatatcataatcactttaagtcacgaacccgcccaacttgtgtcgacaccccatgtctccgcctagtaccttatttacaactcctacatttttccgctgctccaccacgcctagctctgcctttcctcgccctgccctacatactccaatcttcaactccactctgtttctacttcggacccggcttcgtcgtatggctccctcttttactcgnnnnnnnnnnnnnnnnnnnnttttatttgacgcacactccaaccatgtacactcccacaccttcccccatttccccccaattaccccaagacccgttaattataccaacccctgaatagctcatattaaacatcctttannnnnnnnnnnaatgatgtttaaccccgcccttatccacctatccccgctccaatctcttttgtctattgcttcgacatcactgcgacagccatatatttgggccttttgtctccacttctttacgcctcttttttctcccccacccctgaactaattttctccccgcgcttcattacgccatccgcctaagcgtatccctccgctctaatcgttcgaccttttgtgcaccatccgcacggcttatgccccaccccccaccattccatgcgtccgccctcccatcgcctatttcaccccgtactcgcctacattactcactccttcacactaatcctattcaaacccacctattaacccccccttacacatcactctcccccctccgcc

SEQ ID NO: 416482 - DNA, 878 bp, Homo Sapiens
  misc_feature (554)..(702): n is a, c, g, or t
  misc_feature (822)..(822): n is a, c, g, or t
  misc_feature (849)..(849): n is a, c, g, or t
actatgggaaggccacgggaaatgactgtcacaaagaaagaaatttgttatacgcataggtccctagaaattgaaggcgtggtatgcatgcagggccatgggtaagcacctggattggtcaggaggcagagggaacaggcgaaaacatggataagagcctgtgttgtggtttctgcagaaattaatgtgccagacagcaggtaagcaggtttgggattgactaatttgaattttgatgggccctggggtctaggtgctatccctggttgtctggtacctggccctggggtgattagggctgagtgtgagagccctataaaaaggtgcttgaggtgtgggctctggattggttggtttgcatatgaaagacgtgttctcaggcaagttgtttgctatctccaggaattagcaaactctgggaggggcagtccagggtcagtacagccccaagatgtcaagtcatcagaaaacaaaaggcatggttaatataatataaaaatgattccaagcaataagcattgtcatggtttaatttgttcttagagtgacagatnnnnnnnnnnnnnnnnnnnnnnnnnnnnnnnnnnnnnnnnnnnnnnnnnnnnnnnnnnnnnnnnnnnnnnnnnnnnnnnnnnnnnnnnnnnnnnnnnnnnnnnnnnnnnnnnnnnnnnnnnnnnnnnnnnnnnnnnnnnnnnnnnnnnntcaaggctaggcttttgcaccccgcccgcacccctggaatcattcagccgccatatcacaagaacacacaggcaagctccctggagagatctccttgctgaagaactgagggctcctgcncgatagccctgtggaatgaaatatccntgggaaatccagtcctccccgcttcattt

SEQ ID NO: 416483 - DNA, 605 bp, Homo Sapiens
  misc_feature (46)..(54): n is a, c, g, or t
tgtatgtgtgtaatataaaaaatgagggcccaaagaggtttttttnnnnnnnnntatgagttaatcagtattcaccttattagaaattaaaactgaaaaagatttaacacattaatttacctaaaagcatctataatcaacctattagatgacaacctaaataacattttttatgaaaaatatttcctaaaacacaaaaacatatttagcaatgagagtcacattgccctgtgttttgcaggtctcttcactggttgaacaggagatgatggattatcatctgtgctctgccttcagtctgttgtaatatcacacatcatgggcctctagaaaacaccactgtacactcatgagagaatggaagtgagaaagaaaaataaagacttggcagaaaacagttttggccttgtaggctgcctgaaaggctctcggaacctccagcgacccccagaccccactttaagaatgactagtctaaagtattccactatccaaatgaactctcttggagaggtatgagtcctacagcagtaacaggtacagagaaattagcagcaacatgacaaattttaagaacattttatacccagaatacatgcttggtt

SEQ ID NO: 416484 - DNA, 830 bp, Homo Sapiens
gacaacaatgcatttgccgctctcacaggtgtggacctccctagtgggatctgtccaagcaggatccgggaggcagctgtcaagttaggaaatgagattccttggaggcgggcaggtgacacaaagtaagtgcctaccagttacagaacactcagcactttacaggcacgccttgtttagtccttgcacatcacacgtgcaagccatttgctaatattttaccatctagagactaaaggctcggccccattgagcaatctcacaggttagagagagcatctgggtttggatacaggtgtttcggattccagagaccacgtgtgttattaactactctgctgctttctagatagtctttcattaaaatcataaaagatggaaaactaaataaaatacagctgtgttttgctcattcaccctttccttttttcagccgtctttcagtgaggacccgccaggtgtgaagcactaaattgttggggtttgtgagagctcatcacactcacttttacccccggccagtttggaactgagaaaaagctgctggagtcagatggataaagatggaagatcccagccacggtactggaaatgcagagtgagagaagacggctcaggcaagggagcaaaggggcagctcatccccttctcggaaacaactgacccccaaatctgcaagcccatccactgggaaagcatctgtcctgtgaaagttctcagaatccaaacagagtcactgatgttaagaaaactctcaccaatagagcccaggaaagccatgaaacagcggggttctaaaaaccatatgccctggattaccaaaccaaacc

SEQ ID NO: 416485 - DNA, 396 bp, Homo Sapiens
tctacaaggagacttctgaaattccgggaagggttcctcctctcccaaagtgtcttgcttaatgctgtgcatcataagcttatttcttgaaataaaaatgctgagatgctgaacttggaaggcagcaataaaccaagggggataaagttgagggcacaaaaacctgagcctcactttttaacaactccaaagaagaatgaacttattatatataaggagagctctatagggtgtcactagaaattcagctacttccaatggttttgcttgcatgcctggaaaagcagtgacactggcacaagtgtgttctatgtgagagcagtaagctggggaattttgcgtcaggatttgaggtcttaggcaattgaccggccttgaaaagtacagcacactggc

SEQ ID NO: 416486 - DNA, 642 bp, Homo Sapiens
  misc_feature (160)..(466): n is a, c, g, or t
  misc_feature (622)..(623): n is a, c, g, or t
ggtgttacatccctatatgcagtaggatgctgtgcagccattaaaaattataatgcgggtttatacctgttgatgtggacaactgttcatgtatttattatttagtaggaaaaagcaggttacatatcaatatatacagtgtggacttattttatgtttnnnnnnnnnnnnnnnnnnnnnnnnnnnnnnnnnnnnnnnnnnnnnnnnnnnnnnnnnnnnnnnnnnnnnnnnnnnnnnnnnnnnnnnnnnnnnnnnnnnnnnnnnnnnnnnnnnnnnnnnnnnnnnnnnnnnnnnnnnnnnnnnnnnnnnnnnnnnnnnnnnnnnnnnnnnnnnnnnnnnnnnnnnnnnnnnnnnnnnnnnnnnnnnnnnnnnnnnnnnnnnnnnnnnnnnnnnnnnnnnnnnnnnnnnnnnnnnnnnnnnnnnnnnnnnnnnnnnnnnnnnnnnnnnnnnnnnnnnnnnnnnnnnngccaataataataaaatgccaagttgtgcataatggggtatattggacgctatggtataaattataaggtataaaatggccctagaaaaaaatattttgggaataaaaaaatataccccaaaccccatttaaatggggggctctaattcaacctgnntcgaggggtggggttaccc

SEQ ID NO: 416487 - DNA, 788 bp, Homo Sapiens
  misc_feature (415)..(449): n is a, c, g, or t
acccaagagatgtttgtgtaaactttgtgctcaaccccttgagatgagtcttgaatgaagagatacagtgatgtgaaccttgaaagttgaggaatctaagagtggcacaaccagtgctgtatgttccagagcatatataggtggggggaggtaggtcttggagagaaatctcctcccccattgggatgaagcagcacagagtagaaatgtcagtgtgatgtctttaatgcattattccagctgtaataagagtaaagtctctgatggctgtagaagtgatatatatgttaaggactaaagaatgtcacacagtgttggccgtttctaactgagagctctggaactcagggccttagggagaggctggagcattcaggtcaacggcaaattagacatgcaatgcagtatttagccnnnnnnnnnnnnnnnnnnnnnnnnnnnnnnnnnnnggcatcaaataagacctagaagtagattccgggaagagtgaagcttcccatcagagacaaaactgatattaactctaccaactccttgtactaaaagtattctcattttaaacttagaatctgttgcaatattattcaaacaaaatgaaaagaaccaaaagtgaagtaattcctcattagccaattgaaccaggttttatattttcgttggaatctcttaactacagaaggcaaattattcacaattacctgtcttagcaactattgcttcattcctttcaatttaatagcacaatgattaaaaaaatgcaacttttcttagttaatatttaaaaactg

SEQ ID NO: 416488 - DNA, 841 bp, Homo Sapiens
  misc_feature (96)..(96): n is a, c, g, or t
  misc_feature (145)..(801): n is a, c, g, or t
tggaagacaaaagagctctataatgagaagtacaaaacactgtcaaaagaaatcagaaatgacatgaaccaatggaaaaacattgcatgttcatgngattggaagaatcaatattgttaaaaaaggccatactcttcaaagcaannnnnnnnnnnnnnnnnnnnnnnnnnnnnnnnnnnnnnnnnnnnnnnnnnnnnnnnnnnnnnnnnnnnnnnnnnnnnnnnnnnnnnnnnnnnnnnnnnnnnnnnnnnnnnnnnnnnnnnnnnnnnnnnnnnnnnnnnnnnnnnnnnnnnnnnnnnnnnnnnnnnnnnnnnnnnnnnnnnnnnnnnnnnnnnnnnnnnnnnnnnnnnnnnnnnnnnnnnnnnnnnnnnnnnnnnnnnnnnnnnnnnnnnnnnnnnnnnnnnnnnnnnnnnnnnnnnnnnnnnnnnnnnnnnnnnnnnnnnnnnnnnnnnnnnnnnnnnnnnnnnnnnnnnnnnnnnnnnnnnnnnnnnnnnnnnnnnnnnnnnnnnnnnnnnnnnnnnnnnnnnnnnnnnnnnnnnnnnnnnnnnnnnnnnnnnnnnnnnnnnnnnnnnnnnnnnnnnnnnnnnnnnnnnnnnnnnnnnnnnnnnnnnnnnnnnnnnnnnnnnnnnnnnnnnnnnnnnnnnnnnnnnnnnnnnnnnnnnnnnnnnnnnnnnnnnnnnnnnnnnnnnnnnnnnnnnnnnnnnnnnnnnnnnnnnnnnnnnnnnnnnnnnnnnnnnnnnnnnnnnnnnnnnnnnnnnnnnnnnnnnnnnnnnnnnnnnnnnnnnnnnnnnnnnnnnnnnncagtcttcatgatgaagactcccaaaagcaattttgcaac

SEQ ID NO: 416489 - DNA, 154 bp, Homo Sapiens
gacaaactctaaagtgctcttcatctcagtgccaggggctgatccataatatcagccatattcactgtagtaagtaccataaccccagagaggagataggctaactgcttggagcagtcataaattagtgaatatttatgttaggttttgcact

SEQ ID NO: 416490 - DNA, 541 bp, Homo Sapiens
tgaaagagaaaagcctttaatgttatcatcttcctcctccacccttgcactgccttgcttagaattccttatctaatcaactagagtcacacatcttaacagtcaaacaataaaaatgggatgcactttaagtctggatcgttagaggccaaaaacaacctgttgttcaggctgcaatcatcctgcccagagggcactgagctccactttcacttttaagggaactgcaaataaaatgcctttctctcctggattttgaaattttttctgttaaatctggttaaaatacacattatgttcacagaacctagcaaagaagcaaactttatgctatgaaatgttaagtaaaagaaagtgcagtgacatgttgggaaggaagggcctcagataatccaagtttctccagcttggacgcctatgtgttatggctgattctagaaaactagaaataggagcggttagtgcaagtccgcttggtgtggagatcaggatggtgacaatgagaaggggtgaagggaattggagggtactaactacttca

SEQ ID NO: 416491 - DNA, 289 bp, Homo Sapiens
  misc_feature (120)..(139): n is a, c, g, or t
tccattgtatatatgtaccacattttctttatccatttatctgttgatggatgcttagtttgcttctgaattttggctattgcaaacagtgctgcaaccaacgtgggagcacagatatcnnnnnnnnnnnnnnnnnnnnagtatttattggatcatcttgggtgttttctcgaaaaagggggattttgcaaggttccttagataaatattggaaaaaaaggtcacccaaaaaaaccccttaaacaaatttcccgggtttttcccagggaaaaaggtcccgggaaacctt

SEQ ID NO: 416492 - DNA, 872 bp, Homo Sapiens
  misc_feature (402)..(514): n is a, c, g, or t
  misc_feature (784)..(784): n is a, c, g, or t
tacctcagtgaaaactgcaggggtccagtgacatggggcaaatcaagatatcccttctaagatgaagaataagttgttgcatatggcttttcctacaaccaagaaggacacataatatccggtgagcctctttgaattttgaaagcaacatattcttcatttgggtatgctacaaaaacctatttactgagtgaccccaaagctgctaattttgactggagccagaaaaaaagaaggttctgcagcaggtccaggctgccgtgcaagctgctctgcgacttgggccatatgatccggcagatccaatggtacttgaagtaacagtggcagacatggatgctgtttaaagcctttgctgggccttagagctgactcacagtgcaggcctctagggtttttgtnnnnnnnnnnnnnnnnnnnnnnnnnnnnnnnnnnnnnnnnnnnnnnnnnnnnnnnnnnnnnnnnnnnnnnnnnnnnnnnnnnnnnnnnnnnnnnnnnnnnnnnnnnnnnnnnntacatagagacgtcgatctaataagttcatgagtgttagctcatctcatctccataacaaccctatgtggtaatcactagttttgcccatatttcacagaagagccaacagtgacctagtatggagcagagctgggactcgaactctgatgtctggttctgagcctgttgcgctgaaccactacactacagtatcagcagaaagcagtaccattcttacttaaatgaattccatgggctgccatagctcccagaagccatattttcttantcggggagatgggcactgatagatgtgcactgatatggttctcagcacattgctcttgaggacaggtattaagcatagaaagataggc

SEQ ID NO: 416493 - DNA, 639 bp, Homo Sapiens
  misc_feature (435)..(498): n is a, c, g, or t
aggctggaccggtccggattcccgggatgggcaggattccagccagagtgaatgaagagtgaggctttggggaagggctcggattgcctctcgtgcttgtgttcagattcctgctgattggttgttccccagggagacgaggcttcgaggccaggtctctgctctgagttaacttcaccaccctgcaccttggtggcagtaagagagcgacctcaaagggccgctgagagaattgaggtggatgcctgtacagctctagttatggcacccattccggcccctggcaagctcttactacggttgcaggtgtaatttccagtctctgcctccagggattgctgctgagcacagacacgtttctctgctcacagagtgaggccgccaagatgattctcagatctctggttctgtatacagcccagatagcctgtgaannnnnnnnnnnnnnnnnnnnnnnnnnnnnnnnnnnnnnnnnnnnnnnnnnnnnnnnnnnnnnnnggcagaagagactctgtggatgagattacttcaaagatttgcgacggggagactatcgtgggttatctgtgtggatacgcaatgtaatcacaaagtgtccttatagatgaagagggaggcagaggagattcgactacagaa

SEQ ID NO: 416494 - DNA, 423 bp, Homo Sapiens
  misc_feature (181)..(193): n is a, c, g, or t
  misc_feature (199)..(265): n is a, c, g, or t
gcatggagggaaaatctgactcttcacaattcttgaaaaaactgtttttatagtgaaacaattcacatattctgaccacccccatccccaagtaattctgaggattatctgatacaatcattgattcattgatgttacaaaacgtaaagagccccatttttgtagaatgcctctctacacnnnnnnnnnnnnngacagnnnnnnnnnnnnnnnnnnnnnnnnnnnnnnnnnnnnnnnnnnnnnnnnnnnnnnnnnnnnnnnnnnnaggtttcagcgattctcatgtctcatgactcccgagtaccttggactacaagcatgtgccccacacccgggttaaatttggatgttttgtaaaaacggggccttcccctgttgggcaaggtgggcttcaaaacccggaaattgactttaagggaattt

SEQ ID NO: 416495 - DNA, 831 bp, Homo Sapiens
cctttgcacaaaggataaagtcacataaacattcttgagaacaacacgatttgtccagaaaaggctcagtgagacatagctgaatgatagttagatttgacgggttaatttagcaattacttgtgtgacttctcatcaaagagcagatgtgagttacagcatcatcataaatgatggtgaacagatgcagacctgaaccagaacttccacccaacccccacaaacgtgtctccccactgtgtgactaagcccatcgtctctggaacaactggtaggaaagtgtgagtgggatcatcaaatcaactacaagaaaatcgaacaaaggattctgaagagtagaactgaggttacaacagaaatgtattcaataatacggaaaataattatgtctatctttttaaaaagaagaaatactagttttacttggacatatgtggttgaaggagaggggctgtgggcatctatcctccccttcaatggcaaggtatcagtaactgctcaatagaagaactagtggtcttttcagaaactttactgttgggattaaaaagtatgctagtggacaggaaataatattaccacaatgatttcaagatgaattaaaaaggcaaatgttgaaagctaaatttcaaattcatttgaatatgaattgatatttacataatctggagtgaggcagagcctgcatagagctggacaccataagggaaaggactatagattaactagataaaatttcacatcgcaattttccaaacaaaattttatcctgtttagtaaacatcacttaaacacaattttaacattataaatatatctgcacatatacat

SEQ ID NO: 416496 - DNA, 845 bp, Homo Sapiens
  misc_feature (42)..(42): n is a, c, g, or t
  misc_feature (588)..(597): n is a, c, g, or t
tgtaaggagttttgactttattgctaagggtgatgggacgcncattggagcattttacatagtggagtgctaaattttggttttaaaaagtacacttcttagagagggcaagagtggatacagggaaatgttcaacatgatggtggccaaaattgggatggtgaccctggggacgagaagtagaaacatttaaaaaatgtttaggaagaatagtagacaggacttggtgaggattaaatgtagatgatggtggagaggagggttagaatagtatgtaaggttttatgaaataatcagactctggcagtgattggttagcttttcccatatgcatattgactcctctatggtccattttcatctacctctggaataattgtccattgaatcattagtgacggcaaaccgattgaaaaggaatgtaatgtttttctgttattctctaactcaggctgtcttttgaagaagatcagaatggggaagagttttgtaaattagccatttaaaaacaatctgccatgttgattttggtccataggaaggtaactgcatatattgcattatatggatgcactgtacttcactaannnnnnnnnnacatgtttacatttactttgtttccaggtatttacctctgttaacagtgcagaacagagctggtgcttcattttctataggtagattaatatatgtgtgcacttaagtagagagataataatcaaagacctagaaataaatgaccattgcttagagaaagtatataagtgagagaaaagcctaggttttgggggttgaacatcccaaaggatggggttgagaaatgaaaaaacctttcaaggaaaact

SEQ ID NO: 416497 - DNA, 879 bp, Homo Sapiens
  misc_feature (320)..(345): n is a, c, g, or t
  misc_feature (590)..(604): n is a, c, g, or t
  misc_feature (801)..(836): n is a, c, g, or t
aggctggaccggtccggattcccgggattgaaattgtgtcatattataaattttaaaaaaatgttttgactacaaaatctctatgtatatgcccagtttttgtagattgttgcttacgcttttcatatttttacccaaggagtaatcaggaattctaaaagtcttatgtaacaggatttaaaataaaattacacagaatctcaactgtactatattttgaaaatatgaatgattaagattattttttatatttttattaatatagagaaaataatttctataaaatatgctttcagctaatgggggatcccattccatannnnnnnnnnnnnnnnnnnnnnnnnnatttctccaagaaaaactcattccagttcttttgcattaaattctcttataccaaaaaaattgtttcaaaagttgcttagttgttatagaagatgattgcttatatgataaagaaatgttaaggccttgataatattcaaaagcttctgtataaaaacaataccatggaaattaatgacagagtaaactttctgaattaaagttctctttcaaactatgagtaagaggagaattagctggcttcnnnnnnnnnnnnnnngaggcagggtcttgctctgtcacccaggctcaatcacagctcactgcagccttgacctcctgggctcaggtgattttcccaccttagcctcctgagtagctgggaccacaggcatgagccaccacacctggctaatttttgtattattttggtagagatgggatttcgccatgttgcccaagctggtcacaaacttnnnnnnnnnnnnnnnnnnnnnnnnnnnnnnnnnnnnatgagccactatgcccaacctcagttggatgggtttgtgtgta

SEQ ID NO: 416498 - DNA, 881 bp, Homo Sapiens
  misc_feature (780)..(780): n is a, c, g, or t
  misc_feature (806)..(806): n is a, c, g, or t
taaatgagtgttgcagtttacattgaagtcgacatttgatgtttagtactatattgtgcattatccctgaattaaaaaaataataataaatgaatggttcaaagtgtattcattgaaatatagcacagaactagtgatgagaatagtaagctgaaatgaaaaattcaaaattatatatacattgatatactggcctgtggaggttgacatagcaagataccacagactgggtggcttaggaaaaacaaacttactttctcatagtcttagaggctgcaggtccaaaatcaaagtaccgtcagggtttccagtgaggcccctgtatgagtctgttctcacaccactaataaagacatatccaagactgggtaatatataaaggaaagaggtttaattgactcacagttccacatggctagtgaggcctcacaatcatggtgtaaggcaaaggaggaggagtagtcacatgttacatggtggcaggcaagagagcatgtgcaggagaactgccctccataaaaccatcagatctcatgagacccattcactgtcatgagaacagcagtattggcgtaactgcccccatgattcaactacctcccaccaggtcccaccaccacacgtggggaccatgggaaccacaattcaagacaagattttgggtggggacagagccaaaaccacatcagtccctggtcctgggcttgtagacagctgcccttctctgtgtcctcacatgggcctttcctgtgtgccttatacgaaagagagaaagagatnggggatgtccggtttattttcctatnaaggacaccaggtcctatctgaatagggcccccacatcccgtgaccccaattagctcgaattacttcccttaagg

SEQ ID NO: 416499 - DNA, 895 bp, Homo Sapiens
gctggtaccggtccggattctccgagcctttctgtcttcttttggggatgccaacaagaatacacatcacagaggactaaagtaaggattgaagaagattgtgtatgcaaagcacttagcactgtgcctgactcacagtagtactcaatacatgctatttttacatgcttctggcacaggcagccctgacttacaaatacctgatttactgtgccctgtacacgtgaagaggatgaaacattatgaaggcactccaagagcctgctgccaacaccagaaacccgactgttctagctaaacccctgattgcttctaaaccaattactcagaagatgcacaattcacagtttcagaatccatatacagttcaccagtcctctgtctgcctaactcaatctcataccatcacagaactagaacacttagattagggcgtctggggtctatgtttttggcattctgcctcagaatgagtgtcctgatgttgataccaggagccaaaaatgcaaattaagaagggtgatcatggaccagcttgtggcctaatggggcagaggtaactaacatgtgtggtcccagactattataaggaacaattcaattaagccccaatatgtgctttccaaacccaaagggcactataccaggcaaagtgtcttgcccttaaatttgaaggggagcgaaaaatacaaactgtaaaatatcttcattgggtttgttcccctagctccctgcatttgcatgaacatgctagtcagttcagaatcctgtgttttatacccttttcattttggtcggaaaagataaaaggatttttaagaaaagttttcccctaattttcttccttccccaaactggggcttccctggtggttcttggaagtttcccaaagccc

SEQ ID NO: 416500 - DNA, 585 bp, Homo Sapiens
  misc_feature (366)..(512): n is a, c, g, or t
ctggaccggtccggattcccgggatctactcctcccatcaaaaggcggagattatgtcctattctgtgaatctgggctttgactaagagaatggggagaaagttgcattccattctgggacttctaagcccaggcaacttctgcttactccttagagcgctgagctaccatgtaagaaactcaggctaatctgagaaagagacaggggtatggaggatgagaagccatacagaggggccacatgggcaaacacccagaagcataatagcgacacaatctgacaccgtttaaaaggaccactgctatgtggtcctttaaaactatatgggacataaatagaaggaggccaattaagacactacttcnnnnnnnnnnnnnnnnnnnnnnnnnnnnnnnnnnnnnnnnnnnnnnnnnnnnnnnnnnnnnnnnnnnnnnnnnnnnnnnnnnnnnnnnnnnnnnnnnnnnnnnnnnnnnnnnnnnnnnnnnnnnnnnnnnnnnnnnnnnnnnnnnnnggccgtagttggccggggcgcccctggttagtcccccagccttactttggggaagggctctgaaagggccagg

SEQ ID NO: 416501 - DNA, 961 bp, Homo Sapiens
tccacctaatgatgtgattatatgcatagaaataatagaaggatattaatatgctaacaattgtttactgtggcatggaaggttgggatgatattttaacttttcaaaaaattacagtgacatcaattttaccaaagtaaaagtgaaacaaagttatgcataaatgaaaatcccttatagctaaatcttgtttgttttatctcattatatggcatgtaatcctgtgttatggatgtgtaactggcttaagtccagctgcttgctactcaaaggctgaaaacatgaaaagcaaaatgtagtaaaaggaaagcagttttactaatcaaatgttagtaattgggaaatggccaggctcataccttaaaagaccattccaactttttgggctgagtgaaggagtttaagagggaaaacttggtgtgggaaatacgtgggagcggtgcagtcgggtgcaggtcttgcatgtcttcttctgatggtttatcttgagcagtcacccatttggaggtctggtttgcatcttcttgactttggcccaggagtggtggatgaactgttcataactgcccttaagtgggaggattgtgcagctgatttatttagtctgtgtctgttttgctttaaaattagtgcttggaatttctaagcaagcacaattatacaagtgagcactgtgcatgaagtacctcgtgggaaagggagagatgaagagtttttacatataaggccacattctgagattggggaggaaaaggagaaaagttttaaaatgcatttcaaagctggagtactctgtaagaattccccactgtcaaacttcatcctattttttatggaaagtgggcaacgcaatttaaactggctgctttcctggctgaaaaggggggcataatttggggaaggtacccagaaatggaattcctattccaccttggagagttggggaaaaattatttccacc

SEQ ID NO: 416502 - DNA, 826 bp, Homo Sapiens
ttcaatgaagtgttttaagcaggggagttacattatcagatttttgttgtgaaaaggtaattctgacttcagctttgagcaagtaggatagggaccaatttattctcctgtgtgaaacaagccataaaacagataaaatacatgcaacagtggtcctcaagacatgggacttcaggtcctgaagtacagtgccctctgagtgatgagaaaccaacaagcgagtaccatgattgcctcagcttactgcctggagagagtttctagggtttaaagagaagagatcaattaaaacttggcaaactcctgagttgggaagatggggccgagtgtctgggtaggctaaggcagctggagtctgcaggacatagtaccaggacagatagctatacagaaagagctctggagatctacagaggcttcctctctggttgatattcaagagagtgctgaccagcaaatgcatgtgaacaaactacccaaggctggggaaagaaccactcaaaaagactaaaggaaacaatctctggagcttgcacagggctgggaatattgcctgctcccaccagagaggaaagctccataattcataggccattcagtagagtacattcatagagtaattcatagggcattcagtagagtagaacaagggttttgcttcagaagtggggaaaaattgactttaggttaaaccctaagctgagtcctaactaaagaatcttaaaaacaaggcctaaagttatcaaaatgtttccaagaatcttaactgaatctcagaacaaaaagcaagaatatttatagggacacaaaaatatctagcaccccc

SEQ ID NO: 416503 - DNA, 859 bp, Homo Sapiens
cagtaataacattttataaacaaatataatttataaatataaatacaggaattctttacatttaaaagttattaataggtgtgaagagttttcaaagaattgactctctccatcatctagtaatttgaaattttagaagattctttgaataaacctcatttagtctctctcctataaaaggaaaagcagaacctcaagtccacatttattttgcatttgctctcttgttcacattcttctctatgtcaataaaagttagatggcattttttatagctgtgtatcaaatatgtgaatatagaattccaactaaaatagcaatagatgggaaaactttctagttcattcattgtcaaaagtgagtgctgagaggacatctgaagccccacctaaaagtaaatcctcagcaggaaagataatgcagataaattttgggtccaaattcttaatctgggcaaagaaagaaaacaaacacacttactagatggatttttcataaaagttcctttccatgctgtccaaagtgattaaattagtcatccattcttttatctcttctgttgataatcatataagcaactcctgaatctatatgagtgttcagtcttctttattattcagaagatttgccattttagtcaactcaaatatcagtactatttcatagcatgctagttcaggttacacaaagcccaccaggtacacctggaatctagccagaatgcagtccaatcatgagcactttaaacatttacctcattttactatttgtcttagagctatggaaacattattctgttttctggagtatctcacacttcaggagcattagttggagcagtacagatacagttagtgtc

SEQ ID NO: 416504 - DNA, 788 bp, Homo Sapiens
  misc_feature (567)..(567): n is a, c, g, or t
tccggattgggacttttaaaaactgcagcattctagcagactgaaatattagaagatcacaaaggaacaatagctacctctatttcctctatattcaagctgaccaggaagcatgctgataaaactcagtcgaggctgatcaattggggtcatgaataaacataacttttctaaaccaaacctgtggctgagtttaaatatattatgatgtgattgttctgtataaatgatagccccattcctccatgaaatatttttcgggcaatcaaattactgttcatagtaattgttagtgacatgagaagaactgctaaatttgaaacgcaatgtataaaatacagtgtcaattatgtaaaatattactatattaattatattcatgcatatatactgcacaggaaaaaaaccattaagaaaaagcccctaatttgtggaaggcttagacatataaataaaagcaacacaaggtcatacctacagggatattcatatggagttatcatttagtgagaatacaccatatgcccaggcatggtgccctgacactccacatatatatcttcctcnaaatccctaaaactcctgcaaaatgtttagtttattccccatttttgccggttcagggaagctgaaggctaaaaacgatttaaataaagcaattccggccccaaccaaagagggccagtaaaaaaagccagggtccaaaaccccggtctggtcctcgggtcaaagggctaaccctccgggttccaccggttcccaaaaaggcctccccctattttgcccgg

SEQ ID NO: 416505 - DNA, 217 bp, Homo Sapiens
cggtccggaattctccgggatcaaccatcaataatgaatgctcacgcatacccacaccccatggcgtttctctgagagtccaaaggacgatgcgtgtgaggcacttagcactgatctggcagccagtaagtacttatcaatgtcaggtggcggtggtaacagcgccctcccttccaccaacctctccaccccagttttattaaaagaggtctgatgt

SEQ ID NO: 416506 - DNA, 264 bp, Homo Sapiens
aagaccctcccagcccttttcagctgcaatataccttttctgcacacacccagattcccccacccaagcacccccacaaagggtaataaaatggcacatgtataggccagatgcgccaatggcaggttccccacaatgccccaaatgggccccaggcctatgtgcattactcactgtattacttcgcttattctttagtctggtgtgaagatagtgttgacagtgtcaaaaaggactgcagctacccctatgggtgttggtgtc

SEQ ID NO: 416507 - DNA, 717 bp, Homo Sapiens
cttcccctaccagtggcaggactaccaggcacctgcaaatgccgccaggggaactgggaatcaatctaatccatccgtcactactaaagaccacacatgctgatcagtggcctaagaataaatctgtaccactgatgaccactactgccaccagagacccagtaaaccatctggaggcttagggatcaacctgccctgcctgccacatcaggcacctgtacacatgatccagggacatgaggaaagatgtgttccacccaccatcaccaccccccagtgcccacaaatgttatctgaggcctagagataaatccaccctgccactggacgctggtgctcttgcacattctcaagggcttgaggacaggtatgtcccactcaacatgaccaccacccacaaacgttatctgggttcctggggattaatgcagcccagcaaccaccactggtacccatctacaccttctggggacctaaaaataggcccattcaagccacatccagtgactgtatgcacatcccaggggccaagtgaccagtctacccagcctaccgccactggtgcagtctctggcactctcctttaggcaccacctcatggccttggaatagtctgtccagcctgctgctgccactactggtgctcgtgtgctctgctcagaggcccaacggttgacctaccactgctactgctactgctaatgcctggacaacacg

SEQ ID NO: 416508 - DNA, 886 bp, Homo Sapiens
ctgcattcagcatagtatgatcctactgttctcctgaagtttaaactcatgaaatacagagaaacatttgagaattgcaagtggccagggaaaagtacaatgggaaatgtttctgtaaaaccccctgtgtgtgctatacattaggttttcaggaacccagagcatcaggaattggtcactggaaggaagagctcatggctcggtttaatttcaaaattaaaaattgaacagcagctggagttgactcagatctcaagggaaaccattccaggaaactggtttttcacttctggaatcttcattagttgattcagcagcccagggccggtacccagagttagcgccaactcagctaaacccacagccggcccggcggtgcaccagggtgctctgtttctaactggggctgcagaaaacccatcattcatcagagcccagggcaacagatggaagagagcagtcgcaggactatggcctgttcgagcaacaggcaaggagccttcttttacacaaaagggaggctgggagagattggccgaccattgctgacagaggcagtaaggaagtagaatttcccaggttactgcaataaatccagcatggatgatattttatcagatgttccaacttgatttttgaaaaggtttctgttttcaagaatgattttatcttctctacttgattataaattagactagaaaacagacaaaatatctaacttttctctttacaaagagagcacctttcagccactttaatcatttacagtggaaacacacagtttttggaaaggtcagtagcacctttagttcattgccaagaaagaaaagacaaggaaataagtgcccaagctccaaattttggatccaggcaacggtccacgtgg

SEQ ID NO: 416509 - DNA, 810 bp, Homo Sapiens
  misc_feature (493)..(650): n is a, c, g, or t
  misc_feature (668)..(759): n is a, c, g, or t
cttcagcaattgtgttttcatcacttttgctgcacatacctcatagacacaaaaacagaggttcagaaatctcttcacttgttgatatttttagtgataaaaatttacatcatacaggggcaagatggcatggtagaggggacagcagagggtgatgaaactgcctgtggtggtgctccaatcaatccatgctctggtttgtgctctgtgaagtcacagtggcctcactaccaagacctgaggccagcacgtgccctgttgagttcccctctatacctctcttcccttttcagtgtctctgtctttttaactctttctctcctctagaattctccatttcttccaatgtctcctccttcctggtttactggctttcctccagctgtggtagccccaaccctcctctggtgtccatggctctcccagcctcctgtttatacatttctactcctaagtgtgagtgtgagggagtgctttcaagaaatatgttggnnnnnnnnnnnnnnnnnnnnnnnnnnnnnnnnnnnnnnnnnnnnnnnnnnnnnnnnnnnnnnnnnnnnnnnnnnnnnnnnnnnnnnnnnnnnnnnnnnnnnnnnnnnnnnnnnnnnnnnnnnnnnnnnnnnnnnnnnnnnnnnnnnnnnnnnnnnnnngagatggagtcttacttnnnnnnnnnnnnnnnnnnnnnnnnnnnnnnnnnnnnnnnnnnnnnnnnnnnnnnnnnnnnnnnnnnnnnnnnnnnnnnnnnnnnnnnnnnnngaataagctggggactacagggggcccgacaacacaacccaggaataaata

SEQ ID NO: 416510 - DNA, 742 bp, Homo Sapiens
  misc_feature (648)..(648): n is a, c, g, or t
  misc_feature (674)..(674): n is a, c, g, or t
gaaagaaagaaaggaaactattatttttattgaatgacttgtcagacttacttgcatctaacgttcataaaaatcttcaggcagatattattgccatctctgattttacgagaaacaggttcaacattgaaatggcttatctcatattacacaactttctaagggccctgctccaagttcactggactcctggagccatgttcagtgcttccataacaccaccttccaggctgtgggctgcgtactctttctaagtagaaagacgcagtggcaggaaaatgagaaaggatataactctgtagctacagcctcaaatggaaccaggtcatcaaggaccatgactgcaatcaggtgtggtgtcaactcatcagaggtggaaggtgccaggtgccccaaccccagtcccttcacctccttagaagtaacttcataccccaccaacacatgggaaggatggatttttcacatactactggttgtaaatgaatgatggttaaaaaataagcatgaaagaagacacttcttaattcctaggactatcaagtagtatgcgatccattgagtttgtttttcatgcttatgttatgatgtggagaggtaatggctggggctctattagccatctagagccatgaggacaaaggccanctttctgggtactaaagggtgacccntttgggatggaagtctgggttccctacagggatttgtgggcaccctcttaagccttcccctggttaaa

SEQ ID NO: 416511 - DNA, 585 bp, Homo Sapiens
tcccagtgtgtaaagctggacaggttcaatctctccatcaacagttaacatgtgtgaagtgtggtctaccagcagctcattagatatgaggagcacattctctttttttacatttataagctgaaatgggacagaaataatccttcagactgagcagataaagtttaaaagatttcatatcaacagtgaaattcttctcatgataatatgtttgaggtttatgaccgggacccattaaatgcaaactactcacatatacaggctcaaaaataatttctcatgtacattccacagagcaattattatccaatttagtagctgtataattaatcctttcatatctattaactttgtttaggcttgtactctaatcaagattttactctttatttgggttattttctgtacccttcttctataccgtgagacttaatctttattttagcttctgccctactcacatgcttcagacaagatatgccggtataatcagtttagaaaatgtgaaattctcaaattcattataatgaatatgaatgtatgaatgcccttttcatgctgacgacaactattaaaagattaatc

SEQ ID NO: 416512 - DNA, 1106 bp, Homo Sapiens
  misc_feature (144)..(156): n is a, c, g, or t
  misc_feature (158)..(435): n is a, c, g, or t
  misc_feature (855)..(855): n is a, c, g, or t
acagatccttcaggagtcatcccaaaagaagacattgttatcataggagatgacagctccatgcgtgctattgcccctgaacaccttctagtgggacaagatgtgaaagtgagaaacaatgatatttttaaagtttaaaagttnnnnnnnnnnnnngnnnnnnnnnnnnnnnnnnnnnnnnnnnnnnnnnnnnnnnnnnnnnnnnnnnnnnnnnnnnnnnnnnnnnnnnnnnnnnnnnnnnnnnnnnnnnnnnnnnnnnnnnnnnnnnnnnnnnnnnnnnnnnnnnnnnnnnnnnnnnnnnnnnnnnnnnnnnnnnnnnnnnnnnnnnnnnnnnnnnnnnnnnnnnnnnnnnnnnnnnnnnnnnnnnnnnnnnnnnnnnnnnnnnnnnnnnnnnnnnnnnnnnnnnnnnnnnnnnnnnnnnnnnnnnnnnnnnnntatctccgctacatctcatatcttttccctctgccccccttcaccggctacttaatacctctttgcacaacatatattctgtcagaaactagtgagccgctgccgcccccgagcaatccgccctttgggtgggggtgctggttttctccccccttacttcgcgcggtaccctatgttcccttccgtatcttatcgacccgccgcctcccctctttgtatatcgcaaatgccccacacccaccgttatattacccccaatccgcccagcccctccgctcctctacgtcctgcgcgtcacattaattcgccggccttgcccatattttttgccgccattatattatggcccgcgtccttggtttatctcaccccgccccccgccatttatccccgggtgttatataatcccgcccgcatccntgacttcatattcccgcagtcgcttttccagtctcaccccctagcctgagctccccttcgctgcactatcactttcgcacgatcctctcattatcgtctttcgcctcctcactttgctctcgcttccagttcccgctcccagctcctacatatatcgccccctacgatcgataacgtgattattctgctctgcgtccccctctattttttcatcctatgcgcactcaccgccgcgtttatcgttgctatca

SEQ ID NO: 416513 - DNA, 861 bp, Homo Sapiens
  misc_feature (101)..(125): n is a, c, g, or t
  misc_feature (141)..(194): n is a, c, g, or t
  misc_feature (454)..(817): n is a, c, g, or t
  misc_feature (821)..(821): n is a, c, g, or t
ttctgtgaagtcctgtcttcttagccaatcctctctcatttccacttggatctctgaccgtcatctcaaatccagtgtatttaaggcaaattctttgtctnnnnnnnnnnnnnnnnnnnnnnnnnaaacagatgtgatctnnnnnnnnnnnnnnnnnnnnnnnnnnnnnnnnnnnnnnnnnnnnnnnnnnnnnntggactcctgggctcaagtgatcctcccactccagcctcttgagtggcaggcactacaggcacatgctaccatgcctggctaatttttaaattttttgtagaaaagcagtcttactatgttgcccaatctggtcttgagctcctgggctcaggtgatcttcccatctcagcctcccaaagctctgggataataggtgtgagccaatatgcctggcctgtcttctcctcctcaatcagttttccctctaaaatccccatcnnnnnnnnnnnnnnnnnnnnnnnnnnnnnnnnnnnnnnnnnnnnnnnnnnnnnnnnnnnnnnnnnnnnnnnnnnnnnnnnnnnnnnnnnnnnnnnnnnnnnnnnnnnnnnnnnnnnnnnnnnnnnnnnnnnnnnnnnnnnnnnnnnnnnnnnnnnnnnnnnnnnnnnnnnnnnnnnnnnnnnnnnnnnnnnnnnnnnnnnnnnnnnnnnnnnnnnnnnnnnnnnnnnnnnnnnnnnnnnnnnnnnnnnnnnnnnnnnnnnnnnnnnnnnnnnnnnnnnnnnnnnnnnnnnnnnnnnnnnnnnnnnnnnnnnnnnnnnnnnnnnnnnnnnnnnnnnnnnnnnnnnnnnnnnnnnnnnnnnnnnnngaantgaagcttgaaatcggcacccatttgcaccccgggccttg

SEQ ID NO: 416514 - DNA, 929 bp, Homo Sapiens
  misc_feature (450)..(464): n is a, c, g, or t
  misc_feature (489)..(528): n is a, c, g, or t
tccggaattttccggatcaaaaagcatctgagacagtactcaatcaatttagatgtgtattttgccaaggttaaggacgcacgcccaggagacaggtctgtgcctttctccaaagataatttgagggcttcagtatttaaagggggaaagcaggctggaggagaaagagggagggtgtggtcacattactgaatccacatgttgcaagggaaaagcaacaggtaggggaatagttaatgatatatttctctgacgctcagtaaatctgcactttacgtaagataaggtgaacatacgtggctacctgtgcagatatttaacctttgatctgtaagctctctgcttaggaataaaaggaaaggcagcttcttgcgtgactcagctttcagcttaattttttccttttggcagagtgaactggggtcccaagtttttatttccctttcactnnnnnnnnnnnnnnnaatagtatgtttagataaacccacnnnnnnnnnnnnnnnnnnnnnnnnnnnnnnnnnnnnnnnnaaaggcaacatgcaggccagacaaagcacatctgcaatgtagagctgtccttcaggtaattaatttggtctatttcaatctgtttctttttcatccttctcttatctatagtgactggcactgttctctgtaccttcatcaaatgttatttgaaatcactgctaatggaaagtaaaggattctgccagtacatcacctaagccctttgtatttcccaaaataccttctgcagagggttttaatgactcccaaatttcccttttacccttcctgatgcacagtcctttaagaaaaaaagatggaccctccaaataattggtccttcaggatttccaatttccatttaagtgcctggggcaccttttaaagaatcccacaaaattcccggggggaaaaagcct

SEQ ID NO: 416515 - DNA, 860 bp, Homo Sapiens
tctttgcatatattgcatagtttttttgttgaaaactggatgtttaaaagtagtataatgtggcaacttgggaaatcagatttccctcctcccagcgtttttgattgttgctgatgctgtttgcttgttttgtgattttcctgaactaattctttaaagttttcattctgtcgtgtgtggcccctgaggtttctggtcagttaacctggtgatcagttaataattggatggagatgcattgatccagtagtctctcagcttttgctcaggggctgtttatatgtgttggggaatctaatcaacactccagcagaatgcttgctatgctgccttagccatcacttattgcttgcacaaagcctcaagttcaggtgagcgaggtcagctgagtagaaccttttcagataattcctgggaatattcacagccctgaatatacatttgttttttctagatccccagatatattttagagctttttaaagttcaccggggacatgtcattcccaattttttcttttaagtctttggtcagccttttgttaccctcaagcagtattttcccttcaggcagctgtgatgttaaaaaattgctgctgattgttattgacaatgctctagagattaaactgttgcatagaaatagtctgagtcagatcaaataaagacagtgaatagcttttaggggagctgtgacacaggtcaaatagtgacaattctctggagattgggctttgcgggagctccaaacccattaattcttggcccttccatggctgctaggctaacggtttttcaccactaccatatccacaagggctgttgggtttttcaagggctactcccaaatctaaggaaga

SEQ ID NO: 416516 - DNA, 440 bp, Homo Sapiens
agaatagtgcctggctgtattcatttcctatggctgctgttataaattaccacagacttggtggctaaaaacagtacacattcattctctcacagttctggaggtcagaagtctgaaatcagtgtcactgagccaaaatccaagtgtctgcaaagttgagctccctccagaggctctaggggagaatctgtttatttctcttttccagcatctagagctgcattcttggggaccttcctccatcttgaaagctggcagcatagcatcttgtttcagtcgtcaccttgccgcctttttctgtatataagaagtcacctaggcaagcagtatgctaaatgattaatgatcaaaagcttagttgctcttatgaaagactctaccagactggctccttatcattgccattcagaagctatttgtgtcttcaaggaagccacttt

SEQ ID NO: 416517 - DNA, 1203 bp, Homo Sapiens
  misc_feature (34)..(34): n is a, c, g, or t
  misc_feature (72)..(150): n is a, c, g, or t
  misc_feature (192)..(273): n is a, c, g, or t
  misc_feature (322)..(364): n is a, c, g, or t
  misc_feature (435)..(551): n is a, c, g, or t
ttattattttccccaattctacatccctgtgctntccccacaggcaggcaagggccgggattttccgaatcnnnnnnnnnnnnnnnnnnnnnnnnnnnnnnnnnnnnnnnnnnnnnnnnnnnnnnnnnnnnnnnnnnnnnnnnnnnnnnnattcagctggtaaattttcagaagtctgaaaagcctataccnnnnnnnnnnnnnnnnnnnnnnnnnnnnnnnnnnnnnnnnnnnnnnnnnnnnnnnnnnnnnnnnnnnnnnnnnnnnnnnnnncactctgcctgttgagcaatctgcccactgttgctcatttacgtcaacnnnnnnnnnnnnnnnnnnnnnnnnnnnnnnnnnnnnnnnnnnncttcacgtctgcaccaggagatgggaaagaatatacacagcaacattttttgtaaaagcaaaaagtctagnnnnnnnnnnnnnnnnnnnnnnnnnnnnnnnnnnnnnnnnnnnnnnnnnnnnnnnnnnnnnnnnnnnnnnnnnnnnnnnnnnnnnnnnnnnnnnnnnnnnnnnnnnnnnnnnnnnnnagtgcgagccaccatgcccgtccctaactataaacttctaaaagaaagaaatacctaagcgtattgacaaaaatattcatagagaatctgggaataaaaagtgggtttttggtcctttgggaaaaaatatttaatatttaagggtttcctcgtaactttatttgcaatacaaactgtggtaagttaaaaaatgcccgaggggctgggcattttataaagataacccgttgaaaaattggttttcttcccttttttacaaccacaaaagagggtaaactctttatataaataagaggggggaccccgggggggccaggccatttgtgggctttaccaattgggcacgttttttaaaattcccccacaatgcgtacttttttttgcagaaaaagggccccccaattaaaacacggcgcacgcttatattgggtttttgggaaagccccccacgccccttggttcgcccacgccacataaaaactataaaaccctcttctcacaacttctcgtgtttttaaaaaatttgtaacctccaaaatctatcttaaccccgtgttccttttgtgatatgagacaatttgtcttactcctcggttttcgcccccacagacattttatcccaaagggaaggcgctttgggttttcccactac

SEQ ID NO: 416518 - DNA, 358 bp, Homo Sapiens
ccgaaagagggcttccattcctggtgttcccaaaggggagctgtatgtgcagagatcacatggtaagtgagtaaatgagaaagagataaagggtggggccaggctccttttaacaaccagctctcatgggaactaatagagtgagaattcactcactaccacaaggatggcaccaagtcattcatgagggatcttcccccatgagtcccccactaggccccacctgcaacactggggatcagatttcaaatgagctctggaggatcaaacaaaccaaactgtagctttgagccagccctaaacaagacacgcagagaagtacacatcaagatgcatcatagccaaacttctaaaacgt

SEQ ID NO: 416519 - DNA, 118 bp, Homo Sapiens
atgatctatgtattttgtgttttgtggttgtggtgctttctgtttgcctgttttctttttgtattaataggctgtgttaccggttccggtaatttcccgaatccgaactgcagaatgg

SEQ ID NO: 416520 - DNA, 941 bp, Homo Sapiens
  misc_feature (456)..(511): n is a, c, g, or t
ttgaacatgaggaaatgaagacagaacatgaattttttggaaagtttggctacaatgggaagtagagaaatggggtaatatctggaaggggagggaattgagtcagtagggttttgtgttttgattttacggtagggcatctagatagatcatgtttatgtacctattcccactctgttctctcttcctgaagagtctcctctggcaaactccattctgtaaacgtccgtatttaagtgtcctgttctctgtcaaacattcttcccaggcctagtatgatgtttgtccccaggcttccatgccattatgtgtacacattatctgccataagcttaccttattgcatggcaatggaagtttttcctccttctctcttcttcattagacaagaacagggtcttgaaaagtagagactgtgtcttctcaagttcggactactggcacaggtaggtgctnnnnnnnnnnnnnnnnnnnnnnnnnnnnnnnnnnnnnnnnnnnnnnnnnnnnnnnngaatgaatagactaactgagtttgaaggcagtgctatggcagatttttcttattttatgaatggaaaaactatggcatagaacaatttggaatctgataattttacaaattcgtaggagtgctggaaaacagtaaaatcttccgtctttgctccttgagctgttgccccagggtccctctctggggaactgcactagcagcccctaaaaaaacaccctgggggcttgataaccctccacattttcacaccaaaaaccgccgaaacctctaccaaaggaaagccaccacggccctttcaaacccttgggcgttccttgccagttcccaaccttgggtaagattttggaattttttaaccaaacacatttggggcaccaaaaatttttcaaagaccttggggggaaaaaaaccacaaccctggggggtggac

SEQ ID NO: 416521 - DNA, 966 bp, Homo Sapiens
  misc_feature (81)..(81): n is a, c, g, or t
tttttcatgatgaccaatcaagtgtaactttctctggatcggggctggtacggtccggaattctccggatgcggctgcacngggaaaggtaatgacggctacccattcccaccccagcccccttcagcctcccaggtccccaaggacagggtctcctgagggccctggtctggcctcccccactccctagaggactgcctctccaagggcccaagggaccaggggccccatcccaccaccccccaagccacacagaccctgccctacaaacctcatcaggctactcatccgtcaccttcccagatcctgaccacaggtggatctgaggcaacgtgcgactctaaccctgttttagtttgttcttagcatttatcactacaggaaagtatctatgtgtttatttaaatgtctgccttcctcttctagaaggaaagctccgtaaggctgaccgggaaagaagcgaggagctctgggggctgggtggaaagtcccgtactcatcagggccagggaggccacagaaactacctcacgccagcttcccaggggtacagcggctagaatggacctcgaggaggcccctcccaagactcccgtctcccgggttccaccgcagtgggggcatcccacactgcctcttgcatgcttgtaggaaccacacacagtgggggcacgtgagggggcagaggcccgcagccccctttgccattgaatcccaaagaaccctggaagtgaattcctgcaaaagaccgtttctaacccaaaagcgaacttcccatccttgaacacggggcctgggttaaaatgaaggccccaaaaaccggcttggggcccgccattccccttggaaagttcagggcaatttcctttgttcccccgggaatgaaagattccgccccccaagatatccgaatttcccaaaacacacccccccgcctcaaaataaaacaaaggaatgccccctggc

SEQ ID NO: 416522 - DNA, 1221 bp, Homo Sapiens
  misc_feature (125)..(134): n is a, c, g, or t
  misc_feature (489)..(530): n is a, c, g, or t
  misc_feature (587)..(602): n is a, c, g, or t
  misc_feature (672)..(680): n is a, c, g, or t
  misc_feature (968)..(976): n is a, c, g, or t
  misc_feature (1096)..(1096): n is a, c, g, or t
tcggatctgtttccaagggaagaagtatacccaagaaacaagatatcctcaagctactcttaggatcagtgtctgcatagatctggcacacagaaatgcaaggaaacaatttgtgcaaagcattnnnnnnnnnnggggggaccctgacagtataacaagtgctcctgagagaggacagacggataggacgcatgggtcagggatggccgcccctgaaccagctgaatgttccacctaaaaatctgaaaaaggtgcatggatttccccaactttaacctcccgcaaaccacttaaccacccaacgttttttcccaaagcattccaccttgttcttagggggcaggataccccaattttttccccaaatggggactccgcaaaccaaagttgtaaaggacccccacccctttttaaccactccagggggaaaagaaaaatattttatttaaaaaccctttttcaataaggggctcaaccccctctttttgnnnnnnnnnnnnnnnnnnnnnnnnnnnnnnnnnnnnnnnnnntataacccgcgcccataatctccctctttttataaggccccaacggagtccctatgnnnnnnnnnnnnnnnnccaccctccggctgttactctccccccaagcaagaaaaagaacaaccctatctctctcttcctgtgtccnnnnnnnnntaatagcccgagacaaccaaccacctacccgccgtttttattcatttatcattaacacatacaaggcgcgacgaggattactcccccacacaaaacaattattccctttaactccaaaggcggcagccaccttgtattttaattaagtcgcgacctaatgcgccacccctacttcttaattccgcacccacattgcaagccgccattgtttgataacactcaatcatcaatccacctgtcgattcgcatatcccccaccaaaccataggatcatggagtcgataatcnnnnnnnnnatctactcaatcaacaccctgcgcctattatatattgcaatataaatataataaagctcctcctcgccgatacgtgcctatctcaatgaataactcccaatgtggagagactgtccagcntcctatttttccttcgaactagcactagcatacatactactctcatatgtcttgatttataaataatacattcaaaatctgttcgtctgctagaatagtgacagtacgcgatcatttccaaatta

SEQ ID NO: 416523 - DNA, 964 bp, Homo Sapiens
tctgtctcgtggggaatgcattttccatattattttaattgtttttcttttactcaccagtgtagctctagctagagcaacctggattctttttgagaacatcacatcattggcagaagatgctggaaagtcagggaatctcatctcgaaatgctgacacagaaccgcatcactcattattatttggagggcaggcaaacaaaaggcagcctcttttccatttgcctcgttatcgagcggagttccccttcttaccacctcaaaacatggggggaagtgcgccttaattactccagtacaagagtgaatacctgagtggaaatcttcccaaggaccttttcggaaatgacaacgttggaagttctaacctgctcaggactaaacttcctcccagaaagaaacatactgcgttagcattattcaaagggttaccatgattatataaacccctggcttaatttttttaaccccctgctgccattttcccttattctaactgatttctccaagtcaaactctgaaaccccaatttccaaatggaaaaagctcttgacaatgctaccacccacgggctattgtttcacccaaatttgcggccccccgatccatatcttttcccaaaaaagccctgtcctgaaaagggaactttttttaacaaacggagcacctcccataattttcctactaaccggtggcaattctccacaggggtgccgccccaaaaacctttatttccaacaatcccaatttaatggcccggtgggcccatctggtcctcccacccggtaaaatacccaacccaattttttgaacacccctaacttttggccggatttttcacacaattctggaaaataataaaaaatcttccccggggtgtaatacaccactgcgaaaacccccgctcctcctcccttaaaaacaaaaatataataaagtggggggggacgtcccctcttacaaa

SEQ ID NO: 416524 - DNA, 859 bp, Homo Sapiens
  misc_feature (418)..(427): n is a, c, g, or t
agctagttagttgtggagcttgccaaactcatgtcggaatcaaaatgtttcttctgaaattttatactattcattgtacttgctttatctagtgacaatgctaagttcattaagaagcgagaaaccacttctttgtatagttttcccaagtacctcatgcaatcctatacaatttagcaaaatgtttctttaagaattttctatcccccttctctttcagcagtatattccccaccaggggatgaaagaggtaacagggacaaggtaactaaggctagcaccgtttcaaagcattttgctgcaaaactgtttctcttcatcgtctcattaatagacagctaccaagaatcaaagagagcaactttctactcacaccttgatccctttatttgaccaattactcaagggaatcgaccannnnnnnnnnggctccacagggcacggaataaacaacttcatctgatgtgctctcaggtttaccatttgtaaaaggtcagtacatgatattgtttcaacaggctttccaagccttttgcgcctcctggacttacccccgtaaacaatcttttctggggtgggcaagatgaatgttttaagttttgccacaagcattgctccttacaggaaaaaattttaacgccagaatagggaaaattaaccgggtgggagaaattaaagttccaagccctattctattggccacttttggactattattaaaaccttgggccatacccttataaaatttccccacacataaaaacccttggtgccaattcaccaccttttattcccaatagatattttcttggcggtgggagcgaatgtgcaaactccaaaaaacacacactcaatggtg

SEQ ID NO: 416525 - DNA, 1319 bp, Homo Sapiens
  misc_feature (404)..(573): n is a, c, g, or t
taaattctactcccccttgaccccacccccgcacctgtcaaaagcatgctggctaccggtccggcattttccgaatcagagaagaaatataatcagttttccttccgcaaagaaggaaaggtaagacccagggagataaggaaactgcccaagagaccacagtgtttaatcggcagaacaaggtattggaatccaggcatggctgtctccaaagaacattattcgacatatcacgtgactctgagtcctatggcgatttatttgagaagcagctcaaggttccttaggccaattcaaatcactgtacaaaatcctcatgcagcctctgaatctttgagatgtcaagtcactccatgttacccctaaagtaaatcaggacagcagcatccaatactaaccagacnnnnnnnnnnnnnnnnnnnnnnnnnnnnnnnnnnnnnnnnnnnnnnnnnnnnnnnnnnnnnnnnnnnnnnnnnnnnnnnnnnnnnnnnnnnnnnnnnnnnnnnnnnnnnnnnnnnnnnnnnnnnnnnnnnnnnnnnnnnnnnnnnnnnnnnnnnnnnnnnnnnnnnnnnnttacaaaggggttttcccccttatacatcaaactcctccattcacctcattgccctgccggggtattgttcaagaaaacctccattttcatcatttttctaccctttgaatttttctaacaatacccctccccaattccctcctttaaaacatattgttggaaactccctaatcttaaaaaaccctctctctataattttttcaataactcttctcatacccacgtttaatatactaaacccccgccattatcattatagcgaaggtataaactcgatatacattacaatcagtgtgatggtcatatgtgtccctactcaacgtaataaactctgggcccccctatataaaatatgccactttatccttctgcgcagtcacagctctaagtaaatcaaagatagctctaatccgcgtggtggcgtattttcgcccgcattatatttatgtagatattatcacctcttctataatgtacttgatatatagtgccccacttagtcagaattcaatggttattttccatccctcataagaaatcgaaacctctacgcgtacaagtagaactcttagcaccaactattttttaatactagagtgtaccaccgactaatctactcaaataacacggtaatgttattttaaatatcctaatatagctttcaatacgcctgccggctcatcctacatcgattcaatcttcgtcattctacacttcgtaactaagatctatcgtcctctatccg

SEQ ID NO: 416526 - DNA, 721 bp, Homo Sapiens
  misc_feature (504)..(504): n is a, c, g, or t
tgaccgttatcatataacatgttaacgcatattacctcaaccctattaactgtaataccacgaaattaaatattgtctcttttcacaacaggaagtctttcgtcccctgttctatcacacaatgggtagtgaactcaccatattcgggcccctctagaatgtttttgggcatccacccacgtccagagcgaacttcgttgggcgcttttctaaaagtgggcccggtaactataaaccacggtaaaagtatgggccctctcctttactccccccttcctaaagagaaactttccaatctcataagtgtgctccaaagacacatggggccctaacactttcaatcttctcctacatccatctcttgtggtgtccaacctctccacccctctcccttcattcccatggctctctaacccccaattgtgcccctatacagccccagcaatcattattcttttggtgggaaatatctagatctaaacccaaaaagtggaaacaccgggncccttcgtgtccacattctttttactttcgaggaaccctcagcaatatgatgggggctatatggataatatttctaattaccaccacctactccagtgaaaccacccatattttgtcacctattgtagagccaattatctaaagtatttaggctagggggtaatcttaccctgggctcacctctgaaagagtactgagatagcccactactttctcg

SEQ ID NO: 416527 - DNA, 1163 bp, Homo Sapiens
  misc_feature (87)..(87): n is a, c, g, or t
  misc_feature (306)..(474): n is a, c, g, or t
  misc_feature (836)..(836): n is a, c, g, or t
caccactatccttaaccttctaatcccactaagcggtggtctaattacaaaagaaggctgggtaccgggtccggaaattcttgcganaaagcgagtaaaaaacaagcccatttccactccaggtcccacaaatgctcctgattggggcccccggacactcctgaactccatcacagaggctgtcaatgttgggattggcagcaagtttacatatggtcactcaaacctactcccctgggccatgagtccaggtggctgccctcaccaactccagcagtagccatgggcttcattccatacagaagnnnnnnnnnnnnnnnnnnnnnnnnnnnnnnnnnnnnnnnnnnnnnnnnnnnnnnnnnnnnnnnnnnnnnnnnnnnnnnnnnnnnnnnnnnnnnnnnnnnnnnnnnnnnnnnnnnnnnnnnnnnnnnnnnnnnnnnnnnnnnnnnnnnnnnnnnnnnnnnnnnnnnnnnnaaggcctgaacctgcacacagcctgccgctggggtatacctagacacagaagaggaccggacaggtgctgctgcgtgaacaccaaagggttacattgaaagtctgcataccgaagaatgaagaaactcccgtcttaaaacaccccattttatttccctgtgttccaaggaactgaagtgggtttttttctctccaagcaaacctccttagtgctcctttgccaaaaaattagttcaaagggctcctttggcccattaaccttatcataacctgcccaaataaacccgctaatttttaccttttcctggccattcgaatgccttgcaaaacaaattattgttttccccacgattgtaacccancgtagtctagttctggtgggggccctccttccctgggcaaataatatttctccttacaaaacgtggaaaggtgccctatatcaccaaccatatactccagagcgaccaccttgtcattatgttcatccacctataatgtaagaccctatcccgatatccactatcttttggggtctattgcaaccgtggttgttatagatgttctcctaatgtggggaatccaagtctcttcacggggggctctgcgaggccacctgtttatttttcttataaaggtaaaataagagatctctatctcataaaaatgttttagaaagcatgggcacc

SEQ ID NO: 416528 - DNA, 1030 bp, Homo Sapiens
  misc_feature (874)..(874): n is a, c, g, or t
  misc_feature (978)..(979): n is a, c, g, or t
ctggtaccggtccggattcccggggactcagtaattcatctttcctcaaaacaggtcaatcgcaaaatgcatttgacttggcgacattgaggcattctcattcctgcaaccgtggttaccaggcattatccagaaccgtgtgtccatttgagtacacgcacgccacacgaattttttaaatgtataattaaaagtgtcccgcactatctatgctaagtacatacaatttgagagccaggaaaaggcctagagattgtatgccatggggccttgtaataaatgataacataattcaaaaccagtgatcattccaaaggaatgaaagttaaaaatgccattcaactaaccacggtcatgcaatatctattatttataccacatcggaaagggtattcgcagagcagttggaaagatacacaaataagtgtttatgttattagtagaagggaataacaatttgtttccagcatcaatttatcagggatatgaggtaatacctctgcctctccacatcatatctgtcttccagagagctaccctctgaattttctccagttgaacaggacctcatgtaccgcaagtgactaacccatcaggcctgcctggagtaaatcataaccatggcccctattttaataagatggttgcaatctattgggcatgacggcatgggggagtgaagttagaccaagttcccttctgtttgatgttattggaatagcacataatcctaggcggtgcttcatctgtcaaacagcttggagtcctgtgctggttcctggttcaccgaagggtcgagaagagagattgggctgtggcggtgtggaaatcaaggggcaggcagtgagtatgaaagtctctgggtacaaaccangagcaggagtgccgtcgtcaatgttttcccaagagactgggggcaatgggaaccaaaggcacatgccccttgttttgttttgaggcagcaaaatatgaaaatgnnttttttaaataaatggatttttaatttttaaggggggtaaacaaaatgccg

SEQ ID NO: 416529 - DNA, 1047 bp, Homo Sapiens
  misc_feature (190)..(497): n is a, c, g, or t
  misc_feature (632)..(688): n is a, c, g, or t
  misc_feature (726)..(726): n is a, c, g, or t
ggtccggaattcctcgggatgagctaacagcagggcagacctgctggtccaatccgaattcacaacatcctgaagagaagccaggtgtcagctgtcagccgcattcttcttgaccaatcactgctagaatgttacaaagccaggcatgcaaataactttccctttacctggagatagaaaagaatgctgnnnnnnnnnnnnnnnnnnnnnnnnnnnnnnnnnnnnnnnnnnnnnnnnnnnnnnnnnnnnnnnnnnnnnnnnnnnnnnnnnnnnnnnnnnnnnnnnnnnnnnnnnnnnnnnnnnnnnnnnnnnnnnnnnnnnnnnnnnnnnnnnnnnnnnnnnnnnnnnnnnnnnnnnnnnnnnnnnnnnnnnnnnnnnnnnnnnnnnnnnnnnnnnnnnnnnnnnnnnnnnnnnnnnnnnnnnnnnnnnnnnnnnnnnnnnnnnnnnnnnnnnnnnnnnnnnnnnnnnnnnnnnnnnnnnnnnnnnnnnnnnnnnnngactgctgaatcaatgtaaatatatgggaaaatcaattttaaaaggagcctatcatttctgattttatatataggctcagccaatagtaaagtaaaatgtcttcattctctaattaaccttagttattctgtatnnnnnnnnnnnnnnnnnnnnnnnnnnnnnnnnnnnnnnnnnnnnnnnnnnnnnnnnngagaagggagtctcgttctggccccagggtggggtttnattctcccctctctttcctttctcctctcccttgttgctgtgttctcagctctaagtgaccgtccaaagacatactgtcctcaccaataagaagcgactctatctccacccccaccctactcctcgaatgaaattatacaataactatacctaactgtcctggaactagccaaccagagtgcaaggggcggaattgtaaactagcgctcgcataacaataagcagagaatataagatgaatgagaaaaattccatgcagtcggcagtagtgaattatagttaccaggcgaaccattaaataaatcaacctacactacacct

SEQ ID NO: 416530 - DNA, 233 bp, Homo Sapiens
ctggattacttaatgggatgactacaaccaagtattggtgaaactggctcgaaaggtaatttcagcatctgatctctgctgtcactgtagctcattttggtgttgagtaagaagacactaagagcttgatgcaataatccattcccaatgttttcattctcgtgacaattcttcttggtctcagttccaatattattgtcattttcatcaataagaatacacttctctgtggt

SEQ ID NO: 416531 - DNA, 894 bp, Homo Sapiens
aaggataagaagtattgaacattttggcaccctgtataaatcaagctctttacctacattttcccattggttcttcataaccctgtggaataggtgttattaatttcattatttttatttactcatataaaaaccttggagtttttcttgcttcatctctttctctccaaacttcgttaaagagatcagcatatcccttggcactgtctttacttttctcgtttgtttttaaatttttaaaattaaggtaaaatatgcataaaaatttaccatgtttaccatttttaaatgtacaattcagtggtgattaatgaatttatattattttttcccttcattctcccacatcctctgccctttctggcccctgacaatcaccaacccaccctctagcttcatgagattgtttttatagcccacatatgagtaagaacatgtaatatttgtcttcctgtgcttggcttattttataatacttaatgacctttagtttcatccatgttgctgcaaatgacaggatttcatttgttttcacgacaataatattccattttgtatatataccacattttcttcatctgttcatttgttgatgagcacttaggtttattctgtatttttgagtattgcaaataacactctaataaacatggaagtgtagattgaggagatatgtggcaccttctttgaaacagctcagattccatccccttctcaccatctacaagtcttcaaacatgacccaagccaccatcatttctctttaaaataataactagttttgtatggctcctagtttgcttttcctcagtcaatttttctattaaaaagttgggatcctggtgaataaatgttcagattgtggacatttccaataattggcttaactcacag

SEQ ID NO: 416532 - DNA, 967 bp, Homo Sapiens
  misc_feature (647)..(767): n is a, c, g, or t
ccggaattctccggatggcgaagagctcagggaggctagagaaagacccacccattgcagtgacatttaatcaaaagttcaggccgctgtttgttggtcacaaaggatcttctccagcattcccattagctctcaagttttcccctttagggaaaaaaaagctccccttatcccatgatcctgtacctgcctaatcctgtcacagccatcagcagagtgcaaggcagattaatccaaagagagtaacagttaacatcccatagtgtcaaatcaattttttagccgacagggactttattgagaggatcctctaaccccctaaatcttaggaaggtctgtaaccttcctaagttgggcctcaaacccaagtttggtcaagtgtcattgccttttaagaggggcctttaaccctgtctatctctagagaaagtgctttaaccctctctgtttctaggagaggctctaactcccctaaattgggcctctaactcaatcccatcctttactggataccccaccacttacccaaagtcagtcaattgttgctgcagtctatttccttttgggtcgggggtctcctcagtatcatccccctcatggttcgccaggaagatgttactagaaaaggggtccggatccaaaccccnnnnnnnnnnnnnnnnnnnnnnnnnnnnnnnnnnnnnnnnnnnnnnnnnnnnnnnnnnnnnnnnnnnnnnnnnnnnnnnnnnnnnnnnnnnnnnnnnnnnnnnnnnnnnnnnnnnnnnnnnaaagctccatggaatgttggtttcccctggcttgctgcattttaaaggatcctttccggatttgtttaccctttgggaggtatgattcattaaatgtccttgagggtatccttcctttaggaaaaaacctggctttggggttccaaaaacttttcttggtactgtgaaaattgggaattctttccccaaagttgtggggg

SEQ ID NO: 416533 - DNA, 974 bp, Homo Sapiens
  misc_feature (75)..(111): n is a, c, g, or t
  misc_feature (114)..(207): n is a, c, g, or t
  misc_feature (394)..(448): n is a, c, g, or t
tgctttgttgcctagaaatattcatcattgtaccattataggtatattatgaagttctctcttgtctctcctccnnnnnnnnnnnnnnnnnnnnnnnnnnnnnnnnnnnnnaannnnnnnnnnnnnnnnnnnnnnnnnnnnnnnnnnnnnnnnnnnnnnnnnnnnnnnnnnnnnnnnnnnnnnnnnnnnnnnnnnnnnnnnnnnnnngtgtgagccagggcacctggccctctttgtattttaaagtgtgtggaataaagctgccaaattatctttgaaggaacagccatattagcgtcagtaattatttagttgtgttttgtgtgattttggcaacagtaaaggcagccacacattcttctaaattttgagaatcctgaaacttccaagaacnnnnnnnnnnnnnnnnnnnnnnnnnnnnnnnnnnnnnnnnnnnnnnnnnnnnnnnttagtcatgtgagctagataatataacttaaactttttaatctccttttgtctttaacccaagggaagagatggctgtttagtggaaaaatacaaatctggggggaacaaattccttctttgggccaatgagaaaatttgctggttccggaaaaaactctcttaacccttctgaaacaaggcctttcaagaaatggggaattcccagaaagcttattgtcccaattcaattccaaaaatcctccctgaaagggtaccacaaagtcgacgtaaaaactacctgaaagacattctcaatttggtttttagaaaacaatgtctaagggcccctgggggaaacccctgggattatctcctcataaacaaacttccccgggctaaatattggtggcagacccgcgcttttaatattgacaagaaacccctttaagaatacccaccaaaaaggccatctcttacacttaagtttttttggggacttctctcctcttgtcaataacaaagaacttttttattttctgcggcgg

SEQ ID NO: 416534 - DNA, 907 bp, Homo Sapiens
  misc_feature (307)..(607): n is a, c, g, or t
ttatcttaactctgggatcttttctaaagaatcattcttgtcagactgagaggcactttgtgttggaaaacattgcactatataccaatgaaaattgcatgttgtaaaaagatgtgtattttgttctatgtaagttaactttgttaatatgcaaggaaggaaggatctaaagaagtatctgtcactcctttgactataacagttgattcagttgatctggttatttagaaagatgctggtccgtgcttcatagctcctcaggcctccttcctgatagcacaaagttgggcaaagagaggaccatctnnnnnnnnnnnnnnnnnnnnnnnnnnnnnnnnnnnnnnnnnnnnnnnnnnnnnnnnnnnnnnnnnnnnnnnnnnnnnnnnnnnnnnnnnnnnnnnnnnnnnnnnnnnnnnnnnnnnnnnnnnnnnnnnnnnnnnnnnnnnnnnnnnnnnnnnnnnnnnnnnnnnnnnnnnnnnnnnnnnnnnnnnnnnnnnnnnnnnnnnnnnnnnnnnnnnnnnnnnnnnnnnnnnnnnnnnnnnnnnnnnnnnnnnnnnnnnnnnnnnnnnnnnnnnnnnnnnnnnnnnnnnnnnnnnnnnnnnnnnnnataagtaaataaaaggaccttcttagagagaaaaactagccctcaataaagttaatcagttttagctagagcaaaccagctaacattaagaagttggtctctggctatagctgagatgtagatgacacctagacagcaggggtggggaatggtttgagtgtgaccctcatctgctcttcacttaatttaccccatggtgtcagtaccccagaggtctagctcccagttaataccctttatctagtccatgggaagcataagtcccaaaactggtactcctctaaaatttggctatgattt

SEQ ID NO: 416535 - DNA, 917 bp, Homo Sapiens
  misc_feature (72)..(172): n is a, c, g, or t
  misc_feature (385)..(674): n is a, c, g, or t
  misc_feature (686)..(686): n is a, c, g, or t
  misc_feature (721)..(721): n is a, c, g, or t
  misc_feature (762)..(776): n is a, c, g, or t
  misc_feature (794)..(862): n is a, c, g, or t
tgggctctgtggtataaactttgtagcacctagggaaggagtccagtctccaaattagaggagggttggatnnnnnnnnnnnnnnnnnnnnnnnnnnnnnnnnnnnnnnnnnnnnnnnnnnnnnnnnnnnnnnnnnnnnnnnnnnnnnnnnnnnnnnnnnnnnnnnnnnnnntctagagaggacaggatggagcatgatcttgcatggcctatgggctattaatttctccctttgccatcctcttccaggtttttctttaacctactcatgggagagacaatgaaagatttctggttatttaaaggctgactggttaatattgccggaaattctttagaaggagcagaaggcaagatgcagacagtgattaaaatcctctgcgtnnnnnnnnnnnnnnnnnnnnnnnnnnnnnnnnnnnnnnnnnnnnnnnnnnnnnnnnnnnnnnnnnnnnnnnnnnnnnnnnnnnnnnnnnnnnnnnnnnnnnnnnnnnnnnnnnnnnnnnnnnnnnnnnnnnnnnnnnnnnnnnnnnnnnnnnnnnnnnnnnnnnnnnnnnnnnnnnnnnnnnnnnnnnnnnnnnnnnnnnnnnnnnnnnnnnnnnnnnnnnnnnnnnnnnnnnnnnnnnnnnnnnnnnnnnnnnnnnnnnnnnnnnnnnnnnnnnnnnnnnnnnnnnnnncaaaatacaccnttctgtgttttaccagatgtgagagcttgcggcanggcggaagggtgagtggtgagggacacatgggttcacaacnnnnnnnnnnnnnnnaagaatttatcgttgcannnnnnnnnnnnnnnnnnnnnnnnnnnnnnnnnnnnnnnnnnnnnnnnnnnnnnnnnnnnnnnnnnnnntaagccaaggagtttggagacagccctgggcccaatgtgggtgaaaacccccgtc

SEQ ID NO: 416536 - DNA, 423 bp, Homo Sapiens
actctttatctctcatttgttcttctagaaatccatctgttcctcctatagaggccttttcccccactgcctcttttccctactaagctgggcatataagtttctagctttaactacttactgagtttcttctttttcaagctcctatatgcatataaataaggtccccctgcccacctgttaatctgtcttttatcagcttaatttgcaggcccccaggtactgaacttaagaggacagaggaaaagtttttcctccctgacactgagcaaccagaggctgctgttaagtaaccttccctcatttctacgtctgtcctctgccccttccagcccctcaacccacattgtctctcatgttcctattcacctaaaagaggaaaatcatattatttcaataaacctctgccttatagtttgtaaa

SEQ ID NO: 416537 - DNA, 586 bp, Homo Sapiens
gatgcagagagcccacagggtttctgccgtggcctcctctacccctgtatttcatgctgctctctaaattgactcagctccaggtaaggtcaaatccttcttccacgatctggaacttcaggttcccctgtgtgtgtttgggggtggaccatcctcctttcccactttcacaatttgggcactcacagtatttggactgtctcccagtggatcgtaggagcaatccacttccttcagagggtctgtggattctctcggctttgctggtatattcctgcagtagttcttggagcaaaagttcaacagtgcaagtctccacacacactgctctgtctgtccaagtgggaactgcaatttagtcccgcctcctatctgccattttcgagtgtgactagatagaatgttataagttggaaatggaggcttggatgaaaattaagtctgatttttaactcatgaactaaaatacaagtttatatatttgaataagcagcctatgaaaacatggaaaatgtatttttttcaatagcatcctatttaagggaaagagaatgtcataactgttggcagagtgtaaatacactat

SEQ ID NO: 416538 - DNA, 713 bp, Homo Sapiens
  misc_feature (540)..(540): n is a, c, g, or t
  misc_feature (681)..(681): n is a, c, g, or t
aaagaaaatgaaattgtatgattatctttaggtttttgggtacaaatgtagatcctcaaaaactttatcagaaatttggaaatctgtaaataagttatatgtatctccttttaaaatccaatattagtaagctatatgtataaaaacaaagctagtgtatcttgaaaagtttttatttctttattccttatccctccttatcccactgaactattgaagaacttcttatagatttaccttcccattagtgctgtagtacagttttcttttatctccattgtcttgtgtttcctggctaaattttacttgttataaaactattgggtcacttttggtctagaatagaactttcatagtataagggacaccataaaatgtaaaggaatgtctgcattgccctgttttctcttggtagaaaattcatgttctggctccttttttagtgcccctcttctttggaggaagaatttctaaaggcacacattcttgaactaaaaagaaatgatgatgtatattaggtttgccttttgggcacatatngaaaaatgaggttattcacaccttcagttctggcatatatccattaccaaaaatgtatttccagaatattctccctgttccatagtaaagtcacagaaggtggtttgggggttctttcagctaggttcgtagtgcccaggnaacggatccgatcagaaatcagtatggtggtt

SEQ ID NO: 416539 - DNA, 382 bp, Homo Sapiens
tccggaattctcgggatgtgggaattaaggtgtgaagaattgttgagacttgggtatattatgatttgatcatggcagttcattgattatacaaatgaaccacactaaaacgtggagaggctgtatgtgggggtggggagtgggtgtgtggagactcaaagtctgttaaggaaaaataaataggcaaaacttttttttacaatgttagatgtaactattattcaattggaaaggtgaatacaaagaccttgatggctttagaataaataattaacattttattttgaaaaaatagtcagaattaaagggttgagtgttaaaaagtgatatctcttatgtccctaatgtcgagaacaattctttttggctttttgggaatcag

SEQ ID NO: 416540 - DNA, 506 bp, Homo Sapiens
acagctagcatatatgggataataaattttacagacactcaagttcatttgaatttttggcttttaatcatggatttaacctgcctttattgagtgcctaaaatgcaccatgctgagtgagcaaaacttgttgcattaatttacttatttacttgttagcctttacctatgtgtttttcactttccttgataatattatgtgagtgaccaataagagaggcagatgtccaaggattttggaagttcaagatggaataatggcagcaatgcaaacagaagccatagagaaggcaatgggctgagtgtggacaggaaaggctggggcacgtggagaagatggagatggtgctgccgcaggtcacgtggcttactcctgttacaaatttgaaaacgtccaactggaatgcacattaattcttatatgcaggaacaaaatgttcaaggcatttaaaaaaattggagctctcctgggaagaataggagatgacaagacacagcaaactggg

SEQ ID NO: 416541 - DNA, 984 bp, Homo Sapiens
aaaaccttgaggctttcaaactgcaccatctttctcaaggtatatggttttgttctataaaaggccttggattacttttggaagaagccaagatataaagcatatagcagtaaagtgcagatgatatctaaatagaggatgcagtggattctggctatgaaacaaaattgatgaaggtgacctcattgtgacctggctcagaggaaggacagtgcctcttttgttgggaagcctgaaacaggtgtgttccatagttttcagccctttgaccagctgagcagaaaagagcagctgagggatgctagttttcaactcttggaacgcactctcctaagggtgcattaggaggaagtggtggtcaggaaggtgtgaagacatgagtatgcacatgtgaatgcatgcatatgccagctacttcctgatcttgaatcaggtgggtggggctggcttacccgagggggcatcagcaaagctccagtggtgatgcctgtcccaaaagtctgggagacctaggtaggaaaaaacacaagcaatgacctgcctttggggccagagaccagcgggtcagggttgccagagacctgatttctgattctatttgtgtgctgcttgcatcttctgtaatccttacccccccttttttctcctaaactatttagtaaatttcttttcatcagccaaatatcgggaaatgataagattgaccataacagaaactaaagtgggcgaagcctttttgctcaatgggtttgtcacttgaaggtgagggttggtatcccctggaagcaactcgtgcttttgccaaaactggaggagggaaggtttctccaactttttgcccagggtttgggcatggggaacgggcatcccccctgaaaaattgcaaggtggttgggaaacaaggggggaacccccccgggaggaaatcccctctcttttggtttttttgaagaaaacaacccctccccggagacgtggaggggg

SEQ ID NO: 416542 - DNA, 496 bp, Homo Sapiens
  misc_feature (406)..(441): n is a, c, g, or t
ttaaatcttaagcctaagcattccatgataaacagattccatgtctcatgtttgggaggcaagggcttagcttccttaaaatctaataggacgagaggctatttacaatctgctgagaatttccacactctacggaataggtcatgtgccccatctgtataattaccacggcagaatatttagactggagagagagcatatatccaaagcaaacgttacccacatctaacaaagagttgtcaaacgctgaacaggaaggctgacaacaaatgtaccctcatttggtactttaaaggctatgaaaagaaacagtgacaacatatatcactaatgatttcattctcttcccagtttctgcccaaacggggttctaaaaccatacttattcttccaaccaaaacaattnnnnnnnnnnnnnnnnnnnnnnnnnnnnnnnnnnnncagattcttttaggtcaatgcaggttgctaaaatacagtggtataattagtggag

SEQ ID NO: 416543 - DNA, 368 bp, Homo Sapiens
caatctaataatcctatttctgtatagttaactttagcctaaagctgcttccttgtaagttcagcctaaaggttgatccatacatagtgaactgtaatctaactggatgtgtaaacagactgtaacctactcttataacaagtagccaagtctcagccaatcagaagacatactactcacaggtggccaactgttcggtgttcaaataagtctgtaacccagctgtaaccaatctggctatttctgtatttcacttccattttatttatgtcattttccttttcctgtccctaaatcctctccaaccccactggcagcactgaagtctctttgaagctattctgatttggggggctccctgatgatct

SEQ ID NO: 416544 - DNA, 660 bp, Homo Sapiens
ggtgatagcatctggatcatccattcctacctaggtggttttggctcatagtaaaagggacctcagcacctatccgctgctcagcctcggagctgcaggtgtcagggatatcatgcactgtccaaaaagacatgcaaaacttaacacccgtgcattttcatggagagaccccgtggagcctctgaccagaggctgaaagaaatgtgtcattcaaaagaccagggaaccactgccaaggacccctacattcagcaacacatctatactcgtgcctgccacgtgtccgcacttagaggccattgtctcacctcagggtcaggagtgccaggtgaaagagcacacaggtctctgggcaaggcagagtttgaagctaggtctggaccaacgtctgagagtatgacttcaccccaggcgaggaagttcactttgagctcctggccagggagaaagcaagctctgggagacctaaactctgaatctcacttggcttttcagtctaatccgttgttgccaaagacatacttggcaatcccgaatcctcagagggctccatacgtgttgcattcacagaattccgtggacccaaaaatcagtcttggaataggctgggatatggacaggacacccaggttctgcccctacacctatcccccacctggc

SEQ ID NO: 416545 - DNA, 935 bp, Homo Sapiens
  misc_feature (564)..(622): n is a, c, g, or t
  misc_feature (629)..(629): n is a, c, g, or t
  misc_feature (709)..(709): n is a, c, g, or t
  misc_feature (884)..(884): n is a, c, g, or t
atagtaaattcattgtattgatgcaaataattaggcaaacatttgtgcatatataggctggtacccctggattagagtggtatctttagatatttaactcaacttagataatagacataagttagatagtggtgcaggcctttattagtctgttctcatattgctgtaaagaaattcctgaaactgggtaatttatgaacaagagttttaattggctcatggctctgcaggttgtgtaggaagcatgatgctggcatccgctcagcttctgaggaagcctcaggaaacttacaattatgacagatgatgaagggaaagcaggcacatcttacatagctaaagcaggagcacgagaggggagaaggtgtcacacacttttaaacaaccagatctcacgacaactcactatcacagtgacagcattgcgggagtcgggggagggtgctaaaccatgagagaaccacccccatgatccattgacctcccatcaggtcccacctccaacattggggattagaattgaacatgagattttggtgaggacgcagatccaaaccatatcannnnnnnnnnnnnnnnnnnnnnnnnnnnnnnnnnnnnnnnnnnnnnnnnnnnnnnnnnntttttangccaaactgagcaacacagcaagaccccttctctaaacaaacaaaaaagataccgaggggaaaaagattgtgtaattgcntaaatatcagagtactgttaaatatttaaatatatacatgaaagcagttattttggctgtcagtttacttaaccacagaaaatcacttgaaatgatgactggagaaaacatccaaagtgtgctaaccaatagcacttttttgtgatgatgaaaaaaattccgtatctgggtcccntccaagacagccacttacccacatgtgggttaagaaagtctttttaaaaaa

SEQ ID NO: 416546 - DNA, 993 bp, Homo Sapiens
  misc_feature (81)..(333): n is a, c, g, or t
aagaatggcatctcaagaatggcatctcaatgcaagccccattcagagctctcctgcacactcctatcgctgtggaaaggnnnnnnnnnnnnnnnnnnnnnnnnnnnnnnnnnnnnnnnnnnnnnnnnnnnnnnnnnnnnnnnnnnnnnnnnnnnnnnnnnnnnnnnnnnnnnnnnnnnnnnnnnnnnnnnnnnnnnnnnnnnnnnnnnnnnnnnnnnnnnnnnnnnnnnnnnnnnnnnnnnnnnnnnnnnnnnnnnnnnnnnnnnnnnnnnnnnnnnnnnnnnnnnnnnnnnnnnnnnnnnnnnnnnnnnnnnnnnnnnnnnnnnnnnnnnngttattattaccaccatatgaaactgttgctatggagagtcactgggtattttggagcccagtgtgacataagaacttggttgaagccaagagtccctggtcacccaggccagaggagttgctatcactccactttccacttcctttattatagttgagcgcttttgagatagagttgcttctcggacatgaaagcagccaaagtccctgggaaccttcattgtttgcagcgtcccttctacccacactttgagcatctctgtgactgtatcctgtttttgtaaatggagatataattcaaggaccataaaattcatccctttaaagtgtgtaatttggtggtttttagtgtatttacaaagttttgcaaccatcacccttatctaattctagaatacgtctatcacgcccccaaaagccctgagctcatcagcagtcggtctccattcttccccgatgccgacaactgcgaacctggctgtcctgatttgcccaatctggacaatttcatattaaaataatggatatactaatgggggccttccgtgttctgggcttaattttaaccctaaaagttttcaagggttcatcccatggtcgaaaccatgggggtcaaaaaactggcatttccgttttccccgggcttaaaaaaatggccca

SEQ ID NO: 416547 - DNA, 767 bp, Homo Sapiens
  misc_feature (503)..(518): n is a, c, g, or t
gctggaccggtccggattctcgggaatttaaatatggcagagagtgaaggggatggagttaacatcaaggcaaagacctcattatttcaacatgtgaggtgggttgacttaaagcaaaactgcctaatgtcaatttcaaccttcatcagaatataaggtcaaatacaagttcaattcaatgagggaaaagtctctttcaaatctaaccctcactctcctgcaaagccaaggtggagattaactgattttactttagccatactatcgtaaatgtctgctacagtttcttactaaaaacaatgaaagtgactaaatcttgcgaagtctactagcatattaacatttctatgtggcatcaggtaataatataagtgctttaaaaaataaatttcacggggttccctctctcggctttggagccccctgccccgtctctgtacaggggagcttcttctttctttcttcccccttttttcttgcctattaaactctctgctccgttnnnnnnnnnnnnnnnnttcacagtaaatctgtaaagaaacccttacctatgctccagatcacaacaaacacaaaattatcaacacactaaccacaatcttgcatgtagcttccctttcctttgccattagtttaacaatattggtaaaatgttctagcagtttattgttactcctacttggctttacaatgaactgagcttcctagatgaaagatggtctagaagagaacttatttccctaccaaagaaaaacaaaatgcctgtt

SEQ ID NO: 416548 - DNA, 367 bp, Homo Sapiens
  misc_feature (200)..(200): n is a, c, g, or t
  misc_feature (251)..(251): n is a, c, g, or t
  misc_feature (284)..(284): n is a, c, g, or t
tgctgagatcgttcccagggcacatccaccctggggacaacatagtaagaccactgggctccgagtagacaaagcaaaattcccctcaatcagtgtgaaaaggggattaggaggggggggtttcccgtcggagaagggtgggttcgccgactatgaagaatttttgcgaccttggggaaatcagcgggaatacacgtctngatatcgctatgccaaggaattaaataagggggtcaaaaatcttactgggntttcgtggcagaacctgtaggggggtgtggagntgaaaaacctctatcccttccaaagtggtgggggccatatttcccacccctttaaattcggcgcacaaggggataattttttt

SEQ ID NO: 416549 - DNA, 527 bp, Homo Sapiens
tccttgattcagagtcttttgtggccattgatcaatcacgtaaaacatcacataaaacatcactctgtgattttctcatatgtagaattcttctggtccaggagcagggcttatgtttgaaaattactttaaattgctgtcactttgcattaatgttataagactctagttacagtatttctttccttacttgcaaactttacaaacctcatttcgcagccaaacatctatatttatgtgaaaaagtttatgtgaagaaagtttaaaaacaataacactacaaaatacattttgaagttttaagatgctctgggcttacttttccagttgctgtttgtcatcatgaatacctcagtctaggtactaaatgccagttctaagtgcacagctgcaaatgtctaacccaccagtttagctacttagcaggttggagggctgcgagacgtcaccagctaccttgtggattaaaagtttactgtagttgccctatccctgtgtcccagggaagaacaaatgtctgggtaggg

SEQ ID NO: 416550 - DNA, 375 bp, Homo Sapiens
caagacttaatatggcacttatatgaattcagcccaaactgacctctgaagacaatatgatttaattccaaatacaaatgagcattttatcttttcaactttcaaaaaaatattgcaaaatttacgaggaaggtttcattcatgaatggacagggaaatagtgaaaagaagtcaaccgaggagatgtttgccccagcagatatgaaaacatgttaggaagctatcatatacgaaagagcgctggtggcgccaaactggagcacccagggaaggtggagccaggcctgcgtgcgacactcgttggtgaccagggcactgctccgggtggtgagtaaagatggttttgttccaatgccattgaatcaaaatgaacag

SEQ ID NO: 416551 - DNA, 176 bp, Homo Sapiens
ctatagttatttctaaaaccaatttccatcccagaatgaaaaacatttcagaagttattcagcctaaacttttagaagaaaatgttcaagaggttttactactaagccttatagttacaaaagtaactttgctttttagtgtaatttaagaaaaattccaattaaaccatgacaac

SEQ ID NO: 416552 - DNA, 1263 bp, Homo Sapiens
  misc_feature (70)..(344): n is a, c, g, or t
ctggtacccggtcggaatttctgggatcaggacttcaattattatattttatgtcataacgatttatgtnnnnnnnnnnnnnnnnnnnnnnnnnnnnnnnnnnnnnnnnnnnnnnnnnnnnnnnnnnnnnnnnnnnnnnnnnnnnnnnnnnnnnnnnnnnnnnnnnnnnnnnnnnnnnnnnnnnnnnnnnnnnnnnnnnnnnnnnnnnnnnnnnnnnnnnnnnnnnnnnnnnnnnnnnnnnnnnnnnnnnnnnnnnnnnnnnnnnnnnnnnnnnnnnnnnnnnnnnnnnnnnnnnnnnnnnnnnnnnnnnnnnnnnnnnnnnnnnnnnnnnnnnnnnnnnnnnntataaagatacaaaatcgacatataaatgaggcttggagctacttgtgtgaaagccgcgtacgaaaccaggcccatcaactctgtgcggtgagcgtgggatgtagagagaagaagttaacaaagccaatcgttggagtgacggaacaccgaggcgcgggtgtcgtcccagggcaccaggcagtcagtcgcggttagcccccagattccactactagatgttatatgagaataaccgtatcacacgtggtcgagacccgaatagacaaaactgcatgtccaagttcgcacgtgacggggagtgtgtacaacacgtgccgccgaagggtggtccgaattattgcaactcgttttataaataatctgacacgccagaggtggggactcagacaagcggatcctgctcattactaataaaacaccggccgagaaaacgtatgattgtacgcgtctacccgacaccgactccccattaaaacagctgcgcggaacatactcatacctatacggaccagaagacataatatccgcggtgccaaaatgtggccgcggtgcggtgagacggaagtgggcgcgaggcgatcgcaagatgcgcagactcgcaagcgcggagtaagtcgagtgaaaaagaggtaaccagtgacgatttccgctataggaacactggcgtccaacagaaccaatatgatcaactggcgtagcacgacgcgatgagtcaccacccgattcgcattatctcacgcactccagtgacggagataggaggatagatagacatgcgcgcgactgagcacctagagagtcatctcctttacacaaccactctcccccatcaggattgctcggtccgcgcgcaccgtcggtggcgtagggactaggggtcggccgactcaatactccaatagcacagactgatatcct

SEQ ID NO: 416553 - DNA, 441 bp, Homo Sapiens
  misc_feature (59)..(352): n is a, c, g, or t
taaattaatcacaagcaatatttcaaatagcgagacttctaaactacttaagaaatttnnnnnnnnnnnnnnnnnnnnnnnnnnnnnnnnnnnnnnnnnnnnnnnnnnnnnnnnnnnnnnnnnnnnnnnnnnnnnnnnnnnnnnnnnnnnnnnnnnnnnnnnnnnnnnnnnnnnnnnnnnnnnnnnnnnnnnnnnnnnnnnnnnnnnnnnnnnnnnnnnnnnnnnnnnnnnnnnnnnnnnnnnnnnnnnnnnnnnnnnnnnnnnnnnnnnnnnnnnnnnnnnnnnnnnnnnnnnnnnnnnnnnnnnnnnnnnnnnnnnnnnnnnnnnnnnnnnnnnnnnnnnnnnnnnnnnngaaatttagtttacacattacctttttggaatgtatatatctattgtttatgctgaagtgcatgaccagtgatatgtaggtattgctag

SEQ ID NO: 416554 - DNA, 985 bp, Homo Sapiens
  misc_feature (333)..(827): n is a, c, g, or t
aaacattagccatcctaatcacatgcctttgctccctccactccactcacacaagtatttggtaattacatccttcctctccctaggggcatttgcatatgttgattactctgcctgaacctgcttttccctcccatctgcacctaattaatgcttactcagccaagcattacttccccagaatcctggccaagtctaatgcccattatgtgagttgttggggcaccctgtctctctcctctatagaccttctccttttgtaagtttgtatctgtttccctaatgatttgactaaatgtctgtctggcccattagggtgaaaacttagactcnnnnnnnnnnnnnnnnnnnnnnnnnnnnnnnnnnnnnnnnnnnnnnnnnnnnnnnnnnnnnnnnnnnnnnnnnnnnnnnnnnnnnnnnnnnnnnnnnnnnnnnnnnnnnnnnnnnnnnnnnnnnnnnnnnnnnnnnnnnnnnnnnnnnnnnnnnnnnnnnnnnnnnnnnnnnnnnnnnnnnnnnnnnnnnnnnnnnnnnnnnnnnnnnnnnnnnnnnnnnnnnnnnnnnnnnnnnnnnnnnnnnnnnnnnnnnnnnnnnnnnnnnnnnnnnnnnnnnnnnnnnnnnnnnnnnnnnnnnnnnnnnnnnnnnnnnnnnnnnnnnnnnnnnnnnnnnnnnnnnnnnnnnnnnnnnnnnnnnnnnnnnnnnnnnnnnnnnnnnnnnnnnnnnnnnnnnnnnnnnnnnnnnnnnnnnnnnnnnnnnnnnnnnnnnnnnnnnnnnnnnnnnnnnnnnnnnnnnnnnnnnnnnnnnnnnnnnnnnnnnnnnnnnnnnnnnnnccccataacccatatgagggcaagaaaccctatgtatttttactcagcattgactttcctaactctatctcaaaaagaagtggcctggttatgtaatcatttccctgtaaccattaatcctttaaataaggaaaggtgattttcccaaattaacctaa

SEQ ID NO: 416555 - DNA, 466 bp, Homo Sapiens
gccatgttttctcataactctgtcacttactcacctgacaacagttaatatttcggcactacctctatgatcatctttgctattatgatattagaacataatcagtgacctctaagaatggctgttttagtagaaatgatgaaggctggtgccagatcataggaaaataaggaaagcacgaagttgaagaaatcagatatagtaagtttagacttactatgtttctaggatgttggcaataataaagaacaaagttgtatagcagctagaagagacaatatgatgtaataaaggaaaaggagtaaatttccttggaagaaggcaataaaaaggatcaagggcaaaagtaaaatggttagcattaaaaggaggaagtagattctagtatctttctatggtgacataggaggtatttccataaagcaagaagactgactttcccactgcacatttaaaatcactgtca

SEQ ID NO: 416556 - DNA, 1008 bp, Homo Sapiens
  misc_feature (65)..(128): n is a, c, g, or t
  misc_feature (555)..(594): n is a, c, g, or t
  misc_feature (680)..(680): n is a, c, g, or t
  misc_feature (849)..(869): n is a, c, g, or t
ctggtaccggtccggattctccggatctaattctaagtttgggacataactttacaagcatttcnnnnnnnnnnnnnnnnnnnnnnnnnnnnnnnnnnnnnnnnnnnnnnnnnnnnnnnnnnnnnnnntgaaaatatttatgatgaatagaattataagatatgtatgtatcttgcactgaatcataatttgaaatatttcatgaattcatttacttctattgactcccaaaattctaactgcaagctagcttcagaacctgtgagaaccccaccccacccaagcagctgcctagatttgtctactgctatcattttgtgtaaagcagttgttctaacttgaatgagtctagaattcatcattaagattgtgatatttatagagcatccaatgtggagatcatgatactttaaatataaaaaggaaaatatgatagaactgttattgacaaatgcttataatgattgaagggaaagtatctcaacattgtatcagtcacatatatttctgttgctttcaccattttctattcctgttgtaagtttggtggtagannnnnnnnnnnnnnnnnnnnnnnnnnnnnnnnnnnnnnnnctcctggcaattgattagtgttaatcattaaatctattttgacacaaggttttatatataattagatcagttttccactttattancattaagaaatgagtaaaatatggatataaaaggagaattggattgaaaagacaaatacacatttacaaggtcatacctttggtaggacagacaattctatatagaatattctcttttgataatgaaaaaaattaaagagagcacaaacttttgactatgtcaaagtannnnnnnnnnnnnnnnnnnnngaagacaaggtcttgggctctgctacccagggctgggaaatgccaatgggtgcaattcaccaacttcactgtaagccctgaacacttcgggggcctcaaagcaaatcccttcccaaccttcaagccttcccctaagtaa

SEQ ID NO: 416557 - DNA, 421 bp, Homo Sapiens
tttatttttctttctcatttccaaatctctcaatcatgaattgaaagcattaatatctccctagaacagatgcccctgaagtccccttgcaaacataagaatttccctgaaagtgaagagggtagatataagaaaggcagtgtgttcaaacctgtggcatccattgtatcctgtttttctctcctcatatgaaaaaatttattctctttaaaaaatttcctccatagtgattatttctaagtttagtcaaattaagctgttgttttaaactctgtatttttcaaaactagtacttattcaagacagtttaatttttaatccatcagcagctttgcctatatgatgaagaacatccttaaatggtattcagtcacaggtctttatggttgccaagtatttaagatgagatggggagaagagg

SEQ ID NO: 416558 - DNA, 423 bp, Homo Sapiens
ggggcttccttcagctcatcaccactagagcattctcccatgcattcccactgatcacaaaacccacatcactacctcactgctaagaattccaggaactggccttaggagataaccaaggttgtggagtgtcccacctttggaaagaatgctgaacaattgatttacagccttgttgctgctggcaagaccaccaggttgcccaatatttaaggtaaccataataaccagataatgccaacttgcataccccacccgccgcctcccaccggctttgcccagtccaacctacacaccctacccctgatgtcagttcccatgcttgcttaaaaagaaagtccaactggcacttttcagagagttgggggaatttatctccctctctctttgctgccctcgttatgtctgggcataagctctaat

SEQ ID NO: 416559 - DNA, 932 bp, Homo Sapiens
  misc_feature (768)..(769): n is a, c, g, or t
  misc_feature (867)..(867): n is a, c, g, or t
tctctcctatagatgaggccaccgcgcatgtctgtcggtcacaaagtttatttcatacaacacagagtgctgtatatctgttagccttgccttttgtaagaactctcacatgtgaaatagtttgagatcataatttttcaatagctacctaatattttgtttgtatatatatgtaattttatctttttattgcttaggtaaactattcttttcatggcagagaggaatcttggctatcaccctgttctactcctaattacagaaggggaaatgtgtgccagaggggacatgactggcacggatccttggagaggggctggagtgagcatgtgagttcagactcctgaggtccctggacacctgctcctggtcctggtgtgtagctcatggtagatgtttgctttagtgggctcatgcatgtggagccccagttcttgcaccaggcacagaagagcctttgcacaccagctcactgggtgttccagtccagctctgggaggtgggctctgcccatctagagctgggctggcagctggtgtcactgcttaacctgctctgtcgcccagggcaggcagcttccgctctgtgctgcagtttgctgttcgtgcaacggagtgagaatgtgactttctccctggtccccatgggaacaggtggaacaaggcgtctaaagtacatggagcttcgtggaaggcaccgtggcagccaataacggggctgcatggaaggagcctctcccagccagcagggcatgtgtcttctgcaggnngaggtgcagcggccggcaggctccgggcagtgtgcctgggccccggttctgcaccccagttctccaggttcttcttgtgggtccagctccgtgctcangagcgggaggttccagaagctgaggcattttcccttgcttcgtttacaaggagtggggaaaggcc

SEQ ID NO: 416560 - DNA, 1000 bp, Homo Sapiens
  misc_feature (605)..(605): n is a, c, g, or t
  misc_feature (709)..(709): n is a, c, g, or t
ggattcacctgttagcttctgtttcccataattgtacagttatgctaaaagtgggcagtgcaattaaatctcttaatgtctgagtaaagcacaatttacacatgtagaaatttccaataaagatgactattttggttaaaaatccttttgcagatggtctcagtagcccaagttgtatctcatctacccaaattgtatctcatctaccatctgcgacaaatccaagttaaaaatctctgtttgtactctttccctctctcactggcagactgataagtatctatctctattaggtacaaaatattctgatgtcacctaataacaaaaccaaaggtctgtgatgcagcaggtatctctgggaaccagttccactgtaactgtgattcatcagacagtagccccaaggttgggatgggataggatcttggaaaaataagatcctcagaggacaaatataaaagtcttgaacttcggccgctataccatgctagaaggtggtgattctaaaagattcctgttattggattgtgcccatgtgtatctcatcagtgcagagtgcatctcaacatcagcttcctgtctaaatatacaatatggtgcatganattcagtgcactctaatttctactataacactctcacgtctatcagcatctggggtcttctctgtaatactctgggtggtgggctgtgtgagttttctgttccnatggctgatagctccctaataacttaaagatacatttggctttatattattttattccctataccatttatcatcgaaagttagattaagaaaaaaatactaccctatgataatggacaaagaagatcatttttcaaggcatcatgtgttaggatatcccaataagagctgatttatcttacatatgaacatttaccccctgaagtgtttgcctcactccccagaaggactggaaccaccggaacctggggacccaacaaaataacggaccgcccaattagttataatccc

SEQ ID NO: 416561 - DNA, 426 bp, Homo Sapiens
  misc_feature (289)..(377): n is a, c, g, or t
tcagaatttcctaactaggagagatctttactatcatctcgtcagtttaaagatgaagacactaagactgaaggagagaagtgatttgcccggaggtgcacagccacagagcagggactagaactcaactccctgttcctagtttgcctctctttccattaaatagtaatcaggtaaaataattagattataggataggctgatactggatgagtacttgattttattcctccaggtaatagaattcattaatccacttcaaaagcacacatcatcaaaaaggaattgnnnnnnnnnnnnnnnnnnnnnnnnnnnnnnnnnnnnnnnnnnnnnnnnnnnnnnnnnnnnnnnnnnnnnnnnnnnnnnnnnnnnnnnnnataaggggggccacaaaaggtttttctaaaaaaacccctttttaaaacc

SEQ ID NO: 416562 - DNA, 847 bp, Homo Sapiens
aactatcggctcacaatacaccccacactgagacatttatgctctagctgccagctgtgcacagaaaggccataaaaggcccaagtttattaacccgacggaacatcttcagatcatatcgattctctggccctcatgcatgtgtgggtattttttaaacaacttaacgaccgatttcatctggattcactctggcacaatgggattaatatgtaatgagatagaggatgttttggccatctgcaaaggaaggtcatttcccaccaatcagagcaggcctcataatcccaaggcagcaaaaactctctgatgctgggaagaaaaaagaaagctgacctggcatgataaattgggctgccttggcctggctgccaagcatccctcacatttctcttcaataccactctgtaatcagaccatggtggactggatccattcccccacagttccctggccctgacatcttaagcgaggccattcccttcatggggaatgctggcaaatcctaacattctcgtccatcttaaaactggagacttttcttgaaaacaacaatctcccccccttcattatcttgggcaggtgagcagggaggaatgactgctgtttgcatggagcagcagtgcattagctactttcaaaacatctgactgatcccagattacacgagacaaaggcctggatcctttgcctttagacaggtgcataatagtgtgaattttctgaaactaccgctttgggaagaaactaaaactgcatgtgaacttcaatgctacaacagtatactcagcacagaacaatccttacagaaataaaagcattttcgtaaagttcagtttaaacaggg

SEQ ID NO: 416563 - DNA, 122 bp, Homo Sapiens
tgacagctaccattctactccaagtctttgttacttctctcttccttgaaatatgtcactctcctatcaagtcttcttgtttctcttcctgagggttcatactctgcacagcagtccaagtg

SEQ ID NO: 416564 - DNA, 658 bp, Homo Sapiens
  misc_feature (371)..(379): n is a, c, g, or t
  misc_feature (562)..(562): n is a, c, g, or t
atacttaaagactaatatatatgctctgttttcctttagagtacttgactctacacatttcctatagctttgaagacttgtcttccttgaagcagactaaaagggggacagatgggaggatgggaagaaccacacttccataatcttagaattattccttccttgctatgctgacaaagtgagaaaacaaatataaattatcttaaagcccagcatttaagacacaagttggtaattacctaggcttgaaactttctaatttcactggtttttttgtttgcttgctctttatttttctctggcttaaaatcagtggttagggtgaatagcacaggtcttgggggtggtatctatttctctaggtcacaaannnnnnnnnaaactatttcaaggcaacttatttctagttttcagtagtaaattgtttaaatttcaagaaaaatggtacagtgaagttagatttgaacaatttaagaaaagctaaagaatatgtagtttaaaatcttagagaaggcttaaagatggggattatgtcttgagaatctgcagtttacccagaaanaaaggatttaaaattgcaatcaaggagaagttttagggttagggcattttgaatttgaattctaattggtaggaaaaaggtccattagacctggaa

SEQ ID NO: 416565 - DNA, 750 bp, Homo Sapiens
aaaagtaaatcaggcaaatgtatactagttttcctaaagattcttgaacaaacttttgtacaaaccagtgccaaaagctgcactaaaagtagaggaaaaagagttattctggatgtgtttagcacctataaaatactcaagtaaattgtgactattactttcagtcaaatagatgatcaaagacatcctctccttttgatcctagttgttcagatttctactgccttcctcatcggtagaattcactaggtctatagataaaatctgcaaaaacctcagctatcaacaggcaactccacagccttttaacaatattgctgtaccttattttagcaccttatatttccctgtcactttacaccatgacattcctgcattgaaatcattatgtaaaatgaaatgtgaagggaagcagttgtcaactttagaaagatctgagcatttacacacctggccctttccagtgggcagttcaaaggcaaagcaatctagtcacagagggaggagagttaaactgaaactatgactacacagtgtctttattactttgaagaccaaagggtgtttgatccttgtttctataccagcttcttggtaacactgtataaagtgcactgatgcatctccagcatctacgttagcatttaatttcttgctcatcctacttttcccaaacaatccttgaggaagggtaaaataaaagaaaataattggaatttaaataaaaggcaaagtgacacaccctggggg

SEQ ID NO: 416566 - DNA, 414 bp, Homo Sapiens
  misc_feature (173)..(216): n is a, c, g, or t
ggaaggagagccttatcatgctgccctctcctctctttgttcactgcacactcgtcactatcttcttctctcccagttcttcaaactgctcaagacttttctgcctcaggacctttgcacacactgctccatttgcttggaatcttctttccacgcttgttccaaaactagcnnnnnnnnnnnnnnnnnnnnnnnnnnnnnnnnnnnnnnnnnnnnaaaatagagacaaggttttgccatgttgcccaggctagcctcaagctcctgggctcaagcaatccacccacctccacttcccaaagtgccgagattatagggatgagccacagcctttttcatctcttagagcccaaattaaacaatacttttatagggaggccttccctgactcctttatttaaaatagcctgcctc

SEQ ID NO: 416567 - DNA, 599 bp, Homo Sapiens
  misc_feature (11)..(11): n is a, c, g, or t
gctgggtaccnggtccgggaattcccgcggatcaaactcaatagaaagactcaggacacaactggtccttgcccaaccccattgcttgtgaatacctcaactggttagaaaactgtcccaattattcaccctagacatccttcacaacaagactcagacatttcttctttaatgaagcctcccattcccccggcctcaacctgcagaataatttgtcctgctcgccgcattcccataatacagttttcatatatttaactcattacctactgtaaggtaacagaatttaattactggctattccatcttgcttacttaataataatctcatccagagtagggattgggtcttactcattattgtatcattgtctcatccaatattagttgctcatccaccatatgctaatgcttcactcagtgcctggcatatttgattaatgattgaggaggaaaattatcatagcaccatgaatcactttttaaggactgaaaactgattgcttataaggccttataagagaattaatagcaaaggctgacaggtctctaggaatagaagtcaaaggacatgagagaagacaagatatagaaattag

SEQ ID NO: 416568 - DNA, 931 bp, Homo Sapiens
  misc_feature (317)..(837): n is a, c, g, or t
  misc_feature (899)..(899): n is a, c, g, or t
gctggtaccggtccggaatctccggatcagggtggaacgccttgctcatttatcatcatagctgaattcttattagagcaccagctaattcatgcttattaagtagaaaagcaatggcaactaggcttgatgcctaagtaggattcaagcctgtatctaaagtgacaaaaaacttataacgctgtttcagatcaactatagagtggcaggaataaataccattgtatatgctcactgtaaagctagattatgtttccagtgtagtcacaccaagtaggagcacataccgtccatctcagcactttgtcctctagacnnnnnnnnnnnnnnnnnnnnnnnnnnnnnnnnnnnnnnnnnnnnnnnnnnnnnnnnnnnnnnnnnnnnnnnnnnnnnnnnnnnnnnnnnnnnnnnnnnnnnnnnnnnnnnnnnnnnnnnnnnnnnnnnnnnnnnnnnnnnnnnnnnnnnnnnnnnnnnnnnnnnnnnnnnnnnnnnnnnnnnnnnnnnnnnnnnnnnnnnnnnnnnnnnnnnnnnnnnnnnnnnnnnnnnnnnnnnnnnnnnnnnnnnnnnnnnnnnnnnnnnnnnnnnnnnnnnnnnnnnnnnnnnnnnnnnnnnnnnnnnnnnnnnnnnnnnnnnnnnnnnnnnnnnnnnnnnnnnnnnnnnnnnnnnnnnnnnnnnnnnnnnnnnnnnnnnnnnnnnnnnnnnnnnnnnnnnnnnnnnnnnnnnnnnnnnnnnnnnnnnnnnnnnnnnnnnnnnnnnnnnnnnnnnnnnnnnnnnnnnnnnnnnnnnnnnnnnnnnnnnnnnnnnnnnnnnnnnnnnnnnnnnnnnnnnnnnnnnnnncactgcctcctagatgaattccactgggggaaccatacgggttggcaagttggacacctggntagggggtccttaacccagggttccttgggtt

SEQ ID NO: 416569 - DNA, 138 bp, Homo Sapiens
cttacttaaaacaatcctttaacactttaatctaggctgaagaaattccacattcccatgccttcttgtaatctttttttaccaaaaactcatttcacttttcttatacatcttgcatgtaaaactgtttcttcagta

SEQ ID NO: 416570 - DNA, 893 bp, Homo Sapiens
  misc_feature (827)..(827): n is a, c, g, or t
  misc_feature (858)..(858): n is a, c, g, or t
  misc_feature (865)..(865): n is a, c, g, or t
acctggctcatgtgcctataagatgggagagggcctggcagagaatttcgctagagacgcagggagttgtatctgccatgtttttaaagagcgctttaaaaacggtatcactttcgaacgctcggctctcaataaaaaggagcactgccagtattttaattcctctctcgatacccagaaccaccaccaggctgtgtcaactcccgtcggcgtagagcagctgatgcccgcgggtggactccgggttcagggcactgggaccgctgcagagacgccgtccccggcccccacctgtagggtctgcagggagatgacctgcttcccgtggcggagggcaccttggcctccgcggccagggtgtgaggctcccgggtcagcacacggctttctcaaggaccaggcttgaggatctttcccttttctgctcttccacccgcctcccacccaccttcccagatacccgcgtcatcccccgaggcttctgaggactctgggctgtccccaaacctcaaacaaaatgtcactttaaaaactggtacaaaagcacctcttaaagattcaaacgataattcgaaaacatcgtggtggtgagggacacgtgctttcccgccggcgggggcgtggacgtcgtctttcgtgggcagccctagagaagtactcttcaaggcgagtgtgcctgaggcatgggggccgtttcccttgcagctagctcccggtctccctcctctgacccagggctccccagacattactggggctgcatctgcccgggggtgtgtggccctgtgtgctgcccaagctccaggtgacacccacgggtgggttcngtggacactcacccatgagggggaaggtgcnttgggcnttggtttgaaaaccctggaggggttaat

SEQ ID NO: 416571 - DNA, 894 bp, Homo Sapiens
  misc_feature (726)..(726): n is a, c, g, or t
  misc_feature (733)..(733): n is a, c, g, or t
  misc_feature (810)..(810): n is a, c, g, or t
  misc_feature (813)..(813): n is a, c, g, or t
gcttccacaccctcctctctgttctgctgtgctaatcactgggttatatgtagatggcaaatgtgtggctgccaggcttggaggagggactgtggaggggggtgtgcagatgagcagacaccaaagagtgaaaagacaatttaaaggcagaaagggggaaaacaagcctgcttggctttggagttacgggtgtggggttcttcccagaggcgtgaattttattaaggggatgtgatgactacgatgtcttccttcccctaatcaagtaagagtcttagaatcacaggattctaaaatcttggaattgtcgaactatagaattctagaatctcagccgaatgcaactctagacgcgtagaacctcttcaaggaccctaatcctcctgggattttagcatcttcacatgcacatgcagttcttcttgtcccccttctctttgtatagaatcatggccagaaaatgaccttgaaagttcatccagtccaccccaccctggctccgggcagggcagtggagacagaggtccagccagtgaggacattcttggaagtgttgcactggaatcttccctggctctcttgctggacaaggacttgttgcctgaagggtctggggtctcatattactctccccaccgccacctgccacagggactgagttcctggcgaagacaaaggcacctatgttcctaggatatgttcttagcagttcaggagctgacacangctgcangtgtggggaagagtaaaaggggcagggctctgtttctctgagatcctccctcggtggagtctcagtaacctagctgnggntttgggggtttgggttagctaaaccagggcaacaacaactcatggcccccaggaaatttccaggtggggggtgggtccttc

SEQ ID NO: 416572 - DNA, 260 bp, Homo Sapiens
gctggtaccgggtccgggaattcccggggattcccactagggccggcaccaacactggcgatccaatgtcagcctgaggttttgggggtgtcaaacatccaaacgatatcactggggtatgtctggggaggcaggatgatggcagaaggcctcgagacaggaagaccttgccttgggtccgaagcctgtgcacaaccatcaggaaactcatctgtttctgctggagtttaacttgactttgattggttattaaaaaccat

SEQ ID NO: 416573 - DNA, 392 bp, Homo Sapiens
acatttatatacacacacatacagtcatgctccatataatgatgtttcattcaagaacagactgcatatatgacagtggtcctgtagattatagtacttgataaaaataacaactatgttactagcttataaatttaatatagtataattttattgttattttagaatatactcctacttatgaaaaacaaactgtaaaacagctttaggcaggtccttcaggaggtattccccagaagaaggcattgtgatcataggaaatggcagctccgtgagtgttagtgtccctgaagacctcccagtgggacaagatatggaggtagaagacagcaatgttgatgaccctgaccctgggtaggcctagattcattgtttgtgtcttcatttttagt

SEQ ID NO: 416574 - DNA, 355 bp, Homo Sapiens
cttcttcaggcatcctgctgggccttggccctcgtcgatctggttctctcagcccctcggtttctcccctggggagacttcgcgattaccctctcctccccttggcgcctaggctctcagtcacgcgaccgcctagagccctgagctgctatttatgccgcgtttttattcacttaggtattcagcacgccttcatcaggtgtgtactctgtgccaggcaatcttctaatccttaaatggacgaaacaaaggcctcccttggactgacatttttaatgaagaataaaaacccataatgaaatataaaaatattaacgttataagagctaagggaaaaaacatgtgttacaacttg

SEQ ID NO: 416575 - DNA, 272 bp, Homo Sapiens
ggtccggaattctcgggatctgatttgagaaaattgtcactgccttatagtgtgtgcaaatcacaggtggcagcactgactgagctggggctgatggtcggcacggttctgcccaacactgaacacaattctgctgccacaacgctgtgctcatcacaaaaaccacataatgtgtggttagcatctcaaagctcttctctcctttgtagtcataaagacagcatgtgagagtccaggatgtttattaacagacattcaaagcacatatgtca

SEQ ID NO: 416576 - DNA, 930 bp, Homo Sapiens
gctggaccggtccggattccccggatcttaccccaatttaaaagataagaaggggcagtgttaagtaattgacccatgattccacagctagtaagagcgacagccaagactccaaacctggttgatgctcttaaccactgtgctatgccgcaggtaggcagattcattactgccttatctgaaaccctttgcacagtttctattactgatttctatgtagatttgaatataacaaatttaaatcatgtccttggtaacagaactgatcacagccaaaaaaaattcaccaaatgggtttattctgtactccaatataggtgtcttcccaggtttatatccttggcttgagaaaagggttgtacaaatagatgattgcagagtttccacatccttccagatacctctgcctctaacagtcacactcttagtaagggaagttgtttgatttacttcttcccttaggttgattacaagtgaagtgcgccgtcttattcctttttcattgctggagcacaaattgaattgtgcccagaccgtatctttctcacatgaaacctggatctcacctatcccttccatgcctgattcccgtgtttgcatattttatttccacatttacctcttgtcagccctgacagagaatttggcaccccttcaagcttctcctaaacaatctatccacacaaacacccctgagcaatatggacttcactgaagatagtgtgtaagcaaaggagaagagttcacattctgcatcctattagacatttttgttctcagaagtacccttactggccaaacccaatgaaggttttttcttctttggccctccccctctccagggcttcaatttaccttccaaccttcctttttttggccttacctagaataatcccaaattccatttcaaccttcggcctttccccccga

SEQ ID NO: 416577 - DNA, 469 bp, Homo Sapiens
tccggaattctcgggatcaggcatgcttgtatctatccctctagccatgagctgtgtccaggactccggacttgcacctaaagctgccccttggatatagtcagtccctggatgactaaccatgtggcccaaactagactcttaatttcctctgccaatcctactcctgcacacatcaagtgagggcatcccagtcatgcagttgctcaagtcctgtgtctaaggtccttgattcctcctttccttacctcccacacctgggtcagcaacaagtcctgtccacacacatctcaaaaaacatgttcgatccttgtactgctccagatccatccagaccaccccatcccagccacctccctctcgcgcctggactacaataacagacagtctgtgtttgactcttgccagctacagtctgttcttccacactggagtgcacttttaaaatgcagtgcaagtggctggagat

SEQ ID NO: 416578 - DNA, 673 bp, Homo Sapiens
  misc_feature (174)..(185): n is a, c, g, or t
  misc_feature (251)..(259): n is a, c, g, or t
  misc_feature (265)..(281): n is a, c, g, or t
  misc_feature (300)..(300): n is a, c, g, or t
  misc_feature (337)..(354): n is a, c, g, or t
  misc_feature (384)..(459): n is a, c, g, or t
  misc_feature (467)..(487): n is a, c, g, or t
  misc_feature (516)..(526): n is a, c, g, or t
ggcggccgctctagagatacacgatcccccgaggggggccaaagttttgcggttcccgcttttgtaaaaagggccatatggggcatataaaagagggcggggccgttttaaacgcgtggggggaatttttttatacaccgtggggggagggggaaaaaacccccccttgggggnnnnnnnnnnnnaggaaagaacctacttctgtgggggcgaatttgggcaactcccccaaagattaaaaccccccgggnnnnnnnnnttttannnnnnnnnnnnnnnnnccaccgcgcgcgggcgccnaaaaaactttttttagggttccgccaggtggtggggnnnnnnnnnnnnnnnnnngggttttctggtctcttggaatatagaaannnnnnnnnnnnnnnnnnnnnnnnnnnnnnnnnnnnnnnnnnnnnnnnnnnnnnnnnnnnnnnnnnnnnnnnnnnncacccccnnnnnnnnnnnnnnnnnnnnncccacaaaaaggcggcacctgggggttgnnnnnnnnnnnataaaatttagggggtgtcctggggggtgttttttggccgcccccttctctttgggcgtggttcattattaaacccgcgcacccacgctgtgtggggtttgtaagtgtatgtaaaacacaccccccccttccgggctgttttgttat

SEQ ID NO: 416579 - DNA, 1015 bp, Homo Sapiens
  misc_feature (52)..(91): n is a, c, g, or t
  misc_feature (107)..(221): n is a, c, g, or t
  misc_feature (431)..(942): n is a, c, g, or t
aaagcccttttgaacaggctgtatacagtgttcggctagcttgctctcttannnnnnnnnnnnnnnnnnnnnnnnnnnnnnnnnnnnnnnncttcaccacaccaaannnnnnnnnnnnnnnnnnnnnnnnnnnnnnnnnnnnnnnnnnnnnnnnnnnnnnnnnnnnnnnnnnnnnnnnnnnnnnnnnnnnnnnnnnnnnnnnnnnnnnnnnnnnnnnnnnngatgctaagttttatgtaaagccagcttgttaggggaaaaaatcagaatcatcagctagtctcagagtagtaacacacacagaaaactggaactaaccattttggtctgagcttagtgctagctgtgtttgatgaatagaactaggtgatggcttcagctcttttggccttacgcataggaaaaactatctttttttcattctaaatctnnnnnnnnnnnnnnnnnnnnnnnnnnnnnnnnnnnnnnnnnnnnnnnnnnnnnnnnnnnnnnnnnnnnnnnnnnnnnnnnnnnnnnnnnnnnnnnnnnnnnnnnnnnnnnnnnnnnnnnnnnnnnnnnnnnnnnnnnnnnnnnnnnnnnnnnnnnnnnnnnnnnnnnnnnnnnnnnnnnnnnnnnnnnnnnnnnnnnnnnnnnnnnnnnnnnnnnnnnnnnnnnnnnnnnnnnnnnnnnnnnnnnnnnnnnnnnnnnnnnnnnnnnnnnnnnnnnnnnnnnnnnnnnnnnnnnnnnnnnnnnnnnnnnnnnnnnnnnnnnnnnnnnnnnnnnnnnnnnnnnnnnnnnnnnnnnnnnnnnnnnnnnnnnnnnnnnnnnnnnnnnnnnnnnnnnnnnnnnnnnnnnnnnnnnnnnnnnnnnnnnnnnnnnnnnnnnnnnnnnnnnnnnnnnnnnnnnnnnnnnnnnnnnnnnnnnnnnnnnnnnnnnnnnnnnnnnnnnnnnnnnnnnnnnnnntcttggccaagccttcccttttgccctgggaaaggtaaagaaaatcccctcttgcccccggcccgccccccga

SEQ ID NO: 416580 - DNA, 992 bp, Homo Sapiens
  misc_feature (709)..(709): n is a, c, g, or t
  misc_feature (744)..(744): n is a, c, g, or t
  misc_feature (809)..(809): n is a, c, g, or t
  misc_feature (815)..(815): n is a, c, g, or t
  misc_feature (818)..(818): n is a, c, g, or t
  misc_feature (941)..(942): n is a, c, g, or t
taactcttgacaaggttaccaatgatttccatgttcctaaatcccacactcaattctcagtcctcatattattttcctataagctgcatttgacataatttgatcatttactccttggcttctgtctccttcccttttggctgctttttcttggcatactttgcttgatcatccttatcatccagatatcttgagtgttggaacccccggtggcttagttctagaattttttccttatattttcttattgcaaggcatgtgactttctgcttgaggactttctctggccacaggagtgtgctctacctgtaactcgggtgggctgccactgaaatttagtactgttagatcagcccttaatcaataattgacagaaattagtggataaatatcccgacttctttactgcttcagagagatgacattaggacatgttctatagtttcttggaattctccttcagctggatcgagcttcagttgcacacagaagtaaactttttgtttattaatgcatgctgtattggctttcttcccttttctgtctcacttctctattttccaattggtgcttcctggggtcacctcttgtttaaacttgggcatttaaacttggatattaaacagattctgagacagagatgtgtgtgcaagaggtttattgaggagtgatctcaggaatgacattagtaaagttgtgagagaagcangattggtcacagggagaagccgaactacaatgcanaagaaccattggtattagctgactctgtggggagctttataactaggatgtccttcagagttaangcaaanggntcaggggcttgtatcttgcatagaccagtcattgtatgcaactttgtccctggggaaggggctataaactagacaagatagctcttatttggctaaagggcaatgttcagagaaaggactcanncagttgagccatcaggcagcaaatacttcctgaacaaactggggaaaatg

SEQ ID NO: 416581 - DNA, 984 bp, Homo Sapiens
tgaatcaattcctaggtcacatctattgcacaataaccatgtactcaataaccaagtaagttgagtcagaactcaataaggccaaattttcagattttactaactaaaatatgcaattaattaaatggccatacttatggctatgatttattagagaggacacaaagcaaaatcagaaaagagaaaatgtccaaagggcaaagtccagaggaaaccaggtgcaagcttccaagggtcctctcctagtggaatgccaaattccccagcaattactgtgacaatatgtgtgaaatgttgtctaccaagaaagctcatcagagacttggtgcccaaggtatttattgcagctggtcatccaagtacccactgcttagcatgtactgaaatttccagactcccagaggaaagcagatgtttagcacaaaccacatggtttgcatggtttagacagtgagtcactctggtcagttagtgtgatgggaaccctcccaaaatctaagttcccagatgccagccaaggatcatccttgtaagcaggcctttcaaaggataatagccagggctgctatattaacagaacaataataacaatattctacacaacattgtagaatttctataaatgtctatgattttccaccttcacatgctgaacaacgtatgtttgaatttcccattgttcctaaagatttgagtcttgcatatactttgagaatgattgctgatgctgataaataaacagagaagcattcacaaagaaatcttcatgacaaaggttgggtagcattaaaatactgataaattttacattgagttatggaaataaatctgtgtggcatcagaaaagatgaatattatggcatttaataggtagctctggaaatatgtatcaattttaaattcaataagtgaaaatcttctccgcttaaagggaatatattttttatgccgggaagtcctgaaaaaaactttttaagaaaatac

SEQ ID NO: 416582 - DNA, 968 bp, Homo Sapiens
  misc_feature (106)..(198): n is a, c, g, or t
  misc_feature (850)..(850): n is a, c, g, or t
  misc_feature (860)..(860): n is a, c, g, or t
  misc_feature (868)..(868): n is a, c, g, or t
  misc_feature (876)..(876): n is a, c, g, or t
  misc_feature (897)..(897): n is a, c, g, or t
  misc_feature (924)..(924): n is a, c, g, or t
tcctggattctagtctcagcttggctactaatttaccgtgtgacgttaggcaaattactattctgagctttagtcatcttatctttaaaatgaagggtttattctnnnnnnnnnnnnnnnnnnnnnnnnnnnnnnnnnnnnnnnnnnnnnnnnnnnnnnnnnnnnnnnnnnnnnnnnnnnnnnnnnnnnnnnnnnnnntcttaaaaagtgaaaggattatgtagattatcttcaagatcctctctacctctgaataatgattttatgttcttacttatcttccttcaggtgaaagtaagtctctttccagctatccaaacatataacagagtggaatttttcctcactccttctgccccaggcaagatgttgatcagccccaacacaaacctgttttctgctttaaacatatcctatacctagggcaaaatttaaattatctaaaacacatttaaaaacaccccatccatacccactttgttctttcaaacaagtaaattcacccagcagggaaaagctgttgctggcagtccatgcctacagaatctcagccttgccctagcaacgaggctaattataactccggctacctggtaaccgcactagatttccctgcattggctggcagttctaaagccatctcagctctgcctgccacctcccatcctgagaagctgtcagagaagctgagaaactatgagtctcttttaagcaactatctaagctgtggtgagaaacaccatgtatcatagagcttcctttctctgcgcccagagaaaggctgcccagaatcacagggacttcagaactggggagggatgtgtgcgtccatcctggtccagcccactcntttaaccccnaagaaccngaagcccngaaaaaagggacttgccctanacccgggccttccctcctgaatttctnttcccctcaaatcctcccggtcttgaatcaaaccatcaagttcc

SEQ ID NO: 416583 - DNA, 886 bp, Homo Sapiens
tgacaagaaggtaagttaagaagcaacactcaggcacctgtctcaacatgttgctgagagtgagaagtgtgtcaccccttttacctaatgatccaaagagttgtgtaaataagcacctcacccatctcagtacttcccaagccacaggacggagtgtgggagcgaagccccttcatcaaagcaccagaaagatgtcagcagaaaaacaaacaggtcagtgaaatcagaggcagagcagctaatggggtttttttaatgttacaaatgcagggcagactttgaattcaaaggagaactttgtggcaggtaaaaggcatctttgctgtggaggaaccaaagtctttaattagtgtgcaactgggaagggagttagtgggcagcaaagataaaaatgatgtttggaattccatggggcagcttccaccgctgatacacagctgccctttgctggcctgtgccaagaactggactgggcctcagagaccatgtgcagcacgggctgccacccacacagaggaacgcttctcagctgggactcatcagttccgccaccctttaatcagtcttgtctttggtctccagccttattcatcctcgtgatagcagtttgctgtgccccagcgtaatggcttgacttaactctctgtccttatgaatacccttattcaggacaatccttaaaggctgcagacacaaaaaggaaattattagcaagcagattatgacttggattgtgtctgttttagtgcctttccctgttttcatgtcagcagctttgctggaagcagctggcatgtccccgaaagtggctggtttgtgccctatcgcctattgccctaatttctaacgaaaattcacctaaaaaagcatttttggggcctggtct

SEQ ID NO: 416584 - DNA, 961 bp, Homo Sapiens
  misc_feature (92)..(121): n is a, c, g, or t
  misc_feature (198)..(258): n is a, c, g, or t
  misc_feature (418)..(481): n is a, c, g, or t
ctggggtaccggtccggaattccttcggatatctgttctcagtatcaaagtcttaagcactgtaagattgcctatagaccaagacaacaacnnnnnnnnnnnnnnnnnnnnnnnnnnnnnngttaataaaatcagttaatatataaacatatatttatttagtaacttatttttatttttatcttcagacagcgtctnnnnnnnnnnnnnnnnnnnnnnnnnnnnnnnnnnnnnnnnnnnnnnnnnnnnnnnnnnnnntggggctgaagctatcctcctgcctcagtctcctaaggtgctaggatgagaggtgtgagtcaccttgccaggcccagggcaataactatgcaatgtttctataatttggagcaaaaaatatttgaaatatgtgtgcattgctttttaaccttttctattnnnnnnnnnnnnnnnnnnnnnnnnnnnnnnnnnnnnnnnnnnnnnnnnnnnnnnnnnnnnnnnnataagcacataatgaacacctgtgtctccagtcttggtttaagaaattaagccaaaagtaatcataagtgcttatgattacttttgaagtcacctgtacaacttttgctgactgcatccccttcttcaacactctaacgatggccactgtgagcactgtgtatattgaattgtgttgaatttttaacaccgtgtgcactacattgttttcccagctggtatgctaatgtattttagtgagccaaatgaattatatcagattaacttcccctttttgtcattttcactggtcttaagccttttttcgggacctaattaattgccccaaaaaattttccttctgggcctttaaaaactggaccttcatatgggaaaggcgggaaacccgaaattatgaagattcgcccaaaaaataattccttcaaactcttttttacaaaacaaacttttcatttctctttgaccataaaaggctcttctt

SEQ ID NO: 416585 - DNA, 888 bp, Homo Sapiens
  misc_feature (75)..(87): n is a, c, g, or t
gaaggggaatcttgggtgtctctcttccctcccccactgactgaagaccacagggcagcatggtctggggcttgnnnnnnnnnnnnngtccatatatcctagcaacatacggctggtaagaccttttataaaatgtggaggccaaaaaatgtccatgcatgccaggggaacgggcataagataagaaaagcagggcaaagggattccgtggattttcactggaagcaaaaggcagccagctagggtgggatacttgtcagactgcgtggaaagcatctgggaagccgaggctgctcaacagtgggaacctgaaagctgttttcccgtctagaagaggagagagccacaccaggatttggacatcttttactatttcgccctctcacagaagctcttctgagagcccagatgatgtttcccagtttggatgaacaggttattaggattattttctccacttgacagagctttccttacagatcccagcagcccacctggcactgccctgtctcggtggctagacggctggtccatcctactgggatgggcagtgccatgctcatctttgccaagggcttttttctttgtggttattttccccttggggtaaagaactgtgggtgccatctgtctgtgcctggggaaggtgcttctgtagtaggtctgctgtgaattgtttagttgataaaatctgggggttctgcatggcaaatcctctgagttcttggctgttcaggagactgttggaagtgattaggaaaagcagaaataaacacactatgaacatcacagctgggctttcccctaacaatcccagggttcgatgcttttaaaaaatctattttctataaattaataaactaaaggccatacaccactaattaggaa

SEQ ID NO: 416586 - DNA, 949 bp, Homo Sapiens
ggctgtgccggtccggattctcgggatctgaaagactgtgttctctgaatacggatagtagtaagcagggctgaggctatgtgaagggatttaagagatatttagaagataagcttagatgggtttggtgagagaacagagtagaatcaaggaacttgaccaggtttttggtccagcctttactttagaagagaacttgggagggaaagagtccatgactagagcagtgatggaggatgactttgttcttgtgttacatttcaggtgacagtggagcaaccatatgtggttgattggacatatcagaaattaagcctaaggtggaagctctatggaccctaggatttagggaaagccaagcctgcaagtctggtgggacagccttacagggatctgtgatgctttctggaaagtcaatctaggctaaaaagagatacacaacttcagttaaagaactcatccaaaaagtggggatgaatttttgagcaccacatggcttatgcatcagattatcctctggtaatcccctagaaacacacctagtgtttttgggtaaaaggctcttaaaaaactggaatgactaaaaacttaatgtgcattccctccacaatttcagtggacactccatgtagaaggcattagcagcagcaggtttcctgggacatgaataacattctttgtgatgaaaaaagcatcagccacagtaagatgtgcgtttaggatcttctccagtagattgcagtgccttggaaaattgatggtgtcttttatgggcatgggtggtacagtgcctatttttgatgatgatcacataaggggtcttaaaaacacatctcaataatgcccaatttgtacaaatatccaaaaagggtctttactgggggaaaaaccttaccaaaacgcaaacctagtagaagcttccttggatccccctggagccattggaagg

SEQ ID NO: 416587 - DNA, 329 bp, Homo Sapiens
gctggtccggtccggattctccggatcaacgagttagagaaaagaagataagagagtactgataataatgtttgcctacagccatccctaagtgctgccttactgtcctttcccagcttctgctctgattttatctaaatccaaggaaggctgggtgcagaaacaacaaagagccccagacactcaggagagtagtaattctccacttgacccccctctcctgaacatgataaatacacttaactatggaactttgctgaccccctcacaccaacaaaatgactcaaactgctttgccttaaagaataaaagatgggttaaatctgctt

SEQ ID NO: 416588 - DNA, 909 bp, Homo Sapiens
tgtattatcataataatcctcaatttatcactcatataacacatgcagagacagatgagagttcattctccctccttgtacgagtgttaaataccccggttttattgttaactctatcatcgtgattgatactcgctatcccactgattgattcatctcgccactctcgccctcgcattagcgtaagacatagtcgaggtgatttctccattattattcatattctcatttccccaccttcatctttatattccaccgctgcacgtagtatccctgaccgtcggtctccccagccccgcgacacgcgacacaaagttacccacttctcacctctccgacgttatcctccgccacaatctatatataccttgagttactatcgtttgaatgtacttactgccctggctttattccttgcacatgacagtgctcaaccacaacagctactccttcgtacgttagttagttgtaacggcatatcccatttatctcaaaccaatattacgatcacacctgtaaattcaaccacagacacgtcgtccttcagtgatctgattcatacgatgatccaggtgcgcttgagtcttgctgcacccccaatttagtgtctctcctgtacagccacattgcagcagtgtttgttagaacacgctattatcaagaagtcgtgtgcaagctgcggtgctcatactttatatacgactcagcaacatatggtgctatctcgcgccctgtaattagcacgatgtgtaggagcacgagacggcactatactcacgacaatacacaactgctacaatccgtctattcatcacgtcgacttctgcaactactgtacataagcagatagcgacactccgtatcccgcttattgattagtgtagttatacgtgccttgcgagacgatta

SEQ ID NO: 416589 - DNA, 881 bp, Homo Sapiens
  misc_feature (413)..(472): n is a, c, g, or t
  misc_feature (479)..(507): n is a, c, g, or t
gagcatgcatcctagtgatggaggttgagtcctactccctattaggtgatagactattgataagaacaaggagggtgatgatgataatcagcagttaatacatgcttgtactgtatgccaggcaccgtgcaagtgcctgaaaagcctcatctcatttagtccctccaacattcttatcaggtcaattctattattacccgccccttacagtcgggaaaattgagttctagagagtttgccattggcccaagtgactcaatggcaaagccgtgcctcaaccccatgtctgcagagtcttaagcacagctcgagttctgttctctgccacttttgggatgtcctgtgaagcccctgctacagggattgggcatggctgggtgctctgtctactcagggcttctagattcccgagnnnnnnnnnnnnnnnnnnnnnnnnnnnnnnnnnnnnnnnnnnnnnnnnnnnnnnnnnnnnacatgtnnnnnnnnnnnnnnnnnnnnnnnnnnnnnggcaatttaaaaagcatatgtaggtgtttgcctggcccaacagcttacctatagtatttagtgcatgtgtatcagggtctgggaggaaaagcaccaccaggcatgacgcgggtcagggcagggcatgactgggacttccctgtgtggtctctgcctgcacaggtcctttgggctctggtgggggaccgggcctgggtaggcagcaccactagctattctctgcccctccttggtggccctgcagagagtgtggggtcagtccccctgcaataaccctggcccctgttgcaaaggtgttttttcagaaggcatcaactgtgtaacgccggtggcgggggctttcccccatggattggcggccccattgtttccct

SEQ ID NO: 416590 - DNA, 491 bp, Homo Sapiens
ttgtgtttggtgagccagagtgaaggacaatcaagcagactgccctagaaaaatgaaggcttaggatcaacctctgaagtgctcttaggtgggaaaaggagtccctgtatcctgtgcaggtataatggacagaactggaaacagcaaagagaaaaagtcccagggacttgatgtcagctccacagatacaagggtttctagtaagcagggctgttctcaacaagaccaacctgcctcatgggaaagggaccccagccaggagaagctaggtatccagaggtgttaaagaatggattccttcatcatttcagagaggacatccctcttggttctaaggttgtagaaatttatggaaactctccttgcatcaattgcaaggtcttaggcaaaatatatcaatccaactaatattctggagaacctgctaatcacttttacttctccagagctgctgtggcctcaataactgagttggttagaagatgaagtaa

SEQ ID NO: 416591 - DNA, 361 bp, Homo Sapiens
tttaaaaggtagaacgggataaatcatttaaaacttatcttagggggtatgtaagcaaccccctaccgtctttgaaaactcctgtctgggtagatcacctatgcaagacatgttaaagtccaccctaacagacaggctgggctgtctgaaaccaactcagcactctccttcctgtgaagccccacacatggctgggcctgtctgacaaaggtgtggggaaaggagagaggttgattaagatgatctcctgatatgtttccagttagaatttcaatgtgtcaatgaataggaggcaggtaagaaaggacttctgagagtcaactaagtagataatttattacaattttttttacgtgactta

SEQ ID NO: 416592 - DNA, 1032 bp, Homo Sapiens
cgtccttctctctccttttattgtaaaagagctggacggtccggatttcgggatggtggtaacttcccactctacactaactctttactttattggctctcttaaattctgtcagtgttctatcatttctttcctaggagttgagaactacacaaagaaaatatattagccagcaatatgtctgagcaattttccataagaaaacattcaaaaactatgtatcatagattcataaaatctcaggaatagaaggaactttaaatcttatttaatccagctaccctactagtcccaagcatataaccttaaaacacctgctatgacattagttgattacttctcaaccacagcccattcaatttttagctgattctgactatcaggacaaaaacgctatttccaaatcttctacccaatgatcagttatatatcttggaaccttccccacccaagaaaaataatcagcttattccttctcatcaggcccttcaaatatttgaagatagcaattttatctatagttagtattctctcccattaagctaagaatgtccagttaattccatattttcttatatgacatgactttaagtgcttccatcaaaaccaccccaccttttttaggaaccacattagaatttggaatcccggaactgggtcaaggagaagtaaccttcccctggaagggggctatacataaagggccttttaaaaccaaattccttgaaagaaaaacttatgaaatctaaagccccatggacaacccatatcctaagtaaacctgcagaaataaccccggtaaatgggatcttaaccatcccggaattcccgaagcccctgcaatggttatgggtcccggccaataacccagggaagctaaatcggcgaagaccccccaaggaagggaatgaattttgggaatggcacctgggactgggatggggggttcccactctttatacctagctaaagtttggctccggtgggggacttgatgcaaaagggcgttttctcttcaataaagctttcccc

SEQ ID NO: 416593 - DNA, 621 bp, Homo Sapiens
  misc_feature (342)..(367): n is a, c, g, or t
tccggatggaggatccaggagactttattaccaaaataatggaggagacaagagaaataaaaaggagagacaggccgggaggtccctttgaatctttttgtcttgcctggtctgagggctgccttgccacctctgctttcctgcttttaatctcagaagtctctaacgtgcagaatgagcaaagtgggggttgaaaaaagcaaaccatttggaagccagaaaaaatattagaactttcatttctaaaacaataagaaagttaataataaattcatataaggcctaacattggagccttcacaccatcagtatattaagcggccgtgcgtcattcatctgctnnnnnnnnnnnnnnnnnnnnnnnnnngctccagagagctaaagaaattgatggggctgcctcacttgattgtcctctttcagcacattatgatatagcacagcttcagtgtatttgggaaaacggactcttggattattttatatagcttaaactaaatttatatttacaacatggacaagtgtcttaaaaaaacaccaaaatactggcacatgtgtacaagaaaatagcagttcttgagatttccattcttgggaaatgccttgtattacaagttaaaa

SEQ ID NO: 416594 - DNA, 866 bp, Homo Sapiens
tgcattaactataatactaataggttttaaagtaagagcaatgctcctcagatatctcagctagttcttagactttgctaccatgtgcgctacataactccatcaaagtacttgtcatattatagtggaattctctctttcttgtgacttctcccaccccccacttgactctaaggttgtttctttatcccttgagcctaaaacagtccttagcctgtagtagatgcagaaaagacatttcttgaaagaataatgcagaactaagggaattctgggaaccatgcctactaggaatcacatagtttcatatctacatatctgaattcctaagtgggctcaaactgtggatacatactgaaagataaagtccttgcctatgaatactgtaagtatacaaatatactacctgcattacacgcaataatctaagtatgaacctgggagtcataatttacttttccttccatctcactcccacataagaaattaaaattctgtaaatttcatcttttctgaaatataggctctttacccttccttcctacttgactacaatgcatgtttctataatgtgaagtagcccatatgtgactagtgaaaaggagaatagtggtagcaaaacagagaggttatactggtttacatgggattttttccaagcacattaatgttttgtgccacaagtaactgcagctgaatacaaattatgttaagagctaaaattggctactattttttaacgcatgaattttcagaacatgaggtttttcaataatatttatctgcagtagaaatgaacggtacattcatcttttgagaacctatattaattttattaaataagccgaactttaaataagcctact

SEQ ID NO: 416595 - DNA, 985 bp, Homo Sapiens
ctggaccggtccggaattctccggatcgcagtttatagataagggatcacacgggatgggggtatatgtaacttatccaaggtccccagtaagtgcccaactttggaattcaacccagatctgtaggcttaaaagcttaaccgtaacctgtattactgggtattctttgtaactcagccccgactcctgacccaatgtgtatagtaggctcattgtgagtgtttgtgaaaagaaagaaagtctcagcaactatatatctaaggggacccaaatagggactttggtgggaggcaatataatgcttggcaactcccatattctcttttgctcttggcagacatgaaatccttaggaaccaacttgggctgtgcggactttgggcttgatctttacatgtctcatataattgctcaaataattctttctatggtggcctcatccccagagaccttgtgccaggatcctggaattagggacaactacaatttggtaaatacttctgaatcaaagttctctgagattcaggaaaaaatgaacaccagttgggagcattattttccaggattatagaaaaatgtattaaataattttcactgcttttttgtggcttattccaatcagaagagtcatcaatagcatttaaaacccaaattaatttttgttttccatttatccactcatcccaacattttattttttcactccatctttaattgtgtttcagggccttgtggctaaatcctgaaaaaccccatggtgaaataaaacagacattgttctcctcccccacgaagcttatacttccattgggaaagaccgaaaagaaactaaagtagaattacctccccaaatccataaattgctaaattcctccaaaggtgctacccgagggaaactaattaaggggattaaaattacccaaaagggccaaaaagggctaaaggttgggaaactcccctaaaaaggggggaaaaagtttaaaccg

SEQ ID NO: 416596 - DNA, 963 bp, Homo Sapiens
gctggaccggtccggaattctcgggatggcagactgccaaagaatcctttttatagacaaaaatggatatgataaattatgtttcttgaggtcccgatgtttctatttaaagatgtctgtagatattcagtcccttataaaggtaccttaacattgctctttaaaagcattgtactacgtcttttctttcatgctttgagagcaaatcagggttatcctgggggtagacacttttgcccctgtcttgtggtttgtgaattccttggctcacctgtcagtgtaaggcattctcttttaattcaagttcattcatcagtctggggaaatgcttttctttttcagaggacctggattgattggttggaaatataatttggtccctgtgtttgtgctggatcacagatcagaaagcagtttcagtttgcactggctctcggacttctttactggtgaaattcagaagtgcagcaagagacaagaaaatcagagctgtttatacaatctcttttcttactttccttgagtgttttaaagaggaagactgggcctccaaactttgagcactggcagcaatactattgtatgccgtcaactcctattcctttcacaattcttctgtgcactggaagagaaaaaggcagctagcaggggtaagcataagtggaaggtatttctttgggtatcttctttgtgtgagacacagttctagatcttgtgcatttattctctccattaagcctctgatgtttcagagaaaactgatgtcgtaagacagtaaccccacgtacccacaaacatagctgtgatgattgacagaagcaagttcaaatgccagggcctgccttcctttaaaaccagaagtgtttcttacgtaaccagccccaggaaattggaactttatgctttacaaggattcaagggtcctcaaattccttcaccatggttggtctggtagaatcaaaa

SEQ ID NO: 416597 - DNA, 243 bp, Homo Sapiens
ccactttgggtataactggtgaagttccagtaactacaatatataccaccactccatttaacagcaagagttaactttagtcattttagatgatttggaattctgtcactagctaaggtccaataggccacttaataaacatttcaggccatagtaaggattattgactttaagtgtagagaaactgctggaggaatggccagtttacatttcacttctgtgaaatcttccctgacctacaca

SEQ ID NO: 416598 - DNA, 322 bp, Homo Sapiens
ctggaccggtccggaattctcgggatcttttgatatgctgagaccagtagcatgtggtggaagggccatgtggagaagagtcaggtgcctcaaacaacagacagcacagactgccagaggagcgagtgaagccagcccggacgctctacttactgcaagccatcaggtcactgcagctgcatgtgtgaacccaagttagaccagcaggactgcctggattgccagtgcgtaaaattatgcaaaagaaccaatgattgctgttttatgccacgattttggaggaccttgtaacaagaacataaataactgacacaggtgttca

SEQ ID NO: 416599 - DNA, 311 bp, Homo Sapiens
  misc_feature (113)..(268): n is a, c, g, or t
gcttggtaaccggtccgtgaattcctcgggatgttaacagggagtgaggataaatagtccttcagtcgtcagtcacaagaaccagaatttctttgttgtatgaaaaatatccnnnnnnnnnnnnnnnnnnnnnnnnnnnnnnnnnnnnnnnnnnnnnnnnnnnnnnnnnnnnnnnnnnnnnnnnnnnnnnnnnnnnnnnnnnnnnnnnnnnnnnnnnnnnnnnnnnnnnnnnnnnnnnnnnnnnnnnnnnnnnnnnnnnnnnnnnnnnggaaactattctagaataattagaaaatagagatatgtagtat

SEQ ID NO: 416600 - DNA, 231 bp, Homo Sapiens
cattttttatctggtagctttctgaatccaaacacaatgcaaagctttgtttctttcacgctaggggtcttaataaccattgcttctttctatggagagtagcattataattttgttgaaaaatactcttagcaaaaaatttttaaaataagggaaggttaaaaatacctcctgaaccttcctggaaattcagtcttcaaatctggatttctggccccttttttcgaactt

SEQ ID NO: 416601 - DNA, 194 bp, Homo Sapiens
tcttgctgaaagtacacagctagaaaattgtacggctggaattcaatcccagacagttcagctcctcattcccaaacctgtgtgcttgacaccactctgctgtgtctaggagcacccaagacctgaggaggaaggcaatcctgcctctccggtttgtccagctaccctgagaacctttgcccatgcatagtatc

SEQ ID NO: 416602 - DNA, 111 bp, Homo Sapiens
tctgggtaatgagcaatgtgggaggcattagtggctggtgtttattttaatgaccctcatagaactgtttgtctctctgaacaatgtgaatgtagtacttttacataaaga

SEQ ID NO: 416603 - DNA, 1108 bp, Homo Sapiens
  misc_feature (132)..(140): n is a, c, g, or t
  misc_feature (226)..(226): n is a, c, g, or t
  misc_feature (283)..(341): n is a, c, g, or t
  misc_feature (545)..(584): n is a, c, g, or t
  misc_feature (611)..(611): n is a, c, g, or t
  misc_feature (635)..(635): n is a, c, g, or t
  misc_feature (695)..(695): n is a, c, g, or t
  misc_feature (828)..(828): n is a, c, g, or t
  misc_feature (978)..(978): n is a, c, g, or t
  misc_feature (1085)..(1085): n is a, c, g, or t
cccgccccatcacgacttgctggataccccacaccatcccgcccacactgccccaataccgtaccgacgcgaaccctctgcaaacgtcccgcgaaacacgccaacacacaacctctccaccagaccctcctnnnnnnnnntctcatcccggctctcaccgtcgactcgcacacaacccaacctccatagccaccaacacccgacacgccccgcacaccaaccatanaaacacatccaaatactccgataaccaacgttaccctcaccccctcacaaatatccnnnnnnnnnnnnnnnnnnnnnnnnnnnnnnnnnnnnnnnnnnnnnnnnnnnnnnnnnnntctcgactatcgcccatttagccacgcccggaacaagatgccgcgcgcaaaaagcgtccctgagtgcagcccagctaaaatatcccacacccgtcgaaatagataactcagctccccatccacgcctgcactaccgaaacatcgctccaaccataaccgctcccagccctcacctcacaacaagaaaatcaacaaaaaaagtannnnnnnnnnnnnnnnnnnnnnnnnnnnnnnnnnnnnnnntccaagccacgcgcgcatgtctcccgncctccacgctcctcatatatcacncgccccaatattccgcgccctctaaaccactccaccacactccacacctacgacacatcnacgtcacgctgcccctccatactcaaccgcatacggtaggcaccccccctcaaacacacatattgctccgcgtctcacactctacactagtcaccatgatcagctttaccacaccccatcacgctgcgtcatnggcaccatcaaggtctacacaaaactcctatccacccccaccaaacacccaccgccacgcaaccaccgagtgacggtctgcgcgcacgcacttcccccacacctcgaaaccccgacgcactccttcacacccctagaccaaccagacagnatcagcgcgacaacatccctcggcggccccagcacaccccccaaccctcgcctcaccgccgcgctgtccaccacaaatcaacctcgccaccaaatatatgagagatnaaaatcaatcacgccaccgcggt

SEQ ID NO: 416604 - DNA, 728 bp, Homo Sapiens
  misc_feature (63)..(538): n is a, c, g, or t
cgctggtccggtccggaattctcgggatggaaattttctcaaccatggttttcctctactctnnnnnnnnnnnnnnnnnnnnnnnnnnnnnnnnnnnnnnnnnnnnnnnnnnnnnnnnnnnnnnnnnnnnnnnnnnnnnnnnnnnnnnnnnnnnnnnnnnnnnnnnnnnnnnnnnnnnnnnnnnnnnnnnnnnnnnnnnnnnnnnnnnnnnnnnnnnnnnnnnnnnnnnnnnnnnnnnnnnnnnnnnnnnnnnnnnnnnnnnnnnnnnnnnnnnnnnnnnnnnnnnnnnnnnnnnnnnnnnnnnnnnnnnnnnnnnnnnnnnnnnnnnnnnnnnnnnnnnnnnnnnnnnnnnnnnnnnnnnnnnnnnnnnnnnnnnnnnnnnnnnnnnnnnnnnnnnnnnnnnnnnnnnnnnnnnnnnnnnnnnnnnnnnnnnnnnnnnnnnnnnnnnnnnnnnnnnnnnnnnnnnnnnnnnnnnnnnnnnnnnnnnnnnnnnnnnnnnnnnnnnnnnnnnnnnnnnnnnnnnnnnnnnnnnnnnnnnggacatcagtattctttccgcctagaatatagggcaggaccatctctgggaaaggccttaagacccacgatcagaaaggccagggaagagtagaatcctgcctggggtcagtgagataaaggtaggagaaaggagggaaagagaaggttagaggcctgcgcctgaagcctaacacacccaacattataac

SEQ ID NO: 416605 - DNA, 837 bp, Homo Sapiens
  misc_feature (139)..(147): n is a, c, g, or t
ctgtaaaaagttgcaatactaaaagttaaagttatgcatgcttgtttatttttgtatccttttttaatgtttattttaagtttagaatacatgtgcaggatgtgcaggtttgtcacataggtaaatggtgtcatgggcnnnnnnnnngtacagattatttcatcacccagacattaagctcagtacccattagttatttttcctaattctctccctcctcccatcttgcatcctcccataggccccagtgtgtgttgttttcctccatgtgttcgtgtgttctcatcgtttagctcccatttataagtgagaacatgtggtatttggtttgctgttcctgcattactttgctaaggataatggccaccagctcaatccatgtccctgtaaaagacatgataccattctttttatgtctgcatagtattccatggtgtacatgtaccatattttctttattcttgcttttattggtgggcatgtaagttgattccatatctttgctattgtgaatagtgctgcagtgaacatatgcatgcatgtgtgtttatgatagaatgatttatattccttttgatatatacccagtaatgggattgttgggttgaatggtatttctgtctagatctttgaggaatcactagactgtattctacaatggttgagctaatttacactcccaccaacagtgtataagtgtttccttttttctctacaacctcaccagcatctatttttttattttcatagtaagccattctgactggtgtgagacgatatctcattggtaccatttgattttgcatttctccaaacaataagtgatatttgagcttt

SEQ ID NO: 416606 - DNA, 897 bp, Homo Sapiens
gctggaccggtccggattcccgggatgaaagacccagtcttggcaggattaatcatctgctatgaaaagtaaaggagactttgtcttgaaccttaggtaccagctcagccacagaggtgtagagaactaagagggctcttggggtccctgatcccaggagttgactctttgacagcatttctggacctgcccagggacagaagggagcccattgccctgaagggtgagttctaggccaggcaacattcgccaaaagctaacttaagagaccttgggccttaagggaacactggcagtagactggcagtactacctgtgggcttgtggtggcagtggccacgtggtgaggctcctctgcctttggaaaggagagggaagaatgggaaggactgtgccttgtggtttgagtgtcaactcagctgcagtacaatagaacaccaagtagacttctaaggattttgactgtagtccctggctcctgaatggcacctctggatccgcctaggccctaggggaactcaccaccctgaaaggaaggacactggcctggctcactttgccacatgctaattgtagaagccccagggccttgagcaaacataggcagtcaccagcaagtggttatagcaggccataggtgagatcgactgctggactggcttcaggtctgacccagcacagttccagtgggtggtggccaccaaggttacttatgtcactttcatccccagcttcagggtggcttcaaaacagagagactccatttgttttgggaggaaagtaagggaaagaagaccaagagtcttctgccctggtaaatccagagaattcctttcagaacctttccttcagaattatccaggggcagtaccctctaactagtcctccaaaaaaccc

SEQ ID NO: 416607 - DNA, 473 bp, Homo Sapiens
ttagtgattactcgtgaatctaatcattttgacagcgtgcattctcactgcgttgtgagctccatgggggcaaggacagtgagggtttatgtccacattctatgcctggggatgaacaaataaatgaacaaatgcaggaatggaaggaggtgtagagtgctaaatattgccttcattatacagatgtaaagactgaggctcgacgtaggtgggcagtttcttgaggtctcacaccagaaaacggtatggtccatatgtccaggggtcagatccaagcccagcactcttcatattccgccagtttgctttggacaccagtacacacatgtttccctttaccatccaacctttctctactccaactagtggcttggcaaaaaattagagatttttaatggggggctagcaggctataggaagggttgtaattggtacatggagaaaaaagagtacaaattgaatatttgaatttt

SEQ ID NO: 416608 - DNA, 865 bp, Homo Sapiens
  misc_feature (230)..(284): n is a, c, g, or t
ggctggtccggtccggattccttggataagaaacctggaggagtggctattacatctcaggccaagcattaatctttccaggattacaacttgggctcccaaagttgccaagctattgcttagacaaattatttaatctctgttataccaaaattatttccaggcccccacaatttgcacctggctgctatacctctatgaagactagaattacctatgagtaagagtcnnnnnnnnnnnnnnnnnnnnnnnnnnnnnnnnnnnnnnnnnnnnnnnnnnnnnnnattgataaccatgaaggaattctgagtggaggtgccctgacctttgacaaatctcctatctgtacttggtaccagcttgagctatttttattgctcaaaccaataggacaatttgctgaggcctcagagatccaccccctccagagaatccctgatttcccaaaatttgattgagatctaagctttattttgctgtacaactcattttctggagttttacttgcttccaacaatgaaggcaacttttcctgcttccatgatgatggagagcaggcaattcctttctggggtttcagttcacttctaacagggaaggagggaaggagagtttgagttttttcctgcttctaggatggtacagagcagtcttcagcctgggccccattcctaggtaagtaactgaacctggtgttttgtcttggaaattctcctaaatgaattaaagttaggattaacaacccagggctgaagcaagaagaatggcgtgaaaccccgggaagggggaatttgcctgtgaagccggaaatcgcgcccacttgaactccaggcctgggggcaaccgagcgaggactctgtcctcc

SEQ ID NO: 416609 - DNA, 487 bp, Homo Sapiens
ggctggtaccggggtccggaattccctgggataccaaatacaaatcactattctgtgatactctccctaaacctagactatctggtaaatatgcaggccccccaactcagaggacatctaaatgcaacaagactacttcagcataaattcaccagcactaataggaaaatatcctactaatcagctgtttgttttcacatgttgatcactatgtctaaaaacactccggaatctaatacggcttttgattaatatacacagtttcctctaatctagaaaaaggttaagtgttcaaagcttgcaaagttagcaaagctaactaccttcaggtctcctcgtctcttggttattgttttggtcattcttttaataggattttgcagaataataacaactactaaaaagaaagtattaataaatcaaatattcgctaagtatatacaatatgcacagcactctggggcatatgttttttttaagtcataaa

SEQ ID NO: 416610 - DNA, 907 bp, Homo Sapiens
ttaataggggaaagagatttagtggtttggactagggagatagtgatggaggtagtgaagagtgatcaaattctggctatactttaaaatagaacttacaggactggctaatggactggaagtgggatgagaaaaagagcagtcgaggataattccaggcttctgagcacctagctgccatttactgaaagaataccataggaagagcagggtaggaggcagtggtggagacatttagtagagaggaaatcaagcattcattttagttagacatgttgagtttacaatggctattagacatcttaagagagattttaaataggtatgagtctgaataaatttagtagttaaagcatgagactgcatgagatcaaacacagagccagtgtaggagaagtggttgagaccaaagactgggtcctgaggcaggccacaatttaaaagccaggaagatgagaaggaacgagcagatcaagaagtaggagaaccaagagaaatgtccttgaaaccaggtaaggaaagtatttgaaaataacagaaatcaactgatcaaatgataagtcaaataagaaaagggctcacagtaatagcctttagaacttggcaacacggtgactttgatagcaccagtgtatgcgatggactatgtgtaccagaagggaccacaaagagcctagaggcaagagggctgaggggaaaaccctaagaattattagagctgattttttaatccaagctttaggttgtgtgcttaaagtatggatttttgccatgtttttatctcccgtttcccttataactcctacaaggggaagtaattttttaaactacgtcttttaaaggatggagaaaaatccagtttttccagaacctggccccaaatgttcattggccccgggaagccctt

SEQ ID NO: 416611 - DNA, 861 bp, Homo Sapiens
  misc_feature (755)..(755): n is a, c, g, or t
gggacataaggtatgtcattaaataatcctgcagcacacagtactttgttgggtttgggcaattttatcccacctggcattacttgctaaattaagattaagggaaccaagactgaaagaacaattgaaaaacagaaaaacaacaaacgtgaatggtaccatgggtattgtggtgttattacatataggcttttttccatggttcctggcttataactctcatagcccttgtcctcatctttagttataatattgagtgtgttaggccttccgagcacacctcagaaaagagtctctctgaccttctcccatcctcctttcacctgccctaaggcaggactgtaatcttcccctgcctttctgactgtgggtcttaaaaccctaatacaagggggtcctgccccataccctaggagaagaaatactgatgtcatgaagcttccctaaaaaccaagaggactgggttcagagaggttctggagaactgaacatgtggaggtttctagaggaaggtggcaccccagaaaggcatggaaggtccacaccccttcccccatatctcttcttacacatctcttaacctgtatcctttgtaataacctttattataaactggtaaatgtaagtaaatgtttccctgagttctgtgagccactccaggaaattaatcaaacccaaagctgggggctggggatgtgggaacttcggaagtcacggaggcctggacttgtgatttgatcgaagtaagatatctngtgggatctgacactatctcccaggtagatgatgaatttgaatgggacgaacacccagttgggtgtctgcctacaaaaaacaaactggctttgctttgcctgaaag

SEQ ID NO: 416612 - DNA, 454 bp, Homo Sapiens
ctgaagatgcctcctgctaagacaggttgcggaggggagtcagtggctgaaagggtgatttcaggatagattgtcctggcaaataaggaggggtcctctgcatgaataagcagtgtaccctgccaaaggaagctggcaggaggtgattcctgctgaagcctgacagtacatgtccaccctgaactcatggccttggatgcagaccggccaactgtacacagttgagcgaggaagtggcgacagcacggtttgaatctggctgataaaacagatgttcgggggaagggctcttattttctcccagttataggatcgggggtgggggaagaaaacctaattccctatctgccaaatgtttctgttggtaatgtcctggcaacagtgagatgcccccaagaatggagtggttgaaagttctagctatcgactcagccctggatgtaaattctgaatt

SEQ ID NO: 416613 - DNA, 608 bp, Homo Sapiens
ttagaagaactgagataccaagcagaaagtgacagcataaatattattatgtctacaatccaggacagtgccaaagaatacctcaaagatcaatggctattgagtcaagggaacatgggacacaggaatctatttcattctgccctggagagaaaccaggcaaatggaaagctactccccatgcctcctcacccaccatacacacagcccatggagtgccacagcatcttgccctgcgtctgtttattcctgatgagcaataaagcatgggcaacaaagcaaacatttattttacttctccactgttatttaagtaattgaccaaagaatgttgtggggtaaaataacactgaaccaaaaagtagccttcaagttagtgactccccctgccatgccctgcccaggtctttccccagaattacattttcccaacatgtaagagtaatgacatttttatgctaagaattcatcctgggagaaaacacagattttgactagctatttggtattcaaatatgttatcataacatggtctcatgtgaaagtgaacttaatatctgaattgatcatttcaaaattcccaaattcaaatttaatggtttttgttt

SEQ ID NO: 416614 - DNA, 914 bp, Homo Sapiens
  misc_feature (650)..(650): n is a, c, g, or t
  misc_feature (765)..(822): n is a, c, g, or t
  misc_feature (834)..(834): n is a, c, g, or t
  misc_feature (849)..(849): n is a, c, g, or t
gtcaccccactcactatggacagatggggaagccaaggtctcaaggcaaggccttgcagataggcaggagcaaagctggtcttaaaacgctggggcatcaggcatcactgtcagcctcagggagctgaggctctctggcctgggcttctccaagaaggtaggaagagggcagggccagctacaggctgtatctcctgaacacagccactggaaatagcatcacttccacatccaaaagttctacccatcccatgccaccagcactcgagtctctcgtctatagttggagaaatccagggatgaataaagcagaccaagtccctaaccttgtggggctcacattcggttaggagagaatgacaacaaataagtaaacatataatgacactatggtttcaggcaatgaaaactgctataatgaaaaataacacagtgaagggaatagagtgtaagaggtgacatttggacaagaaccaatggaagtgaggcagtagctatgcaggaatcacagagacgagcattcctggaagaaagaactgctagaacacaggcacagaggggaaaggtatttaaccatttctcagtgggctttataccaccagccaccactccctaacctgctccaataaatacctgccctttcctgcttncaaggcctcctccctctggcagttcaccaccgtaactcccccagaagctttctcccaggaaggagagacaaaatatctgtttgccccctccctaaagcctaaagggctgctacannnnnnnnnnnnnnnnnnnnnnnnnnnnnnnnnnnnnnnnnnnnnnnnnnnnnnnnnnttatgggagacnaaggccctgtggggnaaggttgaatgaaggttcattgaaagggtaggggcccccttcaatgaaaattggggaattcattt

SEQ ID NO: 416615 - DNA, 515 bp, Homo Sapiens
tacattctttgattgcttggaatcaccctgagacagacgttcttgctgaagttctagcctaattctcaacccaatcccctacttctttgacttccctaccatatctcactttcctccagagattgtgattgtaaaactctggtccccgtggtgattttctgccccttactttccagaccttcctggaaattactgcctgccagtttaggctttgaccttggcctgtgctcctcgctcatggaccctgcttagtttcatctgttgcatttccattgtcaaggccttacccaggcctagtctctgtttctgggacatcttctggaatggcactcctggcactgcgagtataccgcatcttctagtgcttgctgtatgaatgtaaactccatcttccacttcgcgtttggaggtccctgtcagccaagggcccttatctttgttgagaactctgtgtgtgctccatgtctcaaatgcctgcaaaagaaaatttgtaatccttattttggtaggccacc

SEQ ID NO: 416616 - DNA, 178 bp, Homo Sapiens
  misc_feature (58)..(98): n is a, c, g, or t
gaagtatcaaaataatctataattagcttacctggcctgccataacaaagcccggatnnnnnnnnnnnnnnnnnnnnnnnnnnnnnnnnnnnnnnnnnagccttgaatttgcaccaccttgggattaatggtggggggcaaatctagggccccatgtggaaacccttgaaccctcctt

SEQ ID NO: 416617 - DNA, 139 bp, Homo Sapiens
gcatgcaagacaaatgtcttcaccccacccagagtgatctttcccacaaactccgaagggtcagcaactgagacagggacaatctccaggcccacactctatgagccaagaacaaaaaaagagtcagaactgacttctt

SEQ ID NO: 416618 - DNA, 616 bp, Homo Sapiens
gtcgctctgcagagcggctctccagcggccccgtcctcttccaggcgtactgggcgcgcctggcctcgaccgccgtaggaaggcgctgcatgggcctgaggcaccgacacagcggtttcctatcatgggggtgatcgccggggagttgaaaaatacctgtggccagaccccagcctaacccaagtgaatctgtctcggggaccgggctggggggacgctggtccctgcttgttctgaaggccccgcaggggattcgctggtgcagccacttgtgatccgttttctaaatggattagtcagtacatggcttctagcacacccaaaatcgatagggatttttaaaagacgcattttctgaaaaatcggagagccaggtgtgaaagataaagcgaagtggcacacctacctttccactgttttggttgcgattttgagaattggtttcatgtagcaagtctggcataaaaacccaactgcacctctaaaaaggtgtgttcacatgtgtcaacaaatactttgttgcaaatatacttgcatgtttttcataaacgagtgttacttgtgtcagagaaagggtgaattctgctgtacttagtctgctttaaagggatttgtc

SEQ ID NO: 416619 - DNA, 702 bp, Homo Sapiens
  misc_feature (378)..(432): n is a, c, g, or t
tacataaatgcatacatacatactactgttggtattctcaatttaatgctagtaattaatggagtattcaccacacccaagatattatgttaggtacttacaaagatactaaaaaagcaaaaatgtccctgccctccaaaataccattctacaacagaaaagatgcacgcattcaagcaacgtggatggattcctccaaacagttcacagcgctctttaacagaaattatttcacttgaaccacaaaacaacacttcagagtaatacctgttttgtagttgaggaactaaagttcaaagatatactactcaaaaattgaaatataggcagtaatattaagatttgggccaggtctggtggttcatgctcaggctagtnnnnnnnnnnnnnnnnnnnnnnnnnnnnnnnnnnnnnnnnnnnnnnnnnnnnnnngtgtgggccacatgcctggccaagagtactttcatatattaactgattcaatagctagtactaatttgttaactaaactcacggggcattttaaatattaaaaatccatttaaaaagctaattttactactttgaactttgaaactgtctttctatttttctccggcattaactttttttagcataaaatacacctttcagtaaacaaagtgctggaaattttgatccaccttttttggaatgaattcattccatttcaaccctaaattt

SEQ ID NO: 416620 - DNA, 595 bp, Homo Sapiens
  misc_feature (266)..(266): n is a, c, g, or t
  misc_feature (477)..(487): n is a, c, g, or t
  misc_feature (497)..(497): n is a, c, g, or t
  misc_feature (544)..(544): n is a, c, g, or t
acgtcggagagaggggaggggatccggggtgcaccttggggggtgaaggagggcaagcgatgtgtcgtggaggggggaacaaggcagtgggacacggcgggggaatttgtgggcgggggctggatcggtcgcggcggacccgggggagagggggcacgaaaggacgtatgcgcagggggcggaggcgaaagcgccgggcggggaagtaagcccggggggggcgaaaaccgagatgggccgccggggaggaggatacggggaagagncaggaagtagggcgggccccgggcccgtgaaggggaggcaaaaggacctgtggggaggggggtatagggcgacgacggtgcggagtgccaggcctggcgcggcccctggcgcgcaaagaaaggcgcggggcgcgtaggcgagaaagaccaggcgcaaggcaatgaagggtgagggggggctggtgacaaggagccggggggcaaaagtttnnnnnnnnnnncgggcatggnatgagcacggaaaggaagggagaggggcggcggggccttacacacgnaagccgggagaggggagaaagaaaccgggggcggcgagcagacaacgccac

SEQ ID NO: 416621 - DNA, 923 bp, Homo Sapiens
  misc_feature (576)..(576): n is a, c, g, or t
  misc_feature (695)..(695): n is a, c, g, or t
  misc_feature (698)..(759): n is a, c, g, or t
tgtgatcctggcaataagtgtgcttaattaaaacacttgattagaataatcagtttgggcctggtaggcttgcagcctcctggagatgtctaaatctacatatagaccggctgattagaagatgcttagttcagcaattctggccggcaggccagggctttgattttagtcggaagaggcagacttcatcacacttgctttctagtgacaacctcaactgcataacgtgttgatccagcaagaatcaggtcattccactgggcaaactggtctgttttcttctcctcgaattagactttaacatgatcaaaacggaattccagaaaaacaggcgaagtactgctttccttctctacagtcttttccttaaaagtaatgtctgaacaaatgcaaataaaaatggtgccggtaaaaattataccttagaaaaaataatctgaatatgggatatgctgctgccacatcccgtgaaatttgtctttacattcaccacacatatcctaacagttgcatggggttctaactgccagaccgcaacagaagggcagcacctgactgtaagtacttcaaaatcangaccagtcctcaagcgcttgaaaagatgagggagaggagctggaggttacaaacgagctatggaatcgcagcacttgctctccggccctggagcgaacacaaagaccccagtctctttnggnnnnnnnnnnnnnnnnnnnnnnnnnnnnnnnnnnnnnnnnnnnnnnnnnnnnnnnnnnnnnnagggggcgggcccgcctcctaagaagtaatcccctccgagagggggccccaaggctttaacgggcggtaccccaagctttttccgttggtaaagaagaagtggtgccgcccccgaataagaggagaggtccgcataatttataataaaacgcttagaggccccc

SEQ ID NO: 416622 - DNA, 299 bp, Homo Sapiens
ttgagtcatgctccggggggtcattgcctctgcagcatagacagctgcccaaggtcactctgctggagagcagagagcaagggtttgcctgaaggcctgtccaagcctcctaatacccctgcctttcccagggtccaggctctgtgtgctgtcttgtcctatgggacttgatggccctgcctgggatggacagcagacaccagccctgctcacacccccactcacaggcggggccttcagaggaacagggagccccagccagaggcaagcagatgatgctgttgagagtccaggaagga

SEQ ID NO: 416623 - DNA, 898 bp, Homo Sapiens
  misc_feature (531)..(531): n is a, c, g, or t
  misc_feature (810)..(810): n is a, c, g, or t
tgggggcaggagttgtgcaggggactttatcgcatccaagcatctgggagaagagaaggagagtaaggcagcacagtcctcaaaatgggctccgttcctgcaactgaatgagcctgcggcccagcctcgacctccccagtgtagatttctccaggagactcgattactgagccaggctggcttcagtgattctcaaagatggaagcaaaatatgcagcattttagctggttccaccaagcagctgtttcatttgggaggctggatggaaaggtgtgtgtggcacgagtgtcctggggctgtgagtccacccaggacctggttggggcagaggccagggtagaggtggggggtacggaggcagcacccctttctggaatagtcccatgttttcttctcatctgcagtttcacaacacagaaaacgtacacttaacaaaatccttgcttactcacagaagactctcataaaggtaggtactacatttattcacagaaatcctctctggcatttttatgattagcaaaaagaanaaaggagaaagcaagagcaagcaaacaaattggaactggtggtaggactgccaggctcaatgaggaaaaatataggagacctagttaagtttgaatttctggtatagtaagattttttagaataagtgtgacccatgaaatatctgggaaatgcttactatgaaaaattacttactattttgattgcccatggtactggggcatcctgtattacccttattgggtgtgaatgtggcctccccaccctacgttttcctccaaccatggtgggggtggcanttggaaggcaagcccaacgggccccaccgggaaaagaaggaccttcttccccagcagggggcaaaggaagaaccttggggtttttttg

SEQ ID NO: 416624 - DNA, 901 bp, Homo Sapiens
  misc_feature (445)..(516): n is a, c, g, or t
  misc_feature (752)..(760): n is a, c, g, or t
ttagctatttctagaaagaacacctgaaaagtttttgaaagtggcctgtcttgatggacaggcagcaaaaatgacaggtgtcagtcttactgcaacaatggtcatgacctggggaaaataaatcatggtcagagtaggcgatggcagctgtgaaaaagtagaacagtgtaaaaatgaagtcatagaatagtggttctaaaacttgtatatccatcacctgataaactttcaaaagcacagtttctttggtcccaaatcaacccagtaagtctggttaagaaagtttagttaggtgcaggaaccagcattcttaacaagaatatcacgtgattctgatgcaggggtgtctattagagctgtgggccttactgacctcattcgatctctgtgcaataattcatgtaccaaggctctgaccaccagagatcccgattatctatggctnnnnnnnnnnnnnnnnnnnnnnnnnnnnnnnnnnnnnnnnnnnnnnnnnnnnnnnnnnnnnnnnnnnnnnnnatccatttgcagtgaactagaaagagaactgacctgagaaaagtctctggtattttaaaaaggaggctcatgtgaattcaatcctttgggcaagtgacttattctttctatgactgagtaaatcttaccgggaaaatgtatataaacatgctgctctcccctacatgtaaggacattgtgaaaaacaaaatgtaattatgtctaggaagagctttgaaaaggcaaaaggggtttannnnnnnnnacccaatgtaagatgttattacaatatttttaaaactatgtagcctttaagcttgggtgcggtgggctgaacccttgtaaatccccagcacttttggggaaggcttgaaggcaagttgggaattaccaaagttcccaaaag

SEQ ID NO: 416625 - DNA, 952 bp, Homo Sapiens
  misc_feature (651)..(651): n is a, c, g, or t
  misc_feature (691)..(691): n is a, c, g, or t
  misc_feature (701)..(701): n is a, c, g, or t
  misc_feature (726)..(726): n is a, c, g, or t
  misc_feature (732)..(732): n is a, c, g, or t
  misc_feature (813)..(813): n is a, c, g, or t
  misc_feature (825)..(825): n is a, c, g, or t
  misc_feature (905)..(905): n is a, c, g, or t
tcatgcaccccctagagggtacttgctgccctgctatgagctgctgttgagactgagatatgagttgaccacacttctcacagcttcctgcttatgctgcttgcctgaatggtgccccaccctctttagccccaggcccaaggtgcccttttgagagtttaatgctgggctgagctccatgctttgtttagtttgggctgatgtggctgtagcctctgcttggctaaggaagaacagggagaccaggtcatcctactcatacctaggacaatactcacagctctgtagcaggctgctgtgagacagatgtgaatgaaccacactccccacagcttcttgatcatgctgcctgcctgggcagtgatccgccctccctgttttcaggcccaaggcaccattttgagaatgtagtgctgagctgtgcctcatccttggcctgagtttgggctgatgtgactgctgctgccacccagccaagcagggaaaggggaccaaggctctcctatatatacctaggacaatgtccaatgccttgctacgagctgctatgagactgagacttgagtggaccacactcctcacagcttctcgtccatgctgctcgcctgagaggggctccccactctctaggtgcaagccccatggctgacnacatttttgagagggttagaagcaattgttttggtaaccntggcagcggntggccacagccaagcatttttggtntcttangtggagaataaaaagtgctttggttctgggaaagggggagaaaagggtccccccacagggccagaaattgaaaccaattgnaattgttggaanaaattgcccccaaattaatttaaggttgggttgggaaaatttaccgctttttccttccccatttcacaaagaaacttganaaattgggaaagggaaaaaatttttccccttaaaaacccttaaaggg

SEQ ID NO: 416626 - DNA, 535 bp, Homo Sapiens
gatgtaggctttgctcttctgcctacatgaaaaacaatgttgactacctgaagcaggagtctctcaaactccctcctctgatctccactaccttccaatgtctgtttacaatttctaccactggataaacgtattgagggtcaagttagggccaagcaatggtagaaaagagttatggagaacatggagccatgaattacaattaaggagaaatcatgtttaaagaaattttaattttgagggcaaagaatcacttaaaggccccacggaagtttcaagaaaccaagcccctggggccaaatggtagttaagaattacccccctggtcctccttaccgaggccgagaaaatagaaaaagaataaaatgcgggccccgccttcctaggaagttattccccctccggagggggggccccccatagccattaaccacccggaaaacccccaagcctttttttccttttgtttaaccaaaaaagggtggggttcacccccactaataaaagatggaaaaagtccgcgctttatttttat

SEQ ID NO: 416627 - DNA, 906 bp, Homo Sapiens
  misc_feature (84)..(96): n is a, c, g, or t
gtattttaaaccattgaaagctcacgtccaaatcacttgaaattatatttcacataaaatttcatgtgaaatagctcttgcttnnnnnnnnnnnnnttctgacttaactatctttagtggaatggcagtttatagtcccaatttcccataacatcctgcaaatttaaaagaataattcaaacatttaatatcttaaataatgctctattggtctttgaaattagataaatactctacttccaaaggggaaatgtctatctttgcagaaagtctctgttgataaatttttgtaaagagtaaatgtcatgcagtataaaataaaattgtattcattccattaaccttttttctttgaaagtggatgacattttatatcatatgactatctttatggtcagttatattattattgtatataagttatcacaatgaccaggacttcttgtgactttttatctatgggaaagaaacagtttcagaactaaggggctagcttttggttaaagatactggcttaaataatcatatttacccctacttttcccctcaaactctaacgagataatactaaagacaaattataaaggatataaaccctcttgggtaaagcacacaggagaaatgataaaagtaacataattttggaatctagaaaagaggtggatgaatgataactcacttagaagacaggagaaaatgactcatagcctggagtggagaaagccaagaagcaacttattgcataggactcagtaattgggtggcatcaagtaatctctgaaactatgggggaacagtgaaagctaaaatagggaaaatttaattggaaagctaggattaaaaaaagccagtttagaattcccttcagagcccggtttccctttacccccagcccaaggcctaacc

SEQ ID NO: 416628 - DNA, 1320 bp, Homo Sapiens
  misc_feature (90)..(377): n is a, c, g, or t
  misc_feature (382)..(563): n is a, c, g, or t
  misc_feature (962)..(962): n is a, c, g, or t
  misc_feature (1014)..(1014): n is a, c, g, or t
  misc_feature (1023)..(1023): n is a, c, g, or t
gcccagcaaagacgacgaaaaaccgagctggtacggtccggaattctccggatgcccagtggatccccaaatagccagaacaatctgttnnnnnnnnnnnnnnnnnnnnnnnnnnnnnnnnnnnnnnnnnnnnnnnnnnnnnnnnnnnnnnnnnnnnnnnnnnnnnnnnnnnnnnnnnnnnnnnnnnnnnnnnnnnnnnnnnnnnnnnnnnnnnnnnnnnnnnnnnnnnnnnnnnnnnnnnnnnnnnnnnnnnnnnnnnnnnnnnnnnnnnnnnnnnnnnnnnnnnnnnnnnnnnnnnnnnnnnnnnnnnnnnnnnnnnnnnnnnnnnnnnnnnnnnnnnnnnnnnnnnnnnnnnnnnnnnnnnnnnnnnnnnnnnnttcannnnnnnnnnnnnnnnnnnnnnnnnnnnnnnnnnnnnnnnnnnnnnnnnnnnnnnnnnnnnnnnnnnnnnnnnnnnnnnnnnnnnnnnnnnnnnnnnnnnnnnnnnnnnnnnnnnnnnnnnnnnnnnnnnnnnnnnnnnnnnnnnnnnnnnnnnnnnnnnnnnnnnnnnnnnnnnnnnnnnncatggaggatagagagcgcggtgcccaaggccggaaagggatcaccctgtagcccccggcaggaggccctgaggtcctgcccgatagcgcccgttggaatatataacccaacgtgggcgatttaccaccgcccctgggggcctggccaataaatctttagatcaacccctttagagtttttttcgggtacccctctacaacaaaaacaacatgttttgggtaatgtcccccctcctgcatacggtgtgggaacacattccccagaaagaggcaagagcggcgtttactgcgtggcgggtacagaagaacccatgtctacacccctttctcgtccgtcgcccccaccctaaacaccccgcataatgcttccccggacccccctcacattttctccctcgntcccccaataaccacagacagacacacatttttctcgtttggaatgacaacntacacaccnctctcccgtctctcgggcgaacacttcttactcggtgcccgaaaacattgtgttaaccccgcgcgcccagaattgagtgtatgggtaccacacgtacgcgcctcccgccgcgaacgctaaaagtattgtttcctcgctggcaaaccaaaactaaacctcgccgcttgcgctttcgtatacagtttatactaaaatttcccccgcactcatcatcccctctaatatactaatagtacaataaatctagttgtcttgttgtaacgctcccctccctgaaagcagatctctgggcgcctc

SEQ ID NO: 416629 - DNA, 718 bp, Homo Sapiens
tccggatgcaaagcaaaacagcattagtgtaatcagtcccctatctttcccaaatctgccttaccctagtagttgcaggggatattcaaacaggaggcctggagaaagtgcttttgaacagcaagctcctttgttttcctcccttgcctctgaccactctggcttttaaattctcaaatttgaattctcaaattagattttgtctgacctttagcattgcttggcaactatgaagagtccattttccctactgtggccacggtctgaaccacgcattctgatgctaagccactgcatgtgcctgactgacatgacactgcaggctcttggcccccattcttcccccgggagacaagtggcacctgatggcattgccaacttctcactggttaaactatattgaattgtgtccattgccagcctcaactccctcccaggcaaggaggaaggccagggctctgatcagggctgaggtttcaggagctggactagtaatggagctggggttgatgaggaagtggggaagtgggggtgactgctggggtgggagcaaaaccaaggccgcagcccaagggttgaagtttttgaagaaaaaagggagggcccatttttacccactgggccaaaaaaagaaactggtgaaaaggaaaagaatggcccttgcctgggggttattaaaggggcccaaaaagaaacccaaagcccagaaaagtaaaag

SEQ ID NO: 416630 - DNA, 943 bp, Homo Sapiens
aagctggaccggtccggaattctccggatctgtactatatgtgcaaaaccaatactctagcctatcacatgtatttttcaagcctactttgtttgctgctggtggtgttgattgcagtaatgggtacttaaagcatcaagttatctctgcctcattctgcataattgttcagtggattcacttccctgtcagatcaatctccccccatacactccctgagatgttatctgggtacatagagcccagagttgtcctgtgacatcatggtcttgtggggagaggacgcctcagatctgagtgttgttccccaggttctctctggcctcccctgggaggcaatgattccggtgttgtgcccgtacagttcactatggaaatcagggatgatgggtgtgtgtctcagctgaggcagactgcacagaccgtcatcatcatggcgcatctcgaggtctgcagtccattccatcctggcagcctgtccatcagctattaatttcagaaccactttgactctgttgcagtgaccatccttggaaattttatccagccatatcaggtaccttctgcctcttgcacaggacttagagaagtatcccaaatgtcatctttgcccatgggaattgaggagggcctgggagtgctagcgtggatggcttcttacctagaatagcagccctgtctttttattctgacaggaccacaccacctcagagcaggtccgcttcacagacacttccctcccagattttcaagcactctccacttctgcttttcttccagtatgtcccgaccagcttcccctccactgcaacccttcaccatttcaacaacttgaagtggggagctggggacacattttgaatggaatccccctgcttgctccccttatcccttcaaattgtttagaaactcccttttaagttcccccttttcgggttttacc

SEQ ID NO: 416631 - DNA, 420 bp, Homo Sapiens
ttaatagttggggaacaaggccaagagaaatgaatgaacatgcccaaggacatataatacgtcagtggcagggaagggatgaatctcaggtcttctcattctcagagatctggcattttataatgttgggcaggtaccaaaccagttcttgtttggcttggtacatttgagtcctcatgtatacaattgcaatgaactaataagacatctgttcaaggtcatatctctgtttgctatttacactggtgatgattcttaactattatttttaaatgaaggcatttgaggggtttaaacagtgcagcgagattaaaacatttcatctaatgtattgcatgtggttgcctgtctaggaacttctactgtcaatagaaactttattattttgctaaagattagacttattacctgctgtttaag

SEQ ID NO: 416632 - DNA, 913 bp, Homo Sapiens
  misc_feature (838)..(838): n is a, c, g, or t
taactgatattgaactttctttcctaagagttaaacagcaaccagcccagccagcctcccctccctttttgtggtttcaaaacaactgaccagcattcctttttgataagagaccatccaccatggactcattctggactcattacagacgcaggacacaggatgcctctatgtcctctgcttcactttatatctattctaattttaatgcatttaaatgttaagtttacaccacaaagtgaacatgggacatatgtaacatacatgtttgcttactatacatgtaagtgtgcatcttttgtgaatattagtagctcctcctataacctgttggatgtgtttcctttgtcaatccattcagcataaattcctgtctcactcttccctcccttgaaatgcctccttctggtttctgcctgaggctacacttcccagcctgtaggatggtcatcctgcaatctccaaccctttataagagataagccttataaaccacatcataaaccataaaccacatttatgaacctcgtgattcttcagttgacaggggcaggaggtccctccatctgtcccacttaccacagctatgaggacctcagggggcccactttcttacacagtgctctgtattaataggctctgggtaaagaataatgcctcctcttccagctggacaaggactagaaacaaagtgggaacagaacctctgatgttaaattgtacagcaaaggtagacacttatggagataagggttaggaaggagtgatggggggaaaaagttggaaatactagtagccagggatccctttttatcaaaatgttactagaacctgttcnttccccccagaattcctcctggcccccaagggtaaagccaattttgcttttacttttccccatttctatttcacc

SEQ ID NO: 416633 - DNA, 552 bp, Homo Sapiens
ttttacaagtttaagatgtggaaaactttttttaaaatggtaatacatagaaatgaaatatattcaataatattatttctttccttgaatgtgtggttatagttactactacattgtcttgataattacttaatttatagtctaaaatgatgttagtcttttagggtgtatctgtattatcctcccttaagttccatagaaattttcataaagtagataatatagttggttagatatcagtaatactgtgtatttgccagtcagttcctcagagaagcacatcatgttccagtaacattagctcattaatcctcactactcctttgggagggctgtggtccatgatggtgtcagtcttatatgtcataaagagaaactgggaatctcagagtttaatgacctcacccagatgccatgggctgagtcatatggaaaaaaggccagaaatcttcagtctttttgactgctcctctcactcataagtcattttttattaccccaaagatacacaagattgattattaatgctctcttcttgtaagaatgggactg

SEQ ID NO: 416634 - DNA, 467 bp, Homo Sapiens
aagctggaccggtccggattctccggatggaattatgtagcaagatttgaaaattaccaaactttattttgttagttttctttggttccttttctatgtttctgtataccttatctgctttaaactttaaactcaaggattaaagtgactctaaagcacttcggagtgatccaggaaccacatggggctggatagcagtttcctagagcaaaatgacaagccctgaaaagcttactgtaggccatcgagttcatacatggccccctgtcagtgggtagataagctgtgaacctaggaatatggatgcctgtgataactggtcctcactcttcttcctagacaaagtttcagatctctgtgtctttctgggcatcttcgaaaacttccattccccatttgccatgtaagccagactcatgtagaagttaggatttgtagaccctggaggtaaacagcttcctccagaa

SEQ ID NO: 416635 - DNA, 577 bp, Homo Sapiens
  misc_feature (296)..(296): n is a, c, g, or t
  misc_feature (457)..(524): n is a, c, g, or t
ttataatagtaatgtaatgtctgtctaagcatgaacagtgtagcatggcaaccatgaaatatgctatagctttaaaaacagtgggggaagaaagtaataccaagtgcagaagatggataattataacctatgagaaggaaaaaattcttcacagataattcagtaaaatttctcatggccaaagtgatgaaacaatggatcaaaatgagagatttctgaacaagagggaataaactgaggattagaataacattttagaactaataaatttagtgcagcaaggaaaaaaagatacngaaaggtaaatagagatttgggataaatgttttttaccctaatgttaaatacttttgtttgtttgggattttggaagcaatcctttccacctttttgggccttggaaaattcctgggaatttgggttaaaaagtcttgcagtttccgcaagggcccttccnnnnnnnnnnnnnnnnnnnnnnnnnnnnnnnnnnnnnnnnnnnnnnnnnnnnnnnnnnnnnnnnnnnnggttttggaaaaacccttataaaaacccccccctctttatattttttttgtgg

SEQ ID NO: 416636 - DNA, 424 bp, Homo Sapiens
  misc_feature (156)..(156): n is a, c, g, or t
  misc_feature (176)..(176): n is a, c, g, or t
tgagattgatggcaggtcctggtcaacacgtcagctctgcgtcagagtccatgcctcaagcccaagctgaagccccatccctgctgctctcccaagaactcctctgctagggcaggccccttgcccttgggtgccaggtgggacctgcctgatggnatggggtgcttggcatatancacttgccatgaactcaaggtgaccctgggggcctcctgaattgtgatggggcctagacccaatgtgctctgatgtgacataattctgtgactttaccttgccctgtttactccaaagtttccagcctggtgccagcagggcattttgcaccctccaaccctttacttttggtttcccaaagggtttttaaacatttgaaatttttttccccaaccttttaaacatttgaggaattttcccttttttt

SEQ ID NO: 416637 - DNA, 827 bp, Homo Sapiens
tcctgggttcaagcggatcatccttttgagctcctagtacctggctatgacaagggtccatgcgggatttgaatccacatctacctgactccaacaccagagggatgatgtggactggcttcctgtggggaggggaggggactgacagccagcctctggagggagtgaccaagcaggactgcccatgattgctgctggtcacacccgcttggactcttagattgtgattggctgttctgtgccagatgctgggtcaggacagagaaatgagggactctcatctgtcctgtgtctagaagcctttttggcagagggatgtgtttcagaagtgtgggtgactggggaggggatcgatcagcccaccctaacccctgaagtgaggctcataagggaggtcaactgagagctctggtgctttgggactgtgctggtatagaattgaagggactgtaactcagatgatgactcagagccccaggaaggatggagagatccaagaaccatggggagggggtaaagatcagcacggatcatcccttcaaccaatagcataccttgagatgcagtcgatttcatacctcctgggtcccaatcctcaatctgggcagttgtgaagccggatagtgactgagatcactgggtagaccttgtccaccttggcattcttgtctgccaaggtccatggcccatggggatggggacaatttgagtgggaccctgcccaattgggcttattccccagagccaggagcatctttactgcttaagaggtcacaaagggtttttccagacctggatgaaaatggataaacggccttttccccccc

SEQ ID NO: 416638 - DNA, 681 bp, Homo Sapiens
  misc_feature (74)..(82): n is a, c, g, or t
  misc_feature (91)..(345): n is a, c, g, or t
  misc_feature (580)..(588): n is a, c, g, or t
tccctctctcccctgtctcgaatcattttgggggcataaacataaaacctggaaatcaacctgttttctaatcnnnnnnnnngagacagannnnnnnnnnnnnnnnnnnnnnnnnnnnnnnnnnnnnnnnnnnnnnnnnnnnnnnnnnnnnnnnnnnnnnnnnnnnnnnnnnnnnnnnnnnnnnnnnnnnnnnnnnnnnnnnnnnnnnnnnnnnnnnnnnnnnnnnnnnnnnnnnnnnnnnnnnnnnnnnnnnnnnnnnnnnnnnnnnnnnnnnnnnnnnnnnnnnnnnnnnnnnnnnnnnnnnnnnnnnnnnnnnnnnnnnnnnnnnnnnnnnnnnnnnnnnnntgagccaccccatgcctggctgttttctttactatagagttgcagctttggcttattttgaagacaaattgttggttatcaatagactataagtgctaagtctataactcatgagtactatttctaatgagtatattttcctttcctgaaaggtgcagattcccttttaaagaaacaacttcggcctccgtgatgaaaaactgaatttctccaaaaaaattctaccccaggttcnnnnnnnnnggccaatggtccatcccctcaaaaaagcctaaattttgggaaaacacccaaaaaaagcctcgaaaaccccttccaattggcgagaaaccttgg

SEQ ID NO: 416639 - DNA, 974 bp, Homo Sapiens
  misc_feature (670)..(670): n is a, c, g, or t
acattgttgtttcttacaaaatcagtgaagtgatagggaatcttgttcctcctacagctatttttccagttattttgcatattattctaatagcttccaatggatccacttgaatcgagtgaccaatggaaaggttaagttggagtaggagaaagcattgcaactaattaatatgtcagaggagtacagccctagccaaaagagttaatgaagcttgctaaggacacatgtgggtcttttgtaacgcaggcctgactgtacagcctggttaggttaaattgtctgtcagttactggccagttggccaccacctggctgcctaggctggtctttcccccatcccaaacagccctcttcccagctctcaatggcaagctgctgccactaaacatctagaagcctctgacaaggtttgggcacacaatgagctcctgacatgtgaatgaagggccagggcaacactctgaatggggaagatttaccccatttaaactcacaatgttcacaacaacacgcataaaagaaaaagcccatccttgctgtcaggccattaacatttataacaatatgctaataaccttctagattactttcagtttccaaggacatttaaatacatgaattgatggcttcagacgtaaagggggtggtgggggagtagagaagaggngcggttggttacgaagaaggaagaaacaaaagcgaatggaagaaattgcaatctatctcacagaacactacttttttaagccttccacccaaacagaagggcttctgtctatagaaagattataggtcaggcttacacaaatgaccccgctaatgtttaatcaacgatagggcacatcctctgaagtcatgcattttaaacatgggcagtttgtggatcataaaggtgggttccctgaattcaaagggagtttttaaggtcaagcccctggaacccttttgccttttcccgggtaaggggggta

SEQ ID NO: 416640 - DNA, 974 bp, Homo Sapiens
  misc_feature (356)..(365): n is a, c, g, or t
atctgatgcttaagggctctcaagattcataacgacatcttgtgcttcttaggcaccctacttatttacaacatggtttcagcatgtccatataaaataggcaaatagctcactccagaaccgcttctcataatttagcttcacctttacacccagctgtctatcttcagtagaagtctattttttttcccttttggcctctctcctggccgtgggtctctaaatgaaatacatagcatggctcagctgccaccatcctagttgtaaaaaatcacacatctactagttagtctctgttagccttttgcaaagaaagactttgtagaaaatggattttctaatagatatatgccacnnnnnnnnnnaagtaacagttttttaaaaatgccttctgattacattttcttagcaaatcacatgctactctatttctaaagttttgtaaaagactaaatgaaataataaaatgatgatttctaatgtgtaagtcatttgatacaagttagtagtcaggaagactataaattatttcaattgattgtgatttaaacaatattgagatgaacagagattctaacatttattttgtaacaaaagatacagggatattctctatattttgttaacgaggcagtgaccacacagctagcaagttgttgagcaaagattattatcctggtgttctgactcttgaccacacaagacccgctcacatagcaaggctaaaaggtgcccagatgcaacataagggtgcttgcattgccttcttcacatttctgctaaaactgcacccagaaactgggtaacaggagcaccttttgacatactcacggcactaatccttaaaatctccacatacatttgcacatggctccctaatgcaggtccttggcaagattaaaaggaaaaattttttagaatggggctttggaaacctaaaacaaaaaagtctacctgggggtatttaacccccc

SEQ ID NO: 416641 - DNA, 884 bp, Homo Sapiens
  misc_feature (155)..(221): n is a, c, g, or t
  misc_feature (334)..(668): n is a, c, g, or t
ttgcatgaatcactggtgcaatgcctcattaatttgcaaaagtaaggattttttttaagtgacatactctatacttttaaattctatatacacattacatattaggtgaaaagattagaggctacaaaaccattcctgatttgattgctttaggnnnnnnnnnnnnnnnnnnnnnnnnnnnnnnnnnnnnnnnnnnnnnnnnnnnnnnnnnnnnnnnnnnnttcaattatttcttccctcttttgtttggtaaaatagtagattgggcctcccttctctctgagtccttagaatatacacatgctcatacatctacaagagtttttcaaatagnnnnnnnnnnnnnnnnnnnnnnnnnnnnnnnnnnnnnnnnnnnnnnnnnnnnnnnnnnnnnnnnnnnnnnnnnnnnnnnnnnnnnnnnnnnnnnnnnnnnnnnnnnnnnnnnnnnnnnnnnnnnnnnnnnnnnnnnnnnnnnnnnnnnnnnnnnnnnnnnnnnnnnnnnnnnnnnnnnnnnnnnnnnnnnnnnnnnnnnnnnnnnnnnnnnnnnnnnnnnnnnnnnnnnnnnnnnnnnnnnnnnnnnnnnnnnnnnnnnnnnnnnnnnnnnnnnnnnnnnnnnnnnnnnnnnnnnnnnnnnnnnnnnnnnnnnnnnnnnnnnnnnnnnnnnnnnnctcacagtctctcccagggaccttatgtcaaatctggagaggggagaagaaatgtatgaagacagaaaccattttatgggagcatgggggctctgccagggcgcaagctataagatggttatcacattccatccttctcagcccaccctggtgaaaggaagttatccaccaggccccatgcctgaacaaaagaaattggagggaaaaaattccggg

SEQ ID NO: 416642 - DNA, 728 bp, Homo Sapiens
  misc_feature (586)..(586): n is a, c, g, or t
tgatgctgggaagtttcttacagcagagacacaattgcactgatggatgtagtagggaaagtctgcacccttaccccaatgagcaggtgtcctccacaatcatgaagcgtattaaagaaggagtccttcttgccccctgatacaccactggagacacaactggggcttctccaatgggaacgtagtgtggatgtacctaaagatagccttcccagaataatgcagggtgattgcagtttcgtagaaggagcactccccagattcctgcctgcacaagaggaagtcataattttttacacttggaatataaacattcctagagataaaaagagatatctgtctgatctgaatagcatgtattagtctgtttttatgctgctgataaaggcatacccaaactgggcaatttacaaaagaaagaggtttaggggactcacagttccacatggctagagaggcctcataatcatggcagaaggtgaaaggccatctcacatggtgtcagaaagagaagagagcttgtgcagagaaacttccctttagatctcatgatcagatctgaaccatcagatctcatgatactttnttcactatcacgagaatagcacagaaaagactcacccccatgatacaattacctcccactgcattcctccaacaacacgtggggaattgtggggagctattatttcaagaggagaatttggggttggggacaacgtcaaatc

SEQ ID NO: 416643 - DNA, 867 bp, Homo Sapiens
gctttataagtgatgaaattaccggcggtgagacactgcgacacgcccaaaaattttgtaatttctcacacgtaacatggaccggctggttcgtcccacccttctccgcgtggtaaataagccctactaatacccgcggcggtctttagtatatacgcgtacgcgacgtttaatatataatcgagccagcttcgaccactgttacactcatccctcggcttctattcgtgctccccccgctaatccgtcgttaatttccgcccggcgcctgtgttttgttacacctaccccgccgttatatttgttttgtgctgcggcccgcacgcgccggtatgcgcagcacaaataggagcaagatgttgggccctattgagatagtgttgcgatatatataacatatacagacaccgccccgctgttatatggtttttcctccgttctaccccattcatacgaccacccggttgtaatgtagctcgggcagctgtttatggatacatacatcaacatctcccgctgtaagttgagtatctgctcgcctttcgtattagaagccgctgttcttccatacacgcgtagttgtttgcatccctcctagggagcggaaggatcctgcggccaccactactcttgatgtcatattgaattcggttccctagatattgccctctataacacttggcggggtgtagttcttattactcattttcatcgcaccagcccgggctaccgttagattgtgtggatctgctgcgcgacgttgattacaagcgtgttcatgttgccgttatgtttatttgttcgtgcgctctcgccgcgctccgagaacgcaagacatgtttatattatactcgcgcaactcacccc

SEQ ID NO: 416644 - DNA, 691 bp, Homo Sapiens
  misc_feature (19)..(19): n is a, c, g, or t
aagcttgggtaccggtccnggaattccctgggatgttaattatctctaccagagaaaaaaactatgaggtaagatgatagctggtcatgatgcagctcactgcataaatatgtatggtgagtaatgggtgctgagattttgtcttgaagtggggctgagctggtctagcctggctgcatggattgagaattcaagtaaacttaaacagctgtcctcagtagcctcaatgacattctccaaaagaaatgagattttcaaaggcaaacaaaccaagacaaccgactcttacctgccacgaggggtattatttttggaacttcggtgtgaataagcatttaaccacaaagcaggtcattaaagacaagacaagataaagctaccctgtatggaggtccactctgctaaatatttatgaaaaacagttactggaaaaacttttccccactgaccatgtacaccgatgcacgtatgttagtatgttcaaaaaattaactttttcaaactgaatgaaggctaatgtccattatttacattaaaatcaaaatccctccaactacagattttatagagctagtctcaaaactgcttttacagagaaactgaccccccatgaacagtaatactctaatcataaaactgcagagcatgatcaaagcacaaaaagataatgcataaggaaaccacttgataa

SEQ ID NO: 416645 - DNA, 907 bp, Homo Sapiens
  misc_feature (212)..(507): n is a, c, g, or t
  misc_feature (609)..(668): n is a, c, g, or t
aggctggtccggtccggattcccgggatctcaattttttacaggtagtctcttttaggaaggggggaagagaaaaggacatttaattaaatgaattactttccagttgctgttatgatgaaaatgagcagtaatatgtttcagagacaggtgccctggagttcaacaactaaggttttgtctggccaaaaagcaacttgctaggtagtttannnnnnnnnnnnnnnnnnnnnnnnnnnnnnnnnnnnnnnnnnnnnnnnnnnnnnnnnnnnnnnnnnnnnnnnnnnnnnnnnnnnnnnnnnnnnnnnnnnnnnnnnnnnnnnnnnnnnnnnnnnnnnnnnnnnnnnnnnnnnnnnnnnnnnnnnnnnnnnnnnnnnnnnnnnnnnnnnnnnnnnnnnnnnnnnnnnnnnnnnnnnnnnnnnnnnnnnnnnnnnnnnnnnnnnnnnnnnnnnnnnnnnnnnnnnnnnnnnnnnnnnnnnnnnnnnnnnnnnnnnnnnnnnnnnnnnnntacataaatataaataagtaaagacacggatattgtttctagtgtttgtgattggaaagtttctaactagattgcctctgcctttattgtactttctaagcnnnnnnnnnnnnnnnnnnnnnnnnnnnnnnnnnnnnnnnnnnnnnnnnnnnnnnnnnnnnacattttggtaaatttgaaaagcataattttacagaaaaagttgggtaagagttaaaagcctgagcctgctgaaatgctttttttagaaatactttttttcattatgaaagaaaaacccattcagttttacttttttgtctagattctgtggttacttttaactaaacagatgttgcaaccttttgccattttttatggtattccattggaagtgtttaaataatttgttggaaattga

SEQ ID NO: 416646 - DNA, 394 bp, Homo Sapiens
  misc_feature (327)..(335): n is a, c, g, or t
gaacttgattgtatttagctgagaaatcgtgttttataaattcatttccctgctttttaagagtttttgcatctttaacttagtttcttagtaatgggccttttgggaattttaggcttatgctactcaaaaaagagttttgtcacatctacgctgacggtagggagctagggaaataccagggcccagcatggatggtgccagtacctgtcaaatgtgtgtaaaagttgaaacttgggtgggctagggcattggtgggctcatgccctgtaaatcccagccattttggggaagccttaagggtggggcgggaatatattctaaaannnnnnnnnttctttaaaacccccagggaaggttttttgaaaaaaaccctattctccgggggggcccc

SEQ ID NO: 416647 - DNA, 148 bp, Homo Sapiens
  misc_feature (16)..(16): n is a, c, g, or t
tctggtaccgtgtccnggaattcccgcggatcccagagcgatcagaaacttggaataattcctaagctgaaatgccaataattgcagtaattttttatgtgatgtccctaacaataatgatgtttgggtcaggagattttaaagaagg

SEQ ID NO: 416648 - DNA, 965 bp, Homo Sapiens
  misc_feature (26)..(26): n is a, c, g, or t
  misc_feature (802)..(859): n is a, c, g, or t
tccatctccactcattcaggtgcacntttgaacacaacatgcaatataaacatgtgtgggtttcaagctggttttaggaaaaggcaattgcattttgaaacatttcatctgcaaaatcaatggattgggaccttgtcagatatttgcttagaacaaataaaagctattatgcactctgtaaaatttaaaacacccacataaaaagacttgtgtagggatgtctctggcaaacttttgaccaatcagatcttgcacttgtggaaccagtcagaactcacccatgccctgaataactctttagatgatgcaactcatgcttagtgacttaagagaaaatgataagtaacacatatttatatacgtaatacatttatgttggtataactattatgtttgtgctaacacagttactatgaaataattactgattaataaactgttaagtcctacccttaacaaaggtgaaaactttgaatcgggttatataaaaagtcaaaagcaggtgactcaagagggatgcactttaccttgtggtgacttgagcttcctaagggcctcaccaagttctgagcaccaggcaccacagctccccacaggaaaatattctacctggaaaaccaaaggcagctagggatccaagaaaaaacatcctactcctgggaattcgctaatcttgcagaaaaattgcttctccaagttttaatatggtcccgggcttaagaggccaattttaggggggttaagatcctaaattaaattttaccatattgtgattcaaaacgttcttaagtatttggacccnnnnnnnnnnnnnnnnnnnnnnnnnnnnnnnnnnnnnnnnnnnnnnnnnnnnnnnnnntggaaagggataattttttggccccaccaaaaccttcccatcaacttttaagaaatttcccacaccccggattttccaataacctagtttcccctgggtttattct

SEQ ID NO: 416649 - DNA, 729 bp, Homo Sapiens
caatatcatttttatttgttacatggtatgccctctcaatggtcagatttagtgattccttcattttgggggaatcctccctgaattatccttctgaatatactttttattttattttgtaatattctgttaaaaaatttaaaaatttcccttttccttttgtcttatcacatatgtgatttttcaaccacgtgaatgtgaacacactgtttaaaaattttcttgagtttttgtattagggtcctctggagaaacaaaactaaatataaatacagatacaaaaataaatataaataagtatatggagaaagagagagattttaaggaattcgctcatgcaatggtgggagttggcaagtccaaaatctaggcaggcaggagacccaggaagagctaatgtggcagcctcaaatctaaaggcagtcggaaggcagaattccttcttccttgaaggacatcagtctttttcttttaaggtcttcaactgattggttgaggcccacccacattggattacagatgagagtattctgttaactaaaagtctactgatttaaaagttaaccacatctaaagaataccttcatagcaacatctagatggggtgttaaatcaaacttttttagccaccatagtcttaaacaagtagaacccgtaacattaaacccttgacagtttcttttaattttcaaaaggtaaccagctaattcttgtgttaagatcattttc

SEQ ID NO: 416650 - DNA, 562 bp, Homo Sapiens
  misc_feature (66)..(128): n is a, c, g, or t
ttttttgctctgatatttatttatgtttgggaaaactgacttggcttacttttaaataaatttctnnnnnnnnnnnnnnnnnnnnnnnnnnnnnnnnnnnnnnnnnnnnnnnnnnnnnnnnnnnnnnnacctaccattcggctttacaaagtagaacaccttttgtacctctttacccaaataaatttagtcatttatttcaccaagatcatttaagaactaaatttgctgcaccaaagtaaagacttttctcctaacgaaaggttatttctttctggattttagcttttagtagcttcatactcttagttcacccacaagcctcagaagacaagcagaggcaataatgtgtccctataggctcccatcccattctttttctcctctttgagagaaaaattaagttcatactgaaactgcattttttctactgcctgtaatcttttatttattcaaaattataatagattgtaattctcatctatgttaaaatacaaattagttcatttttcggggaaccttgaggcagagagtagagcaataagaaaagaggaaggtttca

SEQ ID NO: 416651 - DNA, 737 bp, Homo Sapiens
  misc_feature (638)..(638): n is a, c, g, or t
gctgggtaccggtccgggaattcccggggattgaaattctattttaaattatttgacttcagaagatatttatgcatttatgttttaacactgatgtctgagcttctcagaattcacctcaaacaaaattctaaaaccataccatgaagatcttattcagaaagagctgaaaccctggtccgtctttctcctgacctagctttacattcccttggcaacctcttccatacttgagggttctgatgatcacgctcactatgaatattccacccacagcacccacaggagaggtggctacataaaaataagatatggccacacagtttctccgctcataaaagtggctcatgactgcagcttagttccaaaaatccagaggaatggaatgcaatgttaattccactggacatgaactttaggactgctgaagagcttccaagctgatttttatttgataacttgtgggtacaacattaaacccagcaagtagaaacctgaagcactggcctttcaaaaggttcacacctcagccatttggccgtttgcctcttttcaaaggaagctgcattactctgccatctgcccatgctggggacgagtctcttcagtgccaagcactgaagaacggcaggacccanatgcacacatcttgcggaggccttctcacttcagctcatcttctcccccacccccggcatttttgagaagaaaaatcgtagtttctagatcctagaaac

SEQ ID NO: 416652 - DNA, 866 bp, Homo Sapiens
atatttatggggtacatgagacgtattgatataggcatgcaatgtgtaataatgacatcaaggagaatggggtagccattccctcaagcatttatcctttgtgtaataaaccatccaattatgcccttttagctattttactgggaacttcttaatcttcgggcaaataccgaaattgttagcagagcctacaggtttctacattgagaagaagccttggagaacgtgtgcaagtgttgcagagccaggagatgagcagctcatcacacccaacagcccctacctgcccctggacggactgacttccagggtcagggtacagcgctgacctagatctggcctggttttgcttggtttggggccctgatttgtcatgtctgacacctgctctcaaagaagagcctggctatgtcatcgcagctccaggtatgacccaggctgctcttagatccattgctaatggaaactttatccaatgcctttcccccggttcttgttttggttccttaactgtaactcactgtccacatcctagctgctagacaagggttctgtttatctggcaagctcaggatagtgggctctgtgaggggatagggctggggtgatcatctgtgcgccatgtgctgggtgatttacgtacaaatcggctatttcaaccccttagcattctctgtatagcattatcacccaattacagaaaagaaaactgagctttacagtgggcaagtaggttaagctagtgaaggagcaaggactgggggtttccagccctaaaacctggggtaaaattctcaagccaagtggctttgtttccaagggcaacaagccctttgccagcgggcaccccgaaaggggaagaattt

SEQ ID NO: 416653 - DNA, 694 bp, Homo Sapiens
  misc_feature (282)..(292): n is a, c, g, or t
ctggaccggtccggaattctcgggatcacctgaccaagaatggcaggttttaaggaacatctggagccttaaacaaaaagctgttactttgaactttatttggagaaaagcaatcagagcagtgagagaataaataatgatcacgcctatgaggcaaatgagtttttctcaggtttaaaggtgcttgtgttattattacctggatagctttttgtttaagtgattatgttcccatagaactttttgtaattcatcaaaattcataggatgtggaaggccagnnnnnnnnnnngtaggtggtagggttattacttgaagttcaattcaataaatataatttatttttctatagagtcctttctacaaaatagtgccagcggctttactgtccaacaagactgagtttgaatgacttaagttatttgctttcagaccaaatggacttttatgaacattttgacttcccccctgcactaaatgaagtgatatagagctattctcgacataatttctgtcaccgccattatctttccttgctccagctcttttgcagagctccaaaatgacataaagtgataattgctgcagtatttcccctcatgaaggggatcactttttgcttttttatgggttgatcaccttcagaaagggcccttttttacaagggtgcttgaagtgggtgccaattgggggg

SEQ ID NO: 416654 - DNA, 567 bp, Homo Sapiens
aactttactttcttagttattgttgaaatatacattattactgacaatagtcacctgctgtgcaatagatctcgaaacttatttgtcctgtctaactgaaactgtgtacctctggaccagtaactccccattctcgcactccactcccccatcaaccccaccgccagcccaggtaaccatcattccacgctcattctatggtttctacttctagatttcacatacaaataagataatcagcattcttaatttctatcatagtgcctaccctatgttaccttccataacacagctagtggtaaatcattctctgatggaagtaaatcagcaataattagggaaacccatcactctatcacactacagggtccaaagctttgctgctcctgagggaaactgtacgtttcattttataaaaacacatgcaccacatagcatttcagtcaacaatggaccacatatatgagagtggtcccacaaaattacaatggagctggaaaatttttatcgcctagcatttactatactattctttttatctttatgactgtactccttctacttatt

SEQ ID NO: 416655 - DNA, 104 bp, Homo Sapiens
actcctcagggtattatttgaaagaggtgcggtgggggaggggtggagaccctttagttctaaagttcttggactatcattcaggctgtgaggagattgggtta

SEQ ID NO: 416656 - DNA, 739 bp, Homo Sapiens
  misc_feature (166)..(195): n is a, c, g, or t
  misc_feature (218)..(457): n is a, c, g, or t
  misc_feature (537)..(537): n is a, c, g, or t
tgtgtcagacacaaactgcagccagcctgtttattgctgtttactctaactgttgttacagttggagtctgtagggtagagtgctcttgttatccatggggcatagagttcactctgctaataattattaacagtatttattgcatacttactttgcatctctgannnnnnnnnnnnnnnnnnnnnnnnnnnnnnaagacggagtatcgccctgtcannnnnnnnnnnnnnnnnnnnnnnnnnnnnnnnnnnnnnnnnnnnnnnnnnnnnnnnnnnnnnnnnnnnnnnnnnnnnnnnnnnnnnnnnnnnnnnnnnnnnnnnnnnnnnnnnnnnnnnnnnnnnnnnnnnnnnnnnnnnnnnnnnnnnnnnnnnnnnnnnnnnnnnnnnnnnnnnnnnnnnnnnnnnnnnnnnnnnnnnnnnnnnnnnnnnnnnnnnnnnnnnnnnnnnnnnnnnnnnngggagaatagaaaacgaatgacggcctatacaacatgggtggggaaaggcgacgataagaccggcaaaaagagcatattngcaaaaacaaaaaggttattaaaccgaacatacccggaaagagacctaaaaccacgggggatgctgggaagcaaagttggctgcgggggaagagaatacaatgggtttattgaacgcgaggctctctcatttaccccgtggtaactccgtggaggaagcgttaataaacggaaaggcgatacaacttgtagaaacaagaaac

SEQ ID NO: 416657 - DNA, 598 bp, Homo Sapiens
  misc_feature (280)..(290): n is a, c, g, or t
  misc_feature (400)..(459): n is a, c, g, or t
agcattacggctggtcttggcggctcctgcctgtcagtccccgcactcttgggaggctcaggcgggcaacatcccctgtaacgtcgcgatttatcgaccaccctgaacaagatgcgagaaaacctcgttttttgctgaaactactaaaaattagcttgctggtgtgtccctggcccacatgccctgttaattcccaccctccctttggacaacgcttgacggcagggtttaaattctacttctgcaccccccgcggacggtttttccgtttgccgggtgnnnnnnnnnnnattcccttatataatccgccccctccccttcctagctaccccccattaccgcgtaatcccttttccgtccaccccgaataatctttaaccaactcgcgaccccactttannnnnnnnnnnnnnnnnnnnnnnnnnnnnnnnnnnnnnnnnnnnnnnnnnnnnnnnnnnncggttatacaacacgacccgcaatacgcctgtcgtgccccactaatttatcaccccccatatatcccccgcgcatatatccgccctatccctattttacatcacacctttaatccccgcccgtctccccgctttcgata

SEQ ID NO: 416658 - DNA, 1137 bp, Homo Sapiens
  misc_feature (301)..(301): n is a, c, g, or t
  misc_feature (304)..(304): n is a, c, g, or t
  misc_feature (307)..(307): n is a, c, g, or t
  misc_feature (393)..(393): n is a, c, g, or t
  misc_feature (1023)..(1023): n is a, c, g, or t
  misc_feature (1070)..(1071): n is a, c, g, or t
  misc_feature (1073)..(1073): n is a, c, g, or t
  misc_feature (1077)..(1077): n is a, c, g, or t
ggtccggaattccttcggatcttaatgtttcggggaagcctccattctaaccttgtccattctgttgcattccccgtgagcatccttaatctagtttgagctgggtttttggctattttctactttcaaccccaaagtgcttggctaaatagagaatggaaggagactttgaaggcttgcatgaatacttaaggcagagaggtgaacaccagctgcaaggcaaaagaagggagatttcttcctgcgagcggctaggcgaggcaagatggcagacctctgaggtccttctgcctgtcagganggntgngccttgaaaaaatacccccttgacagtcttcagaaacttgttttgcctttgaaattaaactttcccttggtaccgacaaattattnaacccttttgttgggaagaagtatttttcggggcaaacgtcgctttccccaacctctcccttgtggggggggattttccctaccttctatttccaagctatccacttggaaggaccagcgtatcccaaattccgtcttcgattacgccgcaagcgcgttctcccgttatcgcactccggcccgcggccgcctttttccgctgccattatacaattacgcccgggcttccctcccgcctacgtatacgtttgtccgccttcccgcctcttatatctcacctcctcgcctttttctacgtattctccccccccagcctccgctagataatcccttttttaaatacgtcccagtcccggcgcgatattttttcccccgccgtccatcacacaccgccggaaatccgctcttctctcgccgcccccctagttactgtattatactcccccgcaccccccgcccgcttttatatctcctcttcctccccgcccgccgtataattccgccggttacaatttcccgcccgtaaaatacccgaaccgcgcttcttctatatacaccaattctttcccgcccgctatttctcccctaatccgcccacaatcttactccgccatctttaattattttccncacgaaagcgcatacagcgatcccgcgccgctcttaactaacattcnntntttncccctccccccctattttcctctccccttcccaccttctaccgcaacagacgggcggggt

SEQ ID NO: 416659 - DNA, 1237 bp, Homo Sapiens
  misc_feature (212)..(356): n is a, c, g, or t
  misc_feature (1017)..(1017): n is a, c, g, or t
ctggaccggtccggaattcctcgggatgttacagtgaaagagttgtggcttagggaaaggcagatgatcagttaaccctactctgctaggtggggaatcctggccatttgtttataactctgatcagttccaagtctacaaagaggaggttagattggttaatgttaagaaaagcaacaaggacagtatatagcacatacaggatgcttttnnnnnnnnnnnnnnnnnnnnnnnnnnnnnnnnnnnnnnnnnnnnnnnnnnnnnnnnnnnnnnnnnnnnnnnnnnnnnnnnnnnnnnnnnnnnnnnnnnnnnnnnnnnnnnnnnnnnnnnnnnnnnnnnnnnnnnnnnnnnnnnnngcactttcccaccccgcggggttcgcgcgtcgaagccccgccaccccttctgcggtgagcccccaagtcccattccgcgtcctgttacccggaccccatccccggcgctttccccccgtttgccgccctttcctctccgctttgttgtcgacgacgcagacggcttgtcgttatgcaacctctcacaccctttccgtttcttttatcgcgccctttcgtttcctcgccgcataacccccatgtggcctgaagcagcccttttctgtgaccgctaccgcactaaccagtcggacctcgtttcttcttaacccacttgttatcggactcggtttttagccctcttgttggcacacccacaccagcctccccccataccttgtcccccccgtccgctcgccgtgtgtccccaccagctattgcggcgcgcctttcctcccctccccggcccccttttccatttgcaccctcgcccgccgcacgcacttacgcgttatggcgttatacacgcacatgcgcaccaacatcattggcgctcccaccgttacggcacatctacccggcgtcgcgaagtcttgtgaagtctagctcgtctctcgacacgcgttatagtttcatcgctcccgccttagtctcgtgttttattcgccgcgcccctctctcntctactcaccaccaaccctattacgtcggcgtcatcgacatccccgtattctcccgagctcattatgagacatttgctctctctcgcgcctctcgtattcactggccccacgtctacgacacgcgcccctgacacgtatcacctcatcaatcccatactacgtgtcttccgtcctcgcgcactactgatgcgctggtgacgtgtttcactaatgtgttta

SEQ ID NO: 416660 - DNA, 874 bp, Homo Sapiens
  misc_feature (165)..(212): n is a, c, g, or t
  misc_feature (222)..(479): n is a, c, g, or t
  misc_feature (621)..(717): n is a, c, g, or t
tagttgggtgggcacgcaagatgccaccaggctcagccctgtttagatacacagcaactgtgtagcactgtgaaagtggagacttcccgaggacttagatccttgtaagatgaaaggactgaactacatagaatcagtgcactcccttctgaacttaccacgtgnnnnnnnnnnnnnnnnnnnnnnnnnnnnnnnnnnnnnnnnnnnnnnnngagacagcannnnnnnnnnnnnnnnnnnnnnnnnnnnnnnnnnnnnnnnnnnnnnnnnnnnnnnnnnnnnnnnnnnnnnnnnnnnnnnnnnnnnnnnnnnnnnnnnnnnnnnnnnnnnnnnnnnnnnnnnnnnnnnnnnnnnnnnnnnnnnnnnnnnnnnnnnnnnnnnnnnnnnnnnnnnnnnnnnnnnnnnnnnnnnnnnnnnnnnnnnnnnnnnnnnnnnnnnnnnnnnnnnnnnnnnnnnnnnnnnnnnnnnnnnnnnnnnnntgagccaccaccggtttgctttattttcagtcttccctttaaacctgaatcacttagttgccacaggtagagtttgagtcccagttagggtggactcttagtgctgcaattggctacacatgtgaccctggctaagctctcnnnnnnnnnnnnnnnnnnnnnnnnnnnnnnnnnnnnnnnnnnnnnnnnnnnnnnnnnnnnnnnnnnnnnnnnnnnnnnnnnnnnnnnnnnnnnnnnntgtgtggttccgggcagcccctcgggaaaggagcagctccttcacaaccaggaaccgaaagcaggaagcacaacctgtgccctcccctttcttccctcacagagctttgccccaaagtgggattttctcctggacactccctgggctgggtgggaaa

SEQ ID NO: 416661 - DNA, 775 bp, Homo Sapiens
  misc_feature (354)..(623): n is a, c, g, or t
  misc_feature (670)..(691): n is a, c, g, or t
ttaatgagagatttagaaccattagcatttttattctttgtgcatgaaccagctggtttagttgtctcagaatggggctctaaaaacaagtttcattcaaatggtgagtacattattgtatggtgaattatctaaggagaaacagtaggctcagattaaccaagccagcactgttcctcaggatctaggaattaaatttctcccttgtgctacagtacacataccatagctagtgctagtaaaaacataaatgaataccattctcttccccggttttatggaacaatattatagagttcaggcttctatgcatacattcccaaaggtgttacaggtacatttagaataaagtgnnnnnnnnnnnnnnnnnnnnnnnnnnnnnnnnnnnnnnnnnnnnnnnnnnnnnnnnnnnnnnnnnnnnnnnnnnnnnnnnnnnnnnnnnnnnnnnnnnnnnnnnnnnnnnnnnnnnnnnnnnnnnnnnnnnnnnnnnnnnnnnnnnnnnnnnnnnnnnnnnnnnnnnnnnnnnnnnnnnnnnnnnnnnnnnnnnnnnnnnnnnnnnnnnnnnnnnnnnnnnnnnnnnnnnnnnnnnnnnnnnnnnnnnnnnnnnnnnnnnnnnnnnnnnnagtgaaatgtgattaaagaagatatactttaatctaaatacaccaannnnnnnnnnnnnnnnnnnnnnaaataggtctcccatcatcacccagttccggtagtgaaaaaacggaaccccaccaaatccaaaataacattacattttaccacc

SEQ ID NO: 416662 - DNA, 935 bp, Homo Sapiens
  misc_feature (445)..(711): n is a, c, g, or t
  misc_feature (725)..(742): n is a, c, g, or t
  misc_feature (745)..(745): n is a, c, g, or t
  misc_feature (748)..(748): n is a, c, g, or t
cggctggtccggtccggaattctccggatattggaacagttttgagaagatagatgcccatataggaaagagcccatagaatggttataaaatatgcctggatttgtggaaccagttctaaagctggcattactttcagattcttagtatcttagaggtgggtgtgatcttgtagatcctgtttcagtctcctcagaagcggggaaaattggtatcatttggaggctattgtttaggttggggcaaaaaaatataatggggggagacattatatataaaggtgatatttacttcttagacttgagagaagctggctttcttaataatctctaactgattttgaacctctattagaataagccctggaaataatattggaaatgatataggcattctaagtagatatattcatttgacattttaaaaagtatgacagcctggtgtnnnnnnnnnnnnnnnnnnnnnnnnnnnnnnnnnnnnnnnnnnnnnnnnnnnnnnnnnnnnnnnnnnnnnnnnnnnnnnnnnnnnnnnnnnnnnnnnnnnnnnnnnnnnnnnnnnnnnnnnnnnnnnnnnnnnnnnnnnnnnnnnnnnnnnnnnnnnnnnnnnnnnnnnnnnnnnnnnnnnnnnnnnnnnnnnnnnnnnnnnnnnnnnnnnnnnnnnnnnnnnnnnnnnnnnnnnnnnnnnnnnnnnnnnnnnnnnnnnnnnnnnnnnctctgtctccaaannnnnnnnnnnnnnnnnnctnaanaaaaccccttttagaatttactgtccttgtggtcaagtaaaaatgttgggcccgtctttctttcaagaaaggcctttcctctcctgaatttcccctttaaactaagggaggaagggaaagtaaattaagaatttttcaggtggggaaaacccaggccttgggtgggcctccaggccctggtaatccc

SEQ ID NO: 416663 - DNA, 962 bp, Homo Sapiens
  misc_feature (320)..(359): n is a, c, g, or t
  misc_feature (709)..(765): n is a, c, g, or t
gctggaccggtccggaattctccggatgctgttatttcaagctgctatggatcaatgcccaaaggatgactcattgttgtgatcacttgtcagacagggagaggactagtaaatatttcaggaagaacatatctgaaaagttatttagattgaattttgtttgtgaatcctcagctcctcatgaggtacctgagcatctctgttaaggggtgaaatagagacacgggaagcagagagacctccaccaggatgtaaaggggattggtaaagaggaagggggtaggggggagtagaattttgatttcacttcagttgattcnnnnnnnnnnnnnnnnnnnnnnnnnnnnnnnnnnnnnnnncgcgcgcgcgtgtgtgactaatgtactgttaatgtactgtttaggtcaggacatttcttaaaaggaatgctttggcctcctgcctcatcccacctccactgcaagcgtcagacccacccaagaatgagctctctgaatgtgggtgcattcaaccgcgaaaaatgataaaaacttcatttcttggcttctgtagccctctgagaactaccgactcagacagaataagataatttgatggtttgatgcaacgtttgggcgtgacatccactccaatgcgccatgacttctcactccccgaaattattcccgatctctttcggtgtgacccccttagcacacacttaatattnnnnnnnnnnnnnnnnnnnnnnnnnnnnnnnnnnnnnnnnnnnnnnnnnnnnnnnnnttatttctccccctttttattcgccggtcacccgccaagatacctcttccccaagcggggccctttattttttacgcgccaaaccccacgctttgtctgtgtaaaaaaattcggtacccgccgccgctttatccaccgcttaccttttcggcgccctgccaccccttcaaccgcctccttttcgacgcaacggtgtg

SEQ ID NO: 416664 - DNA, 928 bp, Homo Sapiens
  misc_feature (488)..(561): n is a, c, g, or t
  misc_feature (751)..(793): n is a, c, g, or t
ctgactcatgtccctccggagatgaaggtgccacgttgaggagtgtgccatttccacactccatcataggcccactgacagacacagttgttcagtgctggatgctcatggagacatcaccttaggtctcagggtctgaatgtcagatttgtagttctatcttaattgtcatttccaaagacccaaagtgaaatacatttcctagacatcttgacttgagaaatttccagatagaaaaaattagtaaattcattttcctgccttgagtctttttcctgttctcttctttaagaaaagttgggaaatataaataaatgtaaaaaatggtatctttctcaggatcacgtacaaattgaaaacatttctattatggataaatctcaaactatgcccacatggccttagggaattctatttatacaattgaatgccttcattaaatgtgaacatttgaatactgatcagatgattacatttccataaacatnnnnnnnnnnnnnnnnnnnnnnnnnnnnnnnnnnnnnnnnnnnnnnnnnnnnnnnnnnnnnnnnnnnnnnnnnnacattgcatgtcacaatagccattttggctcaattaaaactttaaagtagggacatcctgctttcaaggaaattccggtaatttaagtaataaaaatccttgttttttgcaaaaacacaaaagccaattttaattaattttaaataggctattccttttttcctttaaaattggttatcccttaaaacannnnnnnnnnnnnnnnnnnnnnnnnnnnnnnnnnnnnnnnnnnggcctttaaaaattgaaaattttataaccccacttgggtgaggaactaaacgcccaaaaaaatattttccctccagcataagaacaggttcggcgcgttatcactaatcctctccacctgcgatgtctctcaaac

SEQ ID NO: 416665 - DNA, 824 bp, Homo Sapiens
  misc_feature (67)..(67): n is a, c, g, or t
  misc_feature (128)..(243): n is a, c, g, or t
  misc_feature (721)..(753): n is a, c, g, or t
ccccaatcccaccccccaccccaccgaacacgataaagaggctggtaccggtcccggattctccggnaatttcttgtcataatttataggcatcatacttttacttatctttccctaacctagattannnnnnnnnnnnnnnnnnnnnnnnnnnnnnnnnnnnnnnnnnnnnnnnnnnnnnnnnnnnnnnnnnnnnnnnnnnnnnnnnnnnnnnnnnnnnnnnnnnnnnnnnnnnnnnnnnnnggcacaaaattagaagtaacttagatagctaactaacattacagaaattgtttactaaattctgctatattcaccattttggaataaatgcaggcactaaaaaagttcataaagactgtagtcttgtagggaaatgctcttgatagacaattaaattgcattcagacttcagcaagggttattgattgcctaccgtggagaaatatactggttaagtggtgactgtagagtcagacccagattcggagctctcatagctttcccatcattcacatatcatctgcttccatgaatgtgcgtgtctgttaccacctaagactggcttaatcaataagaaaacactcagacatacttggaagcctagaggaaggctgctttaacactggttgaattcgtgactcgatgatgtaattaaaaaccagggttcctggactccaccctgggccaacagagccgagaccccgtcctcccgctccannnnnnnnnnnnnnnnnnnnnnnnnnnnnnnnntcctaaaaattatccccttcaaaggggggccccaaagctttaccccgttatccccagcctttttctttggt

SEQ ID NO: 416666 - DNA, 959 bp, Homo Sapiens
tcggataggggatccattcattgctgactggggacaatatcccttctccacccttaatgaatgccaccacgtttgtctgtccctgaaggaaatacagtctggccttcatgatttaaagttttttactgaagggactccagtgaagtttccaaagcttgacaaaatgtctttggggcagggcatagggatggaggaaggagctgagtaagaaattatgcctttggcccaaccacctgaatctctcattacacatgaggaactaggccctccaaggtgcagactttacctcatccattatcaaccctccccatgcccaggcctccctgcttatactctcccaccctccccacacacaccttgccttcttacggaattctgacaatgaagaaagcctaacccaaagtactgcttcctattctctgtgtgtgtataggggatgttgcaaagggagggattctcagataccaacacacattacccatttactaaaatcgtgttatgttacaaattttcttgtaagaattctatcgatcctatcaaaaatgggatgcggaataatcatggttcctcagagaaatgttctcctaggtcttcatatggagtggcagtcccccaacctttttggcaccagggaatggttttgtggaagacatttttccacagatggggtaaggggtggtggatgttttggggatgaaattgttccacctcagatcatcaagcattagattctcataaagaacatacaaccctagatcccttggcttgcgcagttcacaatagggttttgagcctcctttaaaaaatctaatggctgcccactggatttgaacaaggaggtgggaaacctcaaggccaatttatgccattgctgggcccttgttcatttccaccttccctggcttgtgggacaactccaaggttttcccttaaaacaaggccccttggggaaacccagc

SEQ ID NO: 416667 - DNA, 177 bp, Homo Sapiens
ggggcccagtcactctggtcacaacttggaatgattacatatcaggggaaactgaaattgggccatttttgtatccgggtttatgccacaagacaaaagccgtccaccttccaacacttacaattccaaaattggcgcgtccaggcaagggttagcccccaaaaatttaaaggaact

SEQ ID NO: 416668 - DNA, 972 bp, Homo Sapiens
  misc_feature (895)..(907): n is a, c, g, or t
tcgtccctttccccaccaaagatatttgctactcatcacatacttctaagaggcaaacatcgtgacttccctaagtctaaagaaagcttttgtttcccactactggatacaaggaaagaagacacatgcataaacaggacaaaaaaatttaaggaaatagggtttaacctaactaactccaaaggctataattctccatggcagtggatcccaacctgttagttgcagacatctaggggtggtggggttacttcaacttatgcatatttgcaggagcaccaggcactatggataggctatataaatactatgtcttgtacatacattccatcctgtgttttcaattataggtagatgatattatggttaatcaaatgtaattctcttttaaaaaaaagtgtagaatttgtggtatagcagactgttaataagtagtagttattgttattttacttagtggcaggaagttaactagagttatttatcacagtcccttatagccctggatgcccgactctggctcaacatgcaatttgtacccaagtaatcagctttaaaaattatactaatagtttgaataggttttatgtagagtctttaagaattttctacatggaaaattgtatctttgccaaaactatttgttctctttcaaccttacctctcatttgtttttcttgtcttatttcattggccaaggatctcctgggcaaggttgaattagaacccagtgaataggggaccgtattttatatccatttcctgaacctttaaaaggggaagccttggaaatagttttctaccattaaggttaagaaaatttttatttaaaaatgttcttgggaaaggaaggggaagtttccccccttaaaattttacttcgaaatcttgatcnnnnnnnnnnnnntaaaaaatctttactctcgcaaaaaaactttctaataggggttttccacaacttttcgcgcccat

SEQ ID NO: 416669 - DNA, 1356 bp, Homo Sapiens
  misc_feature (71)..(317): n is a, c, g, or t
  misc_feature (320)..(383): n is a, c, g, or t
  misc_feature (877)..(877): n is a, c, g, or t
  misc_feature (1217)..(1217): n is a, c, g, or t
  misc_feature (1337)..(1337): n is a, c, g, or t
ttcggaaacgagattaagttgatctgagataccttataaaatttaaaagttcatagcttagaaaaagcaannnnnnnnnnnnnnnnnnnnnnnnnnnnnnnnnnnnnnnnnnnnnnnnnnnnnnnnnnnnnnnnnnnnnnnnnnnnnnnnnnnnnnnnnnnnnnnnnnnnnnnnnnnnnnnnnnnnnnnnnnnnnnnnnnnnnnnnnnnnnnnnnnnnnnnnnnnnnnnnnnnnnnnnnnnnnnnnnnnnnnnnnnnnnnnnnnnnnnnnnnnnnnnnnnnnnnnnnnnnnnnnnnnnnnnnnnnnnnnnnnnnnnntgnnnnnnnnnnnnnnnnnnnnnnnnnnnnnnnnnnnnnnnnnnnnnnnnnnnnnnnnnnnnnnnnccatctcttgaaaaacaacagcaggaaataataagatagcgagtaccagccatttggctaacactgtcgccccactcgcttttgccttttaaatatattcacttttgggggcggctcctcaccagaaatgtccccccgagggggccgccacaccgcgtccggacacccactttatttttaatccaaacaccggcgcctcctataacgggagttctctgtttataaaatgaccgtagactgtggggcgacgcttctctcttctaaagattatagttaatacgagggaaaaaatgctcgcggcaactgttgggagagccttttgtaaaagaaagaagaaacacccacttccctcgctgggtggggcgggcgctcggtgtcgttttcggcacagaaaacaccatacccaagttagttgggtattctttcgagtagcgttggtcctgctgggggcgcggatgagtggagtaccatacctgccgctacttttgtaagancgtcgttgtcatacgcatgcctgcgtggaaaaagagaagaacgatgattcagtcactacataaaattggacggaaacaagatgggcggcgataaataaacaaaaagtctgctgtcgttccctgtctccgtgaggtatatgtatttcaggcattgtcggcgccaaggcgataactttctatttttctaaccacatacgaagacgatccccgggcgtgagtttgacgagcgaagacaatcgacgcgtatcggcgcgaataacttatcaaatagaattgaggccgacggcaggtcgcctagcacggtgtgagtgggtcttatttatctccgcgggcggtcccncttatagcaggaataactcactctggcaagggatggctacggcgtgtgtccatgagaattgtatccatcataccacggctccacagttcatcactctacccaattctatcttactgctancgaatatatttctttctct

SEQ ID NO: 416670 - DNA, 105 bp, Homo Sapiens
tgccttgtgaccaggaaatttgacttctgaggctttagctacaaacacaatggcacacaggaaaagtgatgtgcatgcatcgggatatgcacagccacctccttc

SEQ ID NO: 416671 - DNA, 894 bp, Homo Sapiens
tgagggtcgaggctgcaatggcagaatttggaggggaccgtcagcccctctcacagccctcctccttttctgacttttacaatagctttctgtgcttatctgcttgtacactttggggtttggggtgaaatcatgtttgggaaaagctttgcttcatcacaaaggtctggaaaccctgagatggactgaggctctgcctctccatcagcttgggcttggagcttccctttgcagaccccatgtggacaggagctggtggctccaggacccagtggctccaggacccagtctacagccacggtctatggaggcggctcttcagtggggctgaggcccccagggtgtgtccctccgtgaagtgtccaggcatcagcaaccccctgccctcccagccagccagagcaaaaagcttcttggtttccccttaagccagagaagaaggctgtttccactcagcagtactgtggctcttcatggctcttccaaaaccatgtcctgtctcctgaagcccaagtcaggaagagcaggggtttaagaaggcctgactcactctgcaaccaagcttgtcctgcagtttgctgggtgctggaggcctacgtgggctctgcttctgggatgtcctcccaagccacagtgggaacaggacctggctgtgggagctgggatccatggaggacacgtcctgcctgtctagaagctgaatctcatgttgtgatgtcctattctggcccacagaaaaacaggctgactcaaataaggatattgaaacagtctcccaaatcttcccacttcaatagcttaagtttgggctggtttggggcctgatttggcccagtgggtttagggccagagcacattaacaaaaccttttcaggaccggtgtatctcattttt

SEQ ID NO: 416672 - DNA, 745 bp, Homo Sapiens
gctggaccggtccggaattctcgggattatttctcatttgtgcccagttttttgcagaagtttttttaaatggggattaacctcctcacagtatcagtccatggtggttccagcatagtctatacccaaaaccatgtttagaaccacttgagggaagctcagaaccaatcaaggctatacccaggacaatctactaaaccagaatcttccctcaggtcaaaagctaagcattttccaggctcccaaagctactctgagtcaatggaacttacagtgatgtgtggcagcaagtcagggtagcctctaattcctatacagagaaagatgttttctgaaacaaaattcaggtcacacttcctgacaatagagaatattgcatacatacatagatcaccctggaaaatccaggccctacaattgccatatgtttgtaactgccaggtgatgctattaacaccccttaaggacagactagtgacctgctaagagaagatcacatttccagaatttaagttttgagcctgtccctgtaaactggccataggaccaactgtgggaaaggataactgctttctaagtcaattttagcccatatatcagtactttattatgttaaaatggaagcaataggatagatctccggaaaatgctatgggggttatttgtggtccttccatcaggggaggccagccctacctttaaccggggggcccccacacccggaaaattttaccccagggggggg

SEQ ID NO: 416673 - DNA, 362 bp, Homo Sapiens
acgtctgcaccatctcccaggtgtgccagtatcaccttttcccttcctctgagccccctgacaacacacatgtgcttctcagagaagtactacacctcctgcctgcctatcctgatggtttttaaataccttgagggctaagcctgaatctcactcatctctgtacacctccagtgccacacatacagtagattatccaatactgcttgactaatttcacctcagttcccctaatgaagactggataaccaaaaactctcattcctttaggaggatgtgaaataagccctaaggggtgtcataaaacagttttactggagatgaaaccgccagccggggggatcaattcccgggattaaaat

SEQ ID NO: 416674 - DNA, 941 bp, Homo Sapiens
  misc_feature (791)..(811): n is a, c, g, or t
ggctggtaccggtccggattctccggatctcgtgtactttgaactatttccacgcacacacacacttttttttacactggtgagtgaatacaatacacgttgtcttccattgcttttgtcactgaacctcatacccagaagattcttctccaccagcaagcacctgggaataagcatgtaggcagtgactatagcctctcgatgtggtggaaacagagaaatatcaataaggtgcacacctgaagattctaaccttgagtttgtctaggtctctgattccttaatttgataccccctcctgtgtcagccccatgacttggcctgctcgttcctcctcttccttctcacctatttatttgcctttcatgacctgcacacatcatccatggcatccagttttgacttggccctgtttctggttctcctttcgtgatacaacctcaacattccagaaaccttatgttctgatttaaccaagacggggcagggcccaggcacctcaactgcatggaccctggtggtcactgatgcaaaccttttaggttcggtggctacatgaataggttaatttggtggtgccgtgatcacagagatgtgagatgtccctgttgcctaatcttggggcacactgtctgcatgacgaaagaggttgcttctggatccaggctatttccagaacaccaaagtcagattggttactgtctcacagatgggcaaaaatggttttggggagatgtaaaaagggtcttaagcagtagcacccccgggtccctcgacattaacttcatttnnnnnnnnnnnnnnnnnnnnntaacacaaatccctcttggcccgggccaaattgcttttccccaggccctctcgtttccaacttcccctccctcactggattactttccttccaatccaggggggtccatttttccccccctggattctcc

SEQ ID NO: 416675 - DNA, 1072 bp, Homo Sapiens
  misc_feature (26)..(26): n is a, c, g, or t
  misc_feature (71)..(95): n is a, c, g, or t
  misc_feature (104)..(246): n is a, c, g, or t
  misc_feature (636)..(652): n is a, c, g, or t
tttgtcgtgcatgcgactctctttgnttaaagaaaaaagccgctggtacggtccggattttcgagagtggnnnnnnnnnnnnnnnnnnnnnnnnngaggcagannnnnnnnnnnnnnnnnnnnnnnnnnnnnnnnnnnnnnnnnnnnnnnnnnnnnnnnnnnnnnnnnnnnnnnnnnnnnnnnnnnnnnnnnnnnnnnnnnnnnnnnnnnnnnnnnnnnnnnnnnnnnnnnnnnnnnnnnnnnnnngtgaaagcagtttttaaggacagttgaacaggaaagctcctggattcctgcacatagatcttgtgcccctccaaagtgccgtaagtaccgatttctgctgtcttgatttaactcagtgtctggagcttacgatccttcctctctgtttccttcagtggcgtagcttgggggtgtcaattaaagagttattgcaagatctcagcctctgaaagtttaacttattcatcagcaaaactttaagcaagtctcacctacttctaaattagaattgcaaccctgactttagtctcagagttaacattgtgcagaaaaaagaaaacacttgcccactgtttcaaacatttttcacaaccgaaaatggaccacaatggagaaatgcctatgatcgtnnnnnnnnnnnnnnnnngtatcttgcaaaaacatttcaatttaccgattagtttctctccccccccaattaccaaccagcctcttactactctccacacatccgcacagcaagtgaacgcaaagtgtaccccacccccctttaaatccaaagtttattatttaccccctcaaccctcaagggaaattttctaggtgtaatcccctatccctggggcccgggattaacaataaacctccttggcatcacttccaggggggatccaggtggcaactacttgggagaatttcttcacgagaatgggtgcgcaccataaatttcctatccccatgtaggcacaccatcgttttcccaattttccgcgtggttggtctgtcctcgacaagtggtgtggaggtgactaccccctccaaaaaattcatcccctcctcacgagag

SEQ ID NO: 416676 - DNA, 285 bp, Homo Sapiens
aacgtctggttttaaaccttatattttttctgaggtagacaaaaaaagggatcctcattgcaagcctttctcaaaattagtgtaaccctcagaacagcctgagttttagctggcctcagagaatgtttacaaaaactgacgaaatttcatcattacggcactcaatgattgaagccaacatatccaataaacttctattgaactttgtgctgaggttgtgagcatgatgcagagataatttggagtgggatggtagtttgttttgtccataatgagtttttggtt

SEQ ID NO: 416677 - DNA, 1053 bp, Homo Sapiens
  misc_feature (322)..(379): n is a, c, g, or t
tttcgaatccggcgcatgcacgagcacgttcttatcacagcatttttacaagttaaagacggaactcccatatatcaaaaatagtgtagaaatggtcgcatacattatgtcatatctacccacccaatggaatagtatttcccatttaagaaagatgaagaatctatgaaagcatggaaaatgtgcatcattcagtgtgaaagttaaaataacaccacaaaatcatgtggactcaaacgtgtaaaaatgcgcctgtgaaaaagacggaaggggacacacaaaagcgaaagtaatgatgcaaaagggctgaaagttacagcgnnnnnnnnnnnnnnnnnnnnnnnnnnnnnnnnnnnnnnnnnnnnnnnnnnnnnnnnnnaaaagaaaaccttaaacagaagttctctgactccaggctcagcgctgcctccaatgagaaagtgtcattcactctcctgccctcaaccccagctgtctactgggaactaacttgggactgggtcgagggttcctaatacgtaccccggaaagccggaatgcctaggaaaagtcccggactccctcagtttcaattccccaggcatttcttctaaggccggtctctagactttcttcatgcataaaccacggggcccctatcttgtgttctaggccctcctccttctatccaggggggtttcccgtatgcctttctggactccttttaccacacctcctcctccgttagctgccctccccccctttttcctcagttgttattcaagcccggaacaccctcttaattgcgttggaatgcacaccctaacccccagggaatcttacaaccggcttcggggcttttccgcgcggtctttaactttctccaaagatttatacagcggcccagtgtttttttgttcgtaaccgttttaaattcccttccccaagacccacgccgtggcgcgggcgcctgtttttttaagcgcttatattctccccttgccagagacgctcggtttgttaccggcacctggtgttctcgcataaaatgcagttttctcgtggcgggggggg

SEQ ID NO: 416678 - DNA, 862 bp, Homo Sapiens
  misc_feature (17)..(17): n is a, c, g, or t
  misc_feature (43)..(43): n is a, c, g, or t
  misc_feature (52)..(52): n is a, c, g, or t
ggctggtactcggtccnggaattcttccggatcaaagtatctngataaattntgcttccaaaaacttagaaatttaatatgtgttaacaaataagaaataccctttaaattaataaaaatattttaggtaagtccttggacagttacctttttattttacagcttacatttgacattgcctttaatcttttggtctttcctctgatttttcattctacctgagtgattttgtagaaatccatggttgtagttaccatctactcactgttaactcctaagtctttatgtacagctcagatctctctaaagagtgccacacccatacatccaccatttcaacttgaccgtcccgtcatgaaactcaaatttaacttgaaatgataaaacctgaactcagaatcatgtgaataatacaatgaataatcactgtattaagagtggtgaactcctcttctcaccagatgacaccatttccaccttttcattcatactacaatcctggggatcaccttagaccatctctttctaccttagcttctcaaattcagtagtcaccagaactcatcaattactatcactggaatacgtcttacgttttcattcccatgtgggacattgccttagctactccttcccaccctcttcattgactccttttcagtttttcctgcatcttatcctcctccattaaatttatatgccacattgaccttaaccgtgtattttcccaatagtggctttgagtcccagtcaggggcatggtcaattattggaaaacccttttaaagggaaaccccaaagtggttctgggaaaaagggggaaaattttcctggggcttccaccaacaaaaggttttcctgg

SEQ ID NO: 416679 - DNA, 1063 bp, Homo Sapiens
  misc_feature (722)..(780): n is a, c, g, or t
  misc_feature (896)..(896): n is a, c, g, or t
catcgggataagaggacatctggaaatgtttatactaaacatagaagagaaatgtcttgcaaaactagccacaggtcaggaaaccctaatcttatcatgggtcctggagaccataatgccatagactgttcagatgggtgttatgttactgtgaatacagatgttttctttccatccattgtgggcatcctgttttggaaaagtcactatagccaatgtctaaaggcttgatcactttaggacagattactaaatactttttatcttaaaatagaagaggggaaaggaaatcacagctcctttagagcatggacagcagacacatataaatgtacttacatattcttttcatttacgttatcaactcaattaacttatctataaccacttccatgaccgtaggctgaccacgtagaagtgtggattatcgatccctcttatcaaaatctcccccgcagtttcgcttcccaatacatatccctgtcataccctcatagaaatcaggcaccgacctctgactatttacccctccccggtaaatacctcgcacccaccactttttaattctatttcccccagaacatcttttcgggtaccttcccccttttgcaaaaaccgcctaattacatccctctgatggtatcggccttgccatatgccaagtgggtttcgccctcttcaaccgccagccggagcattttccgtgtccccgtatccccctnnnnnnnnnnnnnnnnnnnnnnnnnnnnnnnnnnnnnnnnnnnnnnnnnnnnnnnnnnngccctataccctgtatcccttccacccctcttttttccttgccgccgggctattaccccacaatacgccgccaccatcccgctcctcataatacgcccgctattctcttacatttnttgcctaccgtccccttccgtatcttccccatcatccccttatatcaccgacattgacacccaacgatatatccgcgccgcctaactcgccccctctttaatcgccccgcttcctatttttctcctctctcgcttatgtcgccccgcgcgtctctcctcttatccgt

SEQ ID NO: 416680 - DNA, 260 bp, Homo Sapiens
  misc_feature (165)..(177): n is a, c, g, or t
ctggaccggtcggattttccgatgatacttaggagcatattatttatcttccaactagtttgggggattttcaagttttcttattgttgttgacttttatttctactgtggtcggtgagcacactccattttattacaatccttttaactcttttcctgattagnnnnnnnnnnnnngctttctgccagtgctcatttaattttacaaaaatatgctctctgaggctgaattaaatctgactggttttcactgtgaaaat

SEQ ID NO: 416681 - DNA, 713 bp, Homo Sapiens
  misc_feature (597)..(597): n is a, c, g, or t
  misc_feature (616)..(616): n is a, c, g, or t
cagagagaaaacaaaataacagaatgaagaacaattctttctgttagatgcccactgtcacattatcatttaacattttactaaggggaatcagccaagagaaaaattaatgtaagtggattttaaaaacatgttttgttgaaacataattatacacatttatggggtacatatgatgttttgatacatgtatacagtgaataatgatcaaatcagggtaattgggatatccaccacctcaaatgtttaccatttctttgggttagaaacatttcaaaccttctcttctagctattttgaaatatacaacaaaatattcctattttgctattgaaccctagaacttattccttctatctaatggtatttttgtacccgttaaccagtctctctccatctcccctccccactaccttcccaacctctcactttttaaaaagtagatttctgaccaaatcatagagcactctattctctgatatgtttaaaagatacaataaagtatcttataaatgtcaaaacataaagatgaaaagccagataaaggtaagcaaggtatttatattagaccagagaaattcagtcaacaaaaatgtntaagtgaggtgaacacagntctcattggtgaatacacattgaagatgaaagcaggttatgaaattatctacaggggttaaaataggcatggacggttcaattaaattgggaaaaga

SEQ ID NO: 416682 - DNA, 917 bp, Homo Sapiens
  misc_feature (715)..(715): n is a, c, g, or t
  misc_feature (772)..(849): n is a, c, g, or t
gctggtatcgcggtccggaattcctcgggataaaatacagcagacaagagcaaatcaaaatagacttttaactgcttaatgataaaacagtaaatatttgaagttagctttccattttagcctgtcttagagcttttataaggaaatcatagctcattttataaaattatagtaattttaaaacaattagaaaattaaacaaggtttcgggtagagaggtcagtttgaggaagagggcaacccacctcctcctcaatgactgagataactgaaaaatgggtgtctttgccacggccaattctggtcactttcatgaggcctctttacagtgcttgcttccaccaagaagtaagtttaagcagaagagaggtacggtcatgggctccttgtgtcctgtgagttattattaactgtttggcgtcagctgcttccctcctggcacacacattttggatgtgatcattgaactggttggataatgaccttctcggagctggtatgtgtgtgccagagactgacctctgacttgtggagtcaactcagactctgttgtctcatactagtaccttgccttgtgccagtaaaactgaagactccattttttattttccatttgtttcagaaagaatgttgatcctattagcattggcaaatccgtatgggtctacagcaacctcaattcttgtctcctcagaaaaaagaatttgaccaaggngcataaggcagagggagagagagaggcaagtttcagagcaggagtgaaagtttattnnnnnnnnnnnnnnnnnnnnnnnnnnnnnnnnnnnnnnnnnnnnnnnnnnnnnnnnnnnnnnnnnnnnnnnnnnnnnnaaggttcaaggagattcgagaccattcctgggccaatatgggttgaaaaccccggacttctgcttaaa

SEQ ID NO: 416683 - DNA, 122 bp, Homo Sapiens
acctatggtttgattgggtgtaccctgaaaagtgacagggaaaaatgggaacccacactggggaaatcactcctttcgggatattttatccagggagaaacttttccccaaccttagccagg

SEQ ID NO: 416684 - DNA, 545 bp, Homo Sapiens
  misc_feature (65)..(78): n is a, c, g, or t
  misc_feature (91)..(153): n is a, c, g, or t
  misc_feature (164)..(347): n is a, c, g, or t
cgggatttctgcaccagagcctaaggctgcgccaccaagatgcgtcattttttccagaggcttcnnnnnnnnnnnnnngagatggagtttnnnnnnnnnnnnnnnnnnnnnnnnnnnnnnnnnnnnnnnnnnnnnnnnnnnnnnnnnnnnnnngtgttcacacnnnnnnnnnnnnnnnnnnnnnnnnnnnnnnnnnnnnnnnnnnnnnnnnnnnnnnnnnnnnnnnnnnnnnnnnnnnnnnnnnnnnnnnnnnnnnnnnnnnnnnnnnnnnnnnnnnnnnnnnnnnnnnnnnnnnnnnnnnnnnnnnnnnnnnnnnnnnnnnnnnnnnnnnnnnnnnnnnnnnnnnnaccgtgtcctgcccagacatatcaaatttgacaggtattgtataccctttgtatctttaggaattaattttttgcctctgtcacttcgcctttggaaatttttgaaaatgggagataaattataggggaggtctttgggaaaggaaaaaattgccccgaaattttcccaaaaaccattgttaaaccacctcccatttg

SEQ ID NO: 416685 - DNA, 148 bp, Homo Sapiens
  misc_feature (47)..(72): n is a, c, g, or t
gctggaccggtccggaattttccggatgtgagaccctggtcttgggnnnnnnnnnnnnnnnnnnnnnnnnnngcaggttgttttgtttagacatcacaattaaactgcaacctaacctttaaaaaagaacctacttagaaatcagagc

SEQ ID NO: 416686 - DNA, 980 bp, Homo Sapiens
  misc_feature (75)..(138): n is a, c, g, or t
  misc_feature (674)..(683): n is a, c, g, or t
gctggtccggtccggaattctccggatctcagccagacccaccctgccaggacaaaaggggagtggccggagaannnnnnnnnnnnnnnnnnnnnnnnnnnnnnnnnnnnnnnnnnnnnnnnnnnnnnnnnnnnnnnnactttcagaccacacacttcaagctagagcttggcctgcgcccctggtggttgggggttggaagagcagactgtgttgacagggtctttaattcacgattccaggtgcttctgaattgttggatcctgatgaatcgcaatcaggactatgtttggcttgagctccagcctcatgaccaccaaccccatcgaatgactgagagctgccaggctcgtgccacgttggagctcagaatcctcccgtggggacactgtgctgcagccagcctccagggagccgcttgttttatggcctaaaaagtctctttatgctgagaaggtcacactggactttgctcacacagagatttgacccaagaaaaggaataaagaggccttggataccctgtcttgcccctgttcctgcccccgccgtaccctgctggctcatgccaaaagactggacttgctgtctgggggcatgtttgttgtcggctgacgtagcacccacaggcactgggccgtgtgtgtgccacattcaggaacgaggttgcctgnnnnnnnnnnattaacccacttacctttgtccttactctttgaagcccctgcttgaaaaaaataatggggggctttgggagggtttaagcacggaggattgccttgacgcccggtcacctcttaaaccacccctttgccaacccaccctttatctctgtacccctccaaataccgtaattactaaacattacccccagccctagtatggctaccctcaccctttatacggcgtcttcaaactccacattgagacgcacccaattttcccttttcccccccttcatattttcaaaggttcacttttcc

SEQ ID NO: 416687 - DNA, 416 bp, Homo Sapiens
  misc_feature (68)..(96): n is a, c, g, or t
  misc_feature (99)..(248): n is a, c, g, or t
  misc_feature (250)..(287): n is a, c, g, or t
  misc_feature (289)..(307): n is a, c, g, or t
  misc_feature (309)..(312): n is a, c, g, or t
  misc_feature (314)..(341): n is a, c, g, or t
cggctggaccggtccggattctctcggatggatctggaagaataaaagacctctgttggcattcaggnnnnnnnnnnnnnnnnnnnnnnnnnnnnnagnnnnnnnnnnnnnnnnnnnnnnnnnnnnnnnnnnnnnnnnnnnnnnnnnnnnnnnnnnnnnnnnnnnnnnnnnnnnnnnnnnnnnnnnnnnnnnnnnnnnnnnnnnnnnnnnnnnnnnnnnnnnnnnnnnnnnnnnnnnnnnnnnnnnnnannnnnnnnnnnnnnnnnnnnnnnnnnnnnnnnnnnnnnannnnnnnnnnnnnnnnnnntnnnntnnnnnnnnnnnnnnnnnnnnnnnnnnnncccccctctaaaaattttccccctccagggggcccaaaagcttaacccgttaccccagttttttttggaaaaaag

SEQ ID NO: 416688 - DNA, 739 bp, Homo Sapiens
  misc_feature (193)..(253): n is a, c, g, or t
  misc_feature (327)..(335): n is a, c, g, or t
cattcttgttgtggtgttttgcattgagaggctggtccggtccggattctttcatagagaggaagatgcaatctttttccaatgaatagaatccttccctgaacaatttctcaggtgttattgctgttgctatcttattaaatattcaatgccatctattatatcctatacagagtcaaataataagcttacnnnnnnnnnnnnnnnnnnnnnnnnnnnnnnnnnnnnnnnnnnnnnnnnnnnnnnnnnnnnncatttcagaataaaaagactttgaagcttccttgtattacttgataagatttaggtacagtctcaagaaaacannnnnnnnnccttcttctgcatcagctcatctacaaaccaatttatttctgaaataggccccaggggcaggctggttggtgactgtagtgggggatatctgactggccactcaaggaaattgctatggacttttaatcttattttgattaagttctgtgcagattgtgtctgccaggctagcactaagattactgtttctgagatcttttggctgctatcagactggactcaattttttttctacattctcaaggttaagttgaaacagcattacccatttatttataaatggtaagtgttttaggttttgccttgtgtttaaaactagaatgttaataaaaaaatcctatatttaacaagttgccagttttatgaaaactccctggctttttgaaacgaaaagttttacatt

SEQ ID NO: 416689 - DNA, 1032 bp, Homo Sapiens
  misc_feature (52)..(52): n is a, c, g, or t
  misc_feature (79)..(80): n is a, c, g, or t
  misc_feature (490)..(508): n is a, c, g, or t
  misc_feature (710)..(767): n is a, c, g, or t
gttatgtctcttgcggcgccacggcatgtactggcacccatcattaaccctnttttcaaaaagcagggctgggtaccgnngtccggaatttcccgagatattagcccaattttccaaagattagtcaaactaggtgatgcattaatttcagttccaaaataaatgaattcttttaactttgcaaagactattacatataacactatgttacaaaatttgaatatattgacatttttaaagtagagtgtttatgtgtgtaactttttaaaaatatgtaaccataaaaaagtaggtaaataatatcaacttcaacttaagagtgcttttgctagggagggcaagtagtaactttagtaaccctaaattgtccggggcatttagaagccaacctaaccctccaaaatccctggggctttcgtgccaaccttttaatttaaaaaggggggcccctatccctatgaaacaccttattcttttctcaaaaccccannnnnnnnnnnnnnnnnnnacacttattttttctgcgaagacccccccatatataagggggtcgatattaagtattgttgccgtacgccaattatacccacacggtgtttttatttctctctcccctctctctactctcctggttgtttcctccccctattataaccctcccttttttttatgtcgcccgccgtaaaaactattacagaaaatcctcttgnnnnnnnnnnnnnnnnnnnnnnnnnnnnnnnnnnnnnnnnnnnnnnnnnnnnnnnnnntgcccgcggattacaacccaatttttttctctttatacatcactgttctgtctgaacctatcagtttattttgtctaaacactgcgcttatatattttacctcttattctgaagggggaggtcgcctgcatccccacaatctggtcgtccagacttcccttatctacggaataaataaaccacacgatagattatgatctctaaggaaccccttcagcataccgtctcccagcttatcctctcttttattctatattcacccacc

SEQ ID NO: 416690 - DNA, 1179 bp, Homo Sapiens
  misc_feature (410)..(424): n is a, c, g, or t
  misc_feature (986)..(986): n is a, c, g, or t
tcgaaacagagagagtggttctccattagcagcaattctgcctcccagaatcatcacaattaacacgacttacaaagtagattcccctgcccctattctcagcttacttatttactgtgtcacccaccagtcgcaatattcttttctattcacagttcttaaattcttaactcataggatggggcacccaccagttgcataactttgatgtgactgaaaaaagaactgatatatgggactaccatgaatactacacttgggtatattctgagggggtgaaggtggagacacagtttagtgcattctgcaggataaggaaacgtgttagaaaaaaaagtcttcttgacacataaacccaaaagggaactgcaattgtcaatactgaaatacagcttttataaaaggaaacnnnnnnnnnnnnnnnctgaaacagagtctcgcccctggttgcccaggtctaaaagtgcattcggcctggtcctcagccttactgcaatcctctcgcctcccggggctgaagcaaattgccgtgcctccacccccccgaaagtaatgtggggaactacacgggtatgtcacccaaacaaccaccctgggattaaagttgtgcaccgtattcttatatgtaaacacgcgtggggttttctacacatggatctggcgttagtcctggtttcttcggaacccccagggactctttattggacatagttcacttttctaaggcggtcttcatatagcggtgtgagaggcgatttactcacggcgtcggaggcccaccccattcccctccgggacaatataagccacgctcttttgcgtgggtctccccatgctggaggtgtgtttgcaagagtgatatagcagtcgtggatctagcgccgcccatttttattgcgcggttcggacgcttttcgtgtctctgataataagacatacgtgcggtcgtctctactctcggcgcctgcctgaggtgtctgatggcngctctatgatcgtcataatgactatcttcgcgtcgcgctctgcgcctcgaatctagcgggagtggtattcttcgctaatcacgccatctgatgcacactctaaagactaagatacacctcgcctacttctcgagtatgtcctctagcgcttttccattatgttggcgtatattgatttcctaccttggcggcg

SEQ ID NO: 416691 - DNA, 925 bp, Homo Sapiens
  misc_feature (35)..(35): n is a, c, g, or t
tccgatgaattctccagcttgttttcttgatcccngagagacctgctagtgaattcaactaacaggttggttttcagcacagaatatttcctacagatgtgcggtgtttctttccaaatccttcctctcttcagggcgctttcccactgttctagacgtaggagagaaagcacttctcagatggtgagcttttatcttccaatcttgtcaaccgaggagacctggaagttccctttcaacctggaatgtgagccctgcttgctgggcacgagataaggaccaaggattgacccaggacaatttcagagagcacaggggtggcatatcctcatgtcagggcgtggagctaatattcagacccaaacactctgaatctctgaagcagaagctctcttaaaattcctggggaggaaatcagtatgaattaataaaaagcctgaatattgtggatttttattaaattcgaggatttatagtaactcaatccaggccaacaaaacgttgccttccggtacttacttaatgaatagaaagcatgtaaatgctcttccaaagagaataacacattttagcatcttaaatatgtaaaaataaaactcctgtacaatcctagttgcactaggaagtctacttatcaaaaaaagaaacttctgtttccagccacattatttcaaatcatcccaaaacttacattgttaccagtaaaatttttcattgggattaacactttttttccagtatgggttttccctctttctgaaagcaaccttagtttcataaacagtttgggcattttagtactgggtcaaaaaagtacttctgaaaccagtaaccctcgtccttaaattttgaacttgctggttgaactaagcgctcttccttttcccaaagcttcatagcaagcccttcccttcaatggccttca

SEQ ID NO: 416692 - DNA, 1037 bp, Homo Sapiens
  misc_feature (30)..(30): n is a, c, g, or t
  misc_feature (49)..(49): n is a, c, g, or t
atgtggatgttgcatggtgtgtggtttggncctcccttgttgtcctttntttgaagatgctggtaccggtccggattctcctgagcggggacatgagctggggtttaccagttaaaagtacaggacagcgggcagcatcctgaaggcaaaggaggaggaaatgacacagaagcagaggggttcagaaagggccagggctcatcttcactgtttctaacctgaattttgctcagggagaaaattgtttagcttgtcttcctttctcacccccgtgtatccggagagcaagagccatgtcttatcaacctggaatcctcattgcctgagacccagagcccagcacatcctgggcatttgggggatgtttgtgaaattagcatgctgccattctccttgtgccttgcttatacatccactcagcaagtatttgtggcacaactacttttccaggatcttgggatgcttcagggacctcaataatgaaaatctttgcccttttgaagtttattatctagcaaaacagacaggcatcaagacatttctatatgtgtgatgtaaattaaagaatatgttagaagatgattacatacgtcaagcagagtacgggggttaggggagtgcccggcacattgcatttttaaataggtgttcaggccagggcgtggtggcttcacacctgtatatactaggcactttggggaaggcccatatggggaagatcggcgagggccaggcggttccaaaacccgcccgggtcccaaaatgggcgaaaacccccggttctttacctgcaaaaatccccaaaattttagcctggggcaccgaatgggtggtgccacccctggttaattccccaggcttacctcaaaagggctggaaaggcaagggatacaatccgttttggaaacccccagaaaagggcaacaaaacatgggccgggttgaattctcagcaatctttttccccttttgggaaccttcctatacccctggggggtggaaaggggttaaaaaaatttttctcttttgctgtgtaag

SEQ ID NO: 416693 - DNA, 963 bp, Homo Sapiens
ttcggataagagcttttcttcagtacttctgcccctaaaaaaggactcttttcagagctctcttaaaaagttttctaaagactttcactgttactaacaaggagtaaaaaggcaagcatatattttttatcatttcatcccagagggaaaaaaagttgtaaagttgttaatgctaagtctttaatcttacaaaagattacataagataacctttcactttctaagaagctcccctttcccaggaacaggatgggggtcctgagaggacaagcagagagaagacaggcttggcaggcactatgtcagcccttttggctcctctcacccctgctggcctcaccgtctcagagccacaggctgaaaggggaaacatgatagtcatcgggtagtggagtatggctgagcacagcaggctgaggaaaagggaagggaatcccaatagcaactacccttcctgtttgcagaccatgcccatgctgaggtaagcaaaacttggaatcctggggtggatctctgctatggttgcaatttcaggtgcttccctctttttatttgccttcccaattcactgaagattaagcgatggcagcggactggtagttcatgtattgtcttacaccctctatgtaagctggttttgaactctcagtatttaaccgccctttccccatttttctggggccagatccgcttggtaaattccaggaaaggaaaacccctgctatttaaacctccccgtgatagtataacctaagcggtatgtggagacttattaccccggggacctttttatgcaaaaccggtttaacatcctaagggggaattcagaaaaaccaaattttgaacaaaaactggcctgaatttaaaaattgttagctctgatccccctggcaagcttgtggtgaaacctttgtacaaagtgtagactacccgtcgtagaaaaacctcaagatcttcagccgg

SEQ ID NO: 416694 - DNA, 917 bp, Homo Sapiens
tcttgcagcccataaacacttctggccattttaccagtgtcgtgaaggatgtttatgacccaaatatgaaaactttgtgagaattaacacttaggcaaacaggctgtgttattcttggaaagaaatatcttctcaaaaagacccaaagcaggcaggggctgcatgtgaaaatacacccacgtcggcacacttaagtataaaaccctgaagattgtctatgatccaaactctttgctgttgctcagtagcaaggcggtcctgcagtttttaatggtgatcagcttcctgtttgagtgtttttatagcgttattatgttgcaaagtgaatgaggcaaaataaaataggaaaagagatgctggaccaggaggttaataaaaatccgtgctgtcactcgacagcctccccatacagcttctttttccatgcacctctgagtcactttgtattgacagatgccatttgctcatttacgatgtgataataaaaaccttcagccttgttcaatgttattcttttcctcccctgacaggagggaaccaaatggcttgtagtccgctcagcaagcattttttcattaaagataataaccttgcaatgaacaatttttaaaagaacttttcaaaaaaagtagccgaaattttggtccaggggagaaaaaaagattttatgggcggacctttcttaacccatgtccgaacccccaaaaaaacagactctggtaaaaaatggaccccagggttttttacacaattttaaaaaaatatttttataaaagccatggcatgaaaaggcttccaacaaggtttggaacaccctgaaatgaaaaccttatggtggcgagaggaaaaattccaaaccaattaggggcgtcctgcccccaattttttcgccaaacttaatgcctggggtttgcccc

SEQ ID NO: 416695 - DNA, 202 bp, Homo Sapiens
  misc_feature (12)..(12): n is a, c, g, or t
ttcgaaaaaggngctaccttcagggcaatttcccaagagaggcactccagatcagagatctgcattggaaactccttgagaaccagaagggtatgctgtatttctgtaactgtgaggagcccagaaagactgaagcccaaataaaattcctttattcaatattaattaacatatttgttaattattaataaatttaacttaa

SEQ ID NO: 416696 - DNA, 922 bp, Homo Sapiens
  misc_feature (43)..(238): n is a, c, g, or t
ttcggatcgacttagtgggggacaagtgagagggtgaggggtnnnnnnnnnnnnnnnnnnnnnnnnnnnnnnnnnnnnnnnnnnnnnnnnnnnnnnnnnnnnnnnnnnnnnnnnnnnnnnnnnnnnnnnnnnnnnnnnnnnnnnnnnnnnnnnnnnnnnnnnnnnnnnnnnnnnnnnnnnnnnnnnnnnnnnnnnnnnnnnnnnnnnnnnnnnnnnnnnnnnnnnnnnnnnnnnnnnnataacatgtaggtcacattgggcaggcttccaaatttacctgcctggcggaggtcttatgatgccggtcctgtcctgtcctgtcctgtcctatcccagagtaaagaatcttaccgtgagtccctcaaatttttaatgtactgattaatacataacctactggcactgaaaaggacactgatttgtttccaaatcatcaagttttggtgattggtttctgcatcatgaagtttactgattgtcttgcacgtagacattttagcctgtatatcatctgtagccagtgattgtaacctctgtattgtgacctgcaatgaaaaggacaactctagtatgaagagtcctcctctgttcttctaaactttcccttaaaaagccttccaactcgcagcagactctgggacacacacagctttgttgctgtgtcttccttgattagtccttacatttggcttccaataaacctttactgaactatttctgcctcaacaaacttaatttttggttgataccacaatttaatacattatatttaaaaccaccctaaggctggggccgtggttggccccacgcccttggtaatccccagaccactctttgggaagtcttaaaggccggggtgggaattccctttggaggggtaaagggaagttttcaaggaaaccccaacctttggggccccaat

SEQ ID NO: 416697 - DNA, 444 bp, Homo Sapiens
  misc_feature (18)..(18): n is a, c, g, or t
agccgaccagtccccgcngtgtattaagtgtcaaaagaggctggtacggtgccggaattctccggataagacttctgcctttgtagttttgtcgaaacttattttccacctttcttctgctggtgagcttcagtgaaacaacaccccctctttctctagagctcctgaatgtccacatgcaatgtctacaaaggctctgggcccgggaaatgtggatccatgcggcttgccgccatggaatgtttttcttgaaagcatccttgtctgcctggacccctgtgctcttcgcaactactcaagatgtggaggggacgagcaccagggggcaccacaccgagtatgaagccggactcgggagcagactgcaatttaaaagcctcagtccaaccggtggagagcgggaagcgctgaaaacgtacgcaaccgcatcagagcgtccggacg

SEQ ID NO: 416698 - DNA, 1018 bp, Homo Sapiens
agctgtgtacttgttccgtgaattcttctgaaaagagccttgaaattctccttgtaatctcagtggggttttttccccctgatgctgcttggtctgaagtttccttcaagggagtcttgagtttgtctcctgggaatataagggaactaagatttggttaaggacatatcatgtggctttgacccagagggagataaagcagaagagggtgattgtcttgacagcatctcaaagggttctttctgttcttaataaggcagagctgtttcgcaggggaataaaatgagcaccagagacaggtgaaaccgctgacgggctcaggggcagtggggctggccatgacctccaacgtgctgtcctgtttcatgcgacagtaactcagggagggaagaagggccgtattcttagggagacagtcccaaagaagctctaagcccgtgtccgtgcatgtcatcccctagccctctttggctcagtgacttcctaggggtggggcccctgagtgtccacttggtatctggggcttgcctggaatcagagctgatgatgacaactggggtcaagtgtcacaatcaaagatagggtgggagagactaacctcaatagggactctaccctggagaggaacaaaccacttttccccctttggtgcttgggagtcctgcgtctaaaagctaaggtccatcccacatcgaggttcgcttcccacgatggaactcctggcgttctgggggtcccgtgtaggatcccccccttccaaacaggccgacattcttgcatctggccggtcttcgtttaattccccaactcttccccaggccctcaaggaggggatggggtttttcagtgccttgagcacacacgcccttctcgttgtgcccaatgttagctgtccgcctttttggtgttttataaaaaatggattaaacgccctttcaatttctccccatatgggctccaaacagaaagaggtccttggtgggcgtccctccgtttcaagtagtttccgcaacctccc

SEQ ID NO: 416699 - DNA, 1232 bp, Homo Sapiens
  misc_feature (221)..(259): n is a, c, g, or t
  misc_feature (471)..(471): n is a, c, g, or t
  misc_feature (874)..(874): n is a, c, g, or t
  misc_feature (1002)..(1002): n is a, c, g, or t
  misc_feature (1022)..(1030): n is a, c, g, or t
aagagagaaatgaaaaggggtgagaaaacttatactctatcaaatttgaattgtgccgtgaaggaaaaatatagttatgaaacaaaagaagaaatacaattttgaaactttatagtagtcctgtgtcctagaaatggtaaagctggcttatgatttggagctgagaaagaaaatttaagtaatatctttgttgaatgatgtcatccactccaggactgcgnnnnnnnnnnnnnnnnnnnnnnnnnnnnnnnnnnnnnnnctgtggggagggggttggttggaatatgtcatggaggaatttccagctattgcagtttcctttagcatgctactgaatgaaactactgatggctcagaagacagccagctccatgtctccattatgtgcatagcacacccttcacaaaaaaattctattttaaaaaccccttttggaatctttaaaagccatcaaatttctttgaaattagnaaaactttttttgtctgagcaaatacatactaatgcgttcttaaacttttttccagtttaaaaaagggtcctatgggccaataaattggataattcttttgttggcaagtttaagaatggtggacattaaacctttagagaaagcttttgtgcgttaccctgttagtaaaacaattctagattttctcccccactcccaagaatcttttcccccccacctaaaggtgggcagaaacagatgggggagagaacaatttccacacatcataaaggtggaattcggggggaaaaaaccaccccccccgcgggggtggtgttgcaaagaaatgtttttctcatgggtggccaaacaacaaaacatggggatatcttgtgggggggtaattggtttgttatctcttanaccgtgcctctcatgtgtaagatcttctacgacttcttgccggggggctatgggaattctttgcggcgccccgcatctgtctgcaccccgcgcgtcggtctttcccaccttgtggtctcgactctagnttatcgcaatgcctccgccnnnnnnnnnctctcctgtaaaaaacgtgggaagggcacccccacgtcatacttggtgttttcaaccccccacacgctccctgcggcaaatgttgcacgtgtgaaaaggggccaagctcttgtaggcggggtctcgacatgagacaaaacccttctcttggccctatcaccgcgacgcaatctcctactgcagacacatttcttacctcttg

SEQ ID NO: 416700 - DNA, 892 bp, Homo Sapiens
  misc_feature (193)..(202): n is a, c, g, or t
  misc_feature (342)..(606): n is a, c, g, or t
gctggagcaccagccattttatctatattccaagcagcaaaataaagaatgagaagaaaggttgctccattttgtagatatattctagtaatgcccacataaaatttgagtaaaacatattctcttggccacacctatatgcaagagacactggaaaatgtaatcatttagctgggtgccatgtgcaaaactnnnnnnnnnncaaagatgttgggaaacaattctcagcttttgccatagaactcagcatagaataaagatcgattcagaaaagagagaataagtacatttcaggaggaaaaaaatagtaaatatgttgaggcaaatgagtgtgtgattagnnnnnnnnnnnnnnnnnnnnnnnnnnnnnnnnnnnnnnnnnnnnnnnnnnnnnnnnnnnnnnnnnnnnnnnnnnnnnnnnnnnnnnnnnnnnnnnnnnnnnnnnnnnnnnnnnnnnnnnnnnnnnnnnnnnnnnnnnnnnnnnnnnnnnnnnnnnnnnnnnnnnnnnnnnnnnnnnnnnnnnnnnnnnnnnnnnnnnnnnnnnnnnnnnnnnnnnnnnnnnnnnnnnnnnnnnnnnnnnnnnnnnnnnnnnnnnnnnnnnnnnnntttaaccattatttactgagatcacataacatgctaaacactatgctagatgctttatatacattcattgcatgacataaacaacacagcactgaaggtggaagatacaatttaaccttgatttttacaaattaagaaaaactccagcccttaaaagagggttggggccaactttggctgaaagggtttaacccagcctacctaagaatagaaagaaatcccttgaatgccaaaaccaaaggtttctttaccttggaatttcccaaaaaagtcctaattttttttc

SEQ ID NO: 416701 - DNA, 343 bp, Homo Sapiens
tttatctcctctcatgaatcatgaatgttgttaatggtatctagaatggtgaatccttcccagaaagttttcaatttactttgcccaggtttatcagaagaatcactatttatggcaactatagccttataaaatatatttcttaaataataaggctcaaaagtcaaaattatccttgatccatgagctgcagaagggatgttgtattagcaggcatgaaatctccttgtatatctccataagagatcttgggtgaccaaatgctttgtcaatgagcagtaatattttgaatctttttttctaaacagaagtatcaacagtgggcttaaaatattcagtaagc

SEQ ID NO: 416702 - DNA, 956 bp, Homo Sapiens
tttcaggtcttacatttaagactttaattcaactttttgttaattttttgtttatggtgagagattggagtccagttcttttttctacatatggctatccagttttcccagcaccgtttaatgaatagggtgtcctttctccagtgtatttcttgttgactttatggttgtagagatgtgacttttattctgggttctgaattattgatgataccggtatgagatgcaataagttagagaggaaaagttgtgagattcaatatttaatatgttagttgaggatacaaactctcacttattattgcatatttagacaataatttcacaaataaactccagtgccccacaacccttatgcccttcaagtaatttttcacaaagtggaagcaacgatctttgaaattatttttaatcatgatgctttttatatgactcttatcacctttatagtaagaataagataaacccaagtctttagcataaaactctagatttgaccaagatgcagtaagagggagtggttttaccctcatacctaaaacaactaataaactacacaaaatatacttaacaatgtttctcatacattgggacaccaggcacaggacattgattctcaagggaagagataaatgaagtgagaactaaaatgggcccccagtttgctcctttgggaaaattttttcaggtggaaagccccagaagcctgaaaaccccatgcaaatacttaaattcctccatggaaggtgaaaaacaaaaccaacctgggagtttccaaaaggggccaaaaaatcaaataaggtttggggaagccttctggcccgctgaaaaatccccttttccaaggttccttccagccttcaaaggatttggaatccacttaaaatcttttgatggctttaaaggaaaaaaccttacagcctgcaagggccgccccgagaaaaatacgggatcca

SEQ ID NO: 416703 - DNA, 932 bp, Homo Sapiens
  misc_feature (328)..(367): n is a, c, g, or t
  misc_feature (372)..(743): n is a, c, g, or t
aagattcagcagcatttataactattgtccatagtttcaaaaactaggttgtctttctcttctcaccaagtttgggattaactatgaagaaccaaagtgaaccctttcaacaacaaggtttgctgtggttttcaagttttgcctttgtgtggaacattgtaatgacatagtgggaaaagaaatatttggggagagaattaaccatggctgatacatagcacgggtatttctgaacaacctactaaattatttcttagaacattttgaagtatatcttgccataggagtgggaacagtttcatacaaaagcctcctcatgcttccaacnnnnnnnnnnnnnnnnnnnnnnnnnnnnnnnnnnnnnnnntagannnnnnnnnnnnnnnnnnnnnnnnnnnnnnnnnnnnnnnnnnnnnnnnnnnnnnnnnnnnnnnnnnnnnnnnnnnnnnnnnnnnnnnnnnnnnnnnnnnnnnnnnnnnnnnnnnnnnnnnnnnnnnnnnnnnnnnnnnnnnnnnnnnnnnnnnnnnnnnnnnnnnnnnnnnnnnnnnnnnnnnnnnnnnnnnnnnnnnnnnnnnnnnnnnnnnnnnnnnnnnnnnnnnnnnnnnnnnnnnnnnnnnnnnnnnnnnnnnnnnnnnnnnnnnnnnnnnnnnnnnnnnnnnnnnnnnnnnnnnnnnnnnnnnnnnnnnnnnnnnnnnnnnnnnnnnnnnnnnnnnnnnnnnnnnnnnnnnnnnnnnnnnnnnnnnctggcactccttttggccctggggaacactgaaacaagaaccctggttcttgaaagaacctaaaacaataacgtgagaacaaactcgctctccccccactagacgccacgacttgtgactgtctgaatttgagctgtgtgaaactttaaagttgtcgcccacgtcaaaagtgaaggtcctcatttgtgc

SEQ ID NO: 416704 - DNA, 361 bp, Homo Sapiens
gcaatttcaaatatctatttctccatccccacaccgcttacccttatcaatgtgcaaacatgccttagaatccctcatcccataaacaatattaacgttctcccttgattccctgttgctctcttgtttctccctatttctctgctcctccttacagaaaagaccttagagttgtctcctggcctctccacttcctgacctccctttccaggctcactctgtcacgtttcgagccactgtaccaactgatctgcactcattaagggcatcttgcctgagcccaaagaccaatgcctgacctcttctttctcaacctctccagaccatgtcacctggttggccctctctccttaaaaaaagg

SEQ ID NO: 416705 - DNA, 1266 bp, Homo Sapiens
  misc_feature (50)..(338): n is a, c, g, or t
  misc_feature (749)..(749): n is a, c, g, or t
  misc_feature (761)..(761): n is a, c, g, or t
  misc_feature (863)..(863): n is a, c, g, or t
  misc_feature (901)..(901): n is a, c, g, or t
  misc_feature (1029)..(1029): n is a, c, g, or t
  misc_feature (1205)..(1205): n is a, c, g, or t
  misc_feature (1221)..(1221): n is a, c, g, or t
gctggtaccggtcggaatcctgggatcttttttacgataaggatttaggnnnnnnnnnnnnnnnnnnnnnnnnnnnnnnnnnnnnnnnnnnnnnnnnnnnnnnnnnnnnnnnnnnnnnnnnnnnnnnnnnnnnnnnnnnnnnnnnnnnnnnnnnnnnnnnnnnnnnnnnnnnnnnnnnnnnnnnnnnnnnnnnnnnnnnnnnnnnnnnnnnnnnnnnnnnnnnnnnnnnnnnnnnnnnnnnnnnnnnnnnnnnnnnnnnnnnnnnnnnnnnnnnnnnnnnnnnnnnnnnnnnnnnnnnnnnnnnnnnnnnnnnnnnnnnnnnnnnnnnnnnnnnnnnnatcaccaaacccaaagtgtacagataaacgcatatcataacaacgggcctctgccgatcaacttatctactgtcaccaaattcaacctatcccccaatccatgcatcgattcacgtgggcgctaaaactaccctaccgaccccccgcacaacacactcatgttcccgcaagagtggcttgacaccaatccccccctcccagtacaaaatcgcaacccctcccccgcacaaagccacagccccacatctagctcctcctcctttaccctcaaactcccagaaccttccttgcgccaccatagcggggaatgttttccccagcccttacgtgtgttgggcgtgatgagacctatttatcttcctcctgctccttgagcgcccgtagcaacgtgaaaactgttgttctattacnttgaagcacacncaataacacactcaaaaaagacactccgaccacgatcttgtatgttgatagactccggtgtctcctcgaggtctctccgcgtgccagcgtgtaactccagtntcccgcccctcactgcgtcgccgagagacgaggtgaancgggcggtgtgacgacgaagagaggaatatcgtgagacctgccgaccgcagcgtggcggtgatcgcggtccagtaacgaacacgttcgcggcgaccgcctgcgctatgcattataactcctccgagcncacgctctccactctgcttacgcgaaaccacccttggttatggacgttgttcgagatcctcttgttggaccgctgattctctcgcttttgcgttcctttgctctctatcgtgctgatgaccgatatgcgtcggccgtctcacatcccctcgtgctcgcatgtcttgtatacgcgcncgacgagtcagcggtntgtcgcccgtggcgtatcgccgcggggcgtgtacaccgcccgacc

SEQ ID NO: 416706 - DNA, 1136 bp, Homo Sapiens
  misc_feature (67)..(77): n is a, c, g, or t
  misc_feature (201)..(244): n is a, c, g, or t
gtccggatttttcgaagagggaaccgcgtcctttcatacaataagcgcgccaccccctacctccaannnnnnnnnnngccccgcctttatttcttgttgacagcaaaggtgggggacgtgggagaaaggcaagagttgtctctaggttcgggatgttgggctgcgcggagggaagaggtgggatctcgaaatggaaacagnnnnnnnnnnnnnnnnnnnnnnnnnnnnnnnnnnnnnnnnnnnnttcttcggtttacttcaagtttgaatttgatctgctctacatgagttggaatgcggacgttgggaatgctggagaatggtgtgaattttattataaaaaggtctggcgggcgatggtgtcccacgagtggcctatgtttaagtgaacgggcattcttggttaaagggggccgcttggtgggaagaattagaaaagacggcccggggttatagtttgtaggagtgagaaatggggtgaatcggcagttgctgggttttgttgaatttgtgtaatacttggtgtgtggtgagggggggtaatacattggggaaagaaggatgtataccgaaattctttagattcccgtgcgctgcggtgtctagcatttgtccagggtgtgtcgtcccaaacgtgcggagatacatgaagtgggataaaatgatgcgcaagcgcattgggccatcactactcttgctgtgcactgaggggtcagaggggcgcgcggttggcgaatggaggcgaaagagatgatctctcacataacgcgcggcgccggtcatatagggacccattaggaaggtgtaggtatatgcgcgggtactaccatgctgcgactgttcgcggacgttttagccatagcatactagtcttagtatcggggtggaacagtaaacagtgtattacatctacatggcctttgaagctcaagggagagagtatgaggcgtacatcggagcacgtcatctgcacacagagtgagagggtgactctccagacatgagcatgtgatgtgtggatactgaacgaccggctatgttgtcgcgaggccccgccacggtataacccgaatagttgctggacacaacgtatctgcacgcgtactgtcgagctgagtgggggcttgccgtgcggc

SEQ ID NO: 416707 - DNA, 814 bp, Homo Sapiens
  misc_feature (274)..(673): n is a, c, g, or t
  misc_feature (724)..(728): n is a, c, g, or t
  misc_feature (742)..(753): n is a, c, g, or t
  misc_feature (755)..(759): n is a, c, g, or t
  misc_feature (761)..(763): n is a, c, g, or t
  misc_feature (769)..(769): n is a, c, g, or t
  misc_feature (771)..(771): n is a, c, g, or t
  misc_feature (773)..(773): n is a, c, g, or t
ctggaccggtccggattctcgggatgcacatctggtggaggcaaccagtgttacaacccattggaatggctgacagcaatcaaactccaaacagtgctgcagaccaaaccacgcatgaacacgcctttcttccgaggacccttagatcaaccccaggaggagccctaagtgctgttccccacattacgccccttttcggtaggaagtagccaggaagagtcatcaccgtacaccccctaacaccagttagtgttaccactccagagggaggaannnnnnnnnnnnnnnnnnnnnnnnnnnnnnnnnnnnnnnnnnnnnnnnnnnnnnnnnnnnnnnnnnnnnnnnnnnnnnnnnnnnnnnnnnnnnnnnnnnnnnnnnnnnnnnnnnnnnnnnnnnnnnnnnnnnnnnnnnnnnnnnnnnnnnnnnnnnnnnnnnnnnnnnnnnnnnnnnnnnnnnnnnnnnnnnnnnnnnnnnnnnnnnnnnnnnnnnnnnnnnnnnnnnnnnnnnnnnnnnnnnnnnnnnnnnnnnnnnnnnnnnnnnnnnnnnnnnnnnnnnnnnnnnnnnnnnnnnnnnnnnnnnnnnnnnnnnnnnnnnnnnnnnnnnnnnnnnnnnnnnnnnnnnnnnnnnnnnnnnnnnnnnnnnnnnnnnnnnnnnnnnnnnnnnnnnnnnnnnngtctgccctggcacacactgccttttcctttgcagacctttctctctcttnnnnncctcctctcccccnnnnnnnnnnnntnnnnngnnnaggganananaaaaactggtctaataaacctttccaccggttttaaccccc

SEQ ID NO: 416708 - DNA, 138 bp, Homo Sapiens
gggggggcccgcctcctaaaaaaatcccctccaggggggcccaaagctttaacggggtaccccaggttttttttggtaaaaaagtggggccccccaaaaagggaagccccaaatttaaaaagccttagggccctttgg

SEQ ID NO: 416709 - DNA, 867 bp, Homo Sapiens
cataggtcattggtaacagaactggagatctaattcatgcttcccaagcttgtttacattatactgggatagatagcggaactgtgtttaaggcggtgggtccagcttggtgttgccctccaaggggaaactggaaggcattttttagattgttgtaatgattggagctaacaacttgcatttgttgagtgaaggctagagaggtgtgggacagtcctgaacaaagtgtccccatgtcttgcatgatttaagaatatctgcctgactttcatgtagtatttgtaattatcaaagcctggaacctccatcttgcatcatgattttaactgagactgaattttaactgagtctgtttccacatgcaacggttatgtgaattgaaggaagattgttttgttcacaacttgaccaagaattgtttacagttttggaaaattgtatcacaaacagctctgcattcatagatatattcagctactagttacttctttaagtcttctagtgtagttttgccccacgtcgaaataaatgttattataaatcattttcatgtctcttttccactcctatttagggtatatggatttgtttgaaattgtaggaatattgttattttgtttcagggtggtaaagcagaagttgaaaatattttatgcaaagggcacattgaatctgatgtggttgagaactgttgatccaaaataagaataactttcatctgagaaagagtccctccatgaaaagtgccccaaattttaatggaaggggggtttaaaatttccgggggaatgggaacggggtcctccaaatacacccgaaaacctggccacaattttatttaaccgaaatagtttgaaaaatttgctt

SEQ ID NO: 416710 - DNA, 921 bp, Homo Sapiens
ctgtgtcctctccgttccagtgtagtgatggcccctcctgtccccaccctgctgcctccaccaagactggttccttcctcccaccctcagaggcctgttctgaggattagctgtccccactgcataccctttctttctagaaccttcaatagctcccaccttccactggttcacctcctctcctttctccatctctttcctgacaaatttcacttgcttgtgcctgttgccccccacaatagcctcctgagtctcccatggcccctgttgtagggaggctcctctggcctcttctgccccacagcctgctggtttcccaggctcctgggctgtgaccactgcctcacatacagataggtttcccttcaccttctctttgcatctccctctcttcactacaatgccaggaaagtcacctctgaaagtcaccttgtccctccctcatcttgccccaagcactccacaccccactgcctgctggggcctccaatgtgacattcccaacaggaacagcctcagggctgccccagcaggtcacatgtatgtcaccccaccccctcctcacccaggtggaaggccttgagagtctcagcctattccccccgctataccagctctcccacctgggagctgagtgtccttgacccctcaggcgggcactcatccctctgccctgccctgcctcttacttctgcaccactgcaggggggcccagcctgcactcttacccattgcagtccctgctaatgtggacaaaaaaccacatgcagcccaccgctacacaatgccctcccactaccctgggagggccgcaactgctccaaaattgggagggtcaaggcccccaaaagcttgtctaaatttaaattccccaaaacctttccattccaaattggtcttgccaggtaaactccctttgtt

SEQ ID NO: 416711 - DNA, 730 bp, Homo Sapiens
  misc_feature (318)..(326): n is a, c, g, or t
  misc_feature (679)..(679): n is a, c, g, or t
  misc_feature (685)..(685): n is a, c, g, or t
ggctggtaccgcgtccgggaattcccggggatgaaaaagcaaaagaggctgttagtagagacagcattaattaaaaggaggcattagcttctgattttcaaggctattcccaagcctctctatggagcaatattctgcagtattcaagctcttagcaaaatcctcaacttgtcacttggaaacatagcactttgctgccttctttgagggaccattggcaagatcttagaagtgcactgaggacagcagttggaggctggattagaggagtcaaggggtgaattttcctggcattctgactcctgaactggttgcagnnnnnnnnncctcttttcttttgtgtggctccatgtttccaaggttttctgacatcttctgcaggaatcaagaccagtgttgggtgtagcataggggctggaatcagaaagctaactttcttttttcaaaccactttattaaagtataattgacatataaaaagctgttcttatctaatgtgtacaacttgattagtttggagataagtatatactagtgaatccatcaccaccgtcaaggccatagatagatccattaccttccatagttttctccaccctctttgtttatttagatttttatgctaagaaacattaacacccagcattttgggggaggccagatgggaagattgcttgangccagnagttcaagactagtctgaagattatagtgatatcacatatcctcc

SEQ ID NO: 416712 - DNA, 209 bp, Homo Sapiens
ctggtacctggtccggattcccgggatcggacttgggggcaggtttgcccagacctggccactgcagaaaaaaatgtaactaataaaggtagaaggatagagagaaatagaaaatgaccactaggcagacaccacaatgataattatagcagaaaggatatatagatggatgctaaaatctgtgagtgaaagtttgagttgaaacagac

SEQ ID NO: 416713 - DNA, 405 bp, Homo Sapiens
ggtccggaattcccggggatcaaacactcatactgtctgcttaaaaagagcctcttttaaattctgaatacagttttattgttatattttgactaggcattgaagtgataaaaaacatcttccaatatagcattgccatgaagattatcacggataggttttgcacgcaacaaataagacctacgtatacagaatacacagcaaattagtgaatataattctgcttttgtggaatgaaagacaggatttaccaatatattttgttctctgtgcttgaagggaaacccagttttaatctaatcccaggtagatctttaaatttagtggcatgagaaaagtggtagagaaaatcaccttcagagaaagagactgttagctttcgtgtggaagtgatattcccaaaga

SEQ ID NO: 416714 - DNA, 857 bp, Homo Sapiens
  misc_feature (119)..(814): n is a, c, g, or t
  misc_feature (844)..(844): n is a, c, g, or t
aggatatatagccaatcacttatcaatgttatttctgtaaaccaatgaaaattcataacaaataactttatatcaatccctctctgtctccttcttttacttttaaaaatccactcatnnnnnnnnnnnnnnnnnnnnnnnnnnnnnnnnnnnnnnnnnnnnnnnnnnnnnnnnnnnnnnnnnnnnnnnnnnnnnnnnnnnnnnnnnnnnnnnnnnnnnnnnnnnnnnnnnnnnnnnnnnnnnnnnnnnnnnnnnnnnnnnnnnnnnnnnnnnnnnnnnnnnnnnnnnnnnnnnnnnnnnnnnnnnnnnnnnnnnnnnnnnnnnnnnnnnnnnnnnnnnnnnnnnnnnnnnnnnnnnnnnnnnnnnnnnnnnnnnnnnnnnnnnnnnnnnnnnnnnnnnnnnnnnnnnnnnnnnnnnnnnnnnnnnnnnnnnnnnnnnnnnnnnnnnnnnnnnnnnnnnnnnnnnnnnnnnnnnnnnnnnnnnnnnnnnnnnnnnnnnnnnnnnnnnnnnnnnnnnnnnnnnnnnnnnnnnnnnnnnnnnnnnnnnnnnnnnnnnnnnnnnnnnnnnnnnnnnnnnnnnnnnnnnnnnnnnnnnnnnnnnnnnnnnnnnnnnnnnnnnnnnnnnnnnnnnnnnnnnnnnnnnnnnnnnnnnnnnnnnnnnnnnnnnnnnnnnnnnnnnnnnnnnnnnnnnnnnnnnnnnnnnnnnnnnnnnnnnnnnnnnnnnnnnnnnnnnnnnnnnnnnnnnnnnnnnnnnnnnnnnnnnnnnnnnnnnnnnnnnnnnnnnnnnnnnnnnnnnnnnnnnnnnnnnnnnnnnncctttactggaatggggggaaaaaactganaaagcccccttct

SEQ ID NO: 416715 - DNA, 869 bp, Homo Sapiens
  misc_feature (654)..(654): n is a, c, g, or t
  misc_feature (680)..(680): n is a, c, g, or t
  misc_feature (811)..(811): n is a, c, g, or t
gctgggtaccggtccgggaattcccgtggatttttaatactgcatttttctagaaataatcactgaatctacagaattcacctatttaaaaagtatacaggccatgcaaaatattataggcatttagtagaattcccatagctgaaagagatctttggagatattttcagaaggatttcaatgtgagaagcacctaatttccaattagaatgatccagctggccagagctgtgtgctaatcctaatgatttagagaaagcctgataagacatctgtaatgctgcctggaaggggagggcagagggctcggtaagcaaaacctgtaagcaggaacagacacacacaccaaatcttggatgcacctcagaggtgtgaatacggacccctgatgaagtgtacctcaaggcagttttgccaccatttctctattttgtattataaggcaaaactgactccacacacccagtaagattgtaaaatgcatataatcttgatttttaatcctaattctatctaagctgttacagaaaggaatacaatgcaacataataaaaagtgaagtcattttccttaagtttgcctgacacactgcagtaacattacaatgagcatattcagaagaggcctccaactcctagagggggagggcagtgngaactctcactctcagggctttgtgntaacaccaccctccttaagcagggcccaatttaaaggagaaaagacacgacatgcccttcagaaccggaaggccaagaagccagcgcatcagcccctcaggccttttctggggctggctcaggctggccanggtcagggtccgccccaacttctagctcctccagaagctcctttcctccaggacttct

SEQ ID NO: 416716 - DNA, 669 bp, Homo Sapiens
  misc_feature (291)..(338): n is a, c, g, or t
  misc_feature (528)..(563): n is a, c, g, or t
cagacagacacacaaaaaaagaatatttgctttgtcctccttgagtaggtcaggaagtggatgcccagagaggttcagtgactggctcagggccacacagagagccagagctaaaccctggatgagccatagtcacaggatgctcatgcagtgctctggggttttccagtctattccacgaagggatcacattgaaaagtgtttttctggttagacacgattcttgaagatgcaaagcatcctctgttttctcaaatggcttcgtaaaattttcaagggaaaagacagttnnnnnnnnnnnnnnnnnnnnnnnnnnnnnnnnnnnnnnnnnnnnnnnnagaacaagcatgacagcagtttaacagaggaaatagagtgtcagtacaatcataaaacataatccctgccgggtgattaagaaatagatatatactacctatttctattctgaaagaattcaagatgcttctctggacaaagagagcacagggcaagagaattcaaacagacgacatactaggttccatnnnnnnnnnnnnnnnnnnnnnnnnnnnnnnnnnnnngggcaaaaggggggtaaggagggggtaggcttccccgtggcaatttcccctatggggtgaaaaatcccctgccgcctaaataaaatttcccttttttggggttccc

SEQ ID NO: 416717 - DNA, 698 bp, Homo Sapiens
cccgaatggagttattaaattagtcctatctagtaattatttaattagtcctatcctactaaaccattttagaagggaaatgtccaatgggggttgggactaaagaaaggaataacaaaatttatggtactaattaaaagcacacacttttggctcagctagacctgggtccagactctctagctctgctctacatagatgttcctggaataattcacccagcagctactcactaaatgcccactacttgctgggcagcatgctaagtgcaagggcttccgcagtgaattgaagatagatacaagttctttcttatttccccaagtcttcttgtgcttgtacgatgtgataccaggagcacctgcctctcagggggcttgcaagggttgccgtgggcttgcctcagtgcccgtacacacagtcactgctcagatgtttaaattatgatcatgcggggcttttaatcatctaacgctaaaaaaaggtcaaggaataacaaataatatttccacttaaaagtgaaatcctgatgaaacatgatttctcatattaagtgccttcttcctcaacaaaatgaatttagagcatcgtgcgcccttttaaaaagtaaacgttaactatttgcccaccccttataccacatttattccaatttttcatttattgacagctttgggaaatttccttttggtgtccct

SEQ ID NO: 416718 - DNA, 573 bp, Homo Sapiens
tttaacctcaattaaaaacaaagtggagtgcagaagcaagtaatatgcaaaagacaatgaacctggagttagaaaatcttaaaattttatcctaagtactaattatatgaatgtgcctgccctcccttttgaccctcagtttttatgttaaatctatttatagcaactgactagcaggattggtgaactgatgagatgagaatgtatataaaaccaccttgcaaattttgttatatcatttttagtaaagaattaagttattaacattagaacatgaaattctaattacaagaaggaaaactagttaagtctcatttttcactacttagttgctcatgtgaggaccaagcaagagtattacactggctgtttgaaacttgttaaaattatggcttacaaattgaacagtcatccaaaattattcatggccaaacctttcattaaaaacttacaatgtatttataaaagtaagaattttgataatttcatttattaaatatttaatggatgtattattcttgtgcaaataagccctgacatcaatgtgatacccacgaatccaactctcttcta

SEQ ID NO: 416719 - DNA, 567 bp, Homo Sapiens
gggctctgcctgccttggcagccaccacacctgcagcaagacgatccgtttttcagcgcgtctgctgatccctgaaaacctctctgccccctccagggctctgtccaggtgtatgttactcatatttgcagattcagtgctgatgagacagtttctggagacccaggacaaacaatgctggctggaagagccaaccctggccagtcagccccttgtttggcagcacttccaggtgctacagaagaactggtgcagcaaggacgattgattcgtgtgggtcaaagtaggggtgttgatgttcttccggaatgtgcagcagttgctgataatattggctgacactgaagatcctgccaatttctttaatcttccttactgctggtagacttgaatggtccaaaaggccatgtataccagcctggagtgctaccccgaaaccactggatcttgaactccctgccactctgaacggcaatgcacaaagcaggtgatcttatttatactggcaacataagttcttggtaacaggggcagagcagtatggtttggtgcctaacacaggaagtt

SEQ ID NO: 416720 - DNA, 141 bp, Homo Sapiens
aaaacagctgggcttggtggtggcacacctgtagtctcagctgagcggggaggattgcttgagcccaggaggtcaaggctacggttatctatgattgctgcactatattctaggctgggcaacagagcaagaccctgtttc

SEQ ID NO: 416721 - DNA, 908 bp, Homo Sapiens
gattataggcgtgaggcaccgtgcctggccggaataactttttttcttcttgtattttccaaattgtcaaataaaagctgattgcttttcgaaaaaaattgtaataatgagaagagccacttcccagagtatacatatacatataactaatttaaacagatactacaagcatgtgtttaaccaaacacctgaactgtacaaagaatgtatagtgaaaagttaccttctccgtcaaaggcatctgaaccaaagcgactccattatgaacaggggcttggtaaaatgtggctaagacccactgggctgcacttccaggaggttaggccttctaagtcacaggatgagataggaggtcggtgcaaggtacaggtcgcaaagaccatgccgataaaacaggtgatggtaaagacgccggccaaaacccatcaaaaccaagatggtgacaaaagtgagctctggctgtccttatttctcattatgcactagttataatacattagcatgcatgctaaaagacactcccaccagcgccatgacaatttacaaatgccatggcaacgtcaggtagttaccctatatggcctgaaatggggaggaactctcatttccgggaattgcccacccctttcctggaaaactcatgaataatccaccccttgtttagcatataatgaataaataattatagtattatcagtcgagcagtccaagctactgctctgcctatggagtaaccattcctttgtttctttacctaaaaaacttacactcactttactctatggaatccatcctgaattattttcctggcccgaagggccaagaaacccctcctcttggggggctgggaatccccttttccagtggaaaatcttccccacgtaattttatttttaacaagtaatctt

SEQ ID NO: 416722 - DNA, 1005 bp, Homo Sapiens
  misc_feature (421)..(551): n is a, c, g, or t
  misc_feature (554)..(594): n is a, c, g, or t
  misc_feature (671)..(696): n is a, c, g, or t
cagctggtacggtccggattctcgggatcttcaaatatctgaaatcacactgaatgaacatatgagtttcttagtgagtcttgccaagactctcaaacacttacttttctcttgaatattataaatagattatcattgtttttcccttaaaattatcttttccccccaataatcaatagcaaaacttgaaaggttgctaccttcttcacttctcttctggattgtctctaacgggtaatgctgtgacatcattggacagggtattctctttttgaagcactgtgtttatctggtgcatttagataccttcttccagggaagtcatttggcccagtaaactgtctaagactggacaaaatggtaataggaacagtggcaaagtaataacatatatgttgtgttaaaaacgttaatagcaagnnnnnnnnnnnnnnnnnnnnnnnnnnnnnnnnnnnnnnnnnnnnnnnnnnnnnnnnnnnnnnnnnnnnnnnnnnnnnnnnnnnnnnnnnnnnnnnnnnnnnnnnnnnnnnnnnnnnnnnnnnnnnnnnnnnccnnnnnnnnnnnnnnnnnnnnnnnnnnnnnnnnnnnnnnnnncagggacatcacttagcgttgaaaaactttttatttggtaattttcagaaatgtttaaattttttcttttattgccnnnnnnnnnnnnnnnnnnnnnnnnnncattgtttaaggcctaaacccaagcttgacggaaatttaccccaaaggaagaacttaatttacccaaattaacctaacccattggaaaaaatgggaaaagcatttgggtccaagggaaaaatggcggggcccattttcctcctggaaaagagggccacaaacaggggccttttccaagataaatttttcccttttccctcacgcaatttaagagggggggccttatggaaaacgccctttatacagagggggtgtgcttaagaggaaattcgcggggggggacacacccacagaaggtttcccctgttt

SEQ ID NO: 416723 - DNA, 707 bp, Homo Sapiens
  misc_feature (527)..(606): n is a, c, g, or t
cattctgctcaaacacaacctacccccatagtctttatggttgctccgctaggaaaaagttgtttctgcttctatgaaacatcagttttaaaaaaccgtcaagccctcaagccccgtctgtgtcaacagggtttatttttcagtaaacacattagaaaccagtcttcttgtcttacagtgtctaaaacactctttccttaacttctcctacagatgcaggcacctgatcctacctcttaggggaattataatgaggggtggggcagtctcctctcctgaatatggagagttaagaaaatcacttttcctgtaagtttcaccctagaagtttatggaaacttactggggccctagagtcccatgaagctccaagatggtgaagttgagtcactgcaatattgtctacatcctgtctgcaccaatgtccaccataaaacagatccagtcttaatgagacaacactctgtctcattaaggagaacggaggaaggcacgtgccgacttagcttatctgagtaccttgctannnnnnnnnnnnnnnnnnnnnnnnnnnnnnnnnnnnnnnnnnnnnnnnnnnnnnnnnnnnnnnnnnnnnnnnnnnnnnnnccgatgaaaataaattcagaacgtgccttatataacaaaaagccccagggttaatccccctaaggcttaacccagggttttaaagaaaaaacctgggcccc

SEQ ID NO: 416724 - DNA, 906 bp, Homo Sapiens
cccctggcctatcatgcagaatttaagctaactaaaatgaagatagcaatagccctttgggggatgtgctatcttgactggtttctcttgtctataatatacacagagcagtatataaaactattaacttttctacatctttttaatacaagtagtttataatttcagcttcctactaggcaagtattcaatcctgcaaccttattcctgaatattgactatacattacatatcccttgaatgaacaaatgactcccttctttcaggaaacttagattgagtgtgcgtcgcctttgatatttcaacgattagtaaaaacaactcatgtccactgagtttttttaaaaaccttaccgagccgaaaaaaaacaaacaccaatttcgcactaaactaatacgttatcaatataataccaagattaaaacaaaaaattatatgaaccccccgtcaataactcggagtgaatataacacctttgtaacgcaacccaataagtacactcaaacccaccggttggtgggcgttcaactgtggcggaaatattgcggggtgatatgaacaccgagggataatctacgtgggcactacataactatacatacacattgaagagcccgcgatgcgcgttcgatagtaagacaacaataatataccacgacccgcgggctcaatgcgtagcacgcgcgactatcagcttttaacgataatactatgtcatcgcatgaaaaatacgaacacgcgggtgctagatatagaagtggtgaatattaaatgccggccgatcggtatatgagaataaaacccaccgcgcgctaaatacatacagactatactatactatttttctagccgagactactttattgtttcccgatctcgtatagtgttatctcactaataatgag

SEQ ID NO: 416725 - DNA, 449 bp, Homo Sapiens
  misc_feature (74)..(140): n is a, c, g, or t
  misc_feature (161)..(245): n is a, c, g, or t
gctggtaccgggtccgggaattcccgcggacaagaatccagcagttcctttcatgcttggcttagagcagggannnnnnnnnnnnnnnnnnnnnnnnnnnnnnnnnnnnnnnnnnnnnnnnnnnnnnnnnnnnnnnnnnntcagaccctgtccagatcgannnnnnnnnnnnnnnnnnnnnnnnnnnnnnnnnnnnnnnnnnnnnnnnnnnnnnnnnnnnnnnnnnnnnnnnnnnnnnnnnnnnntcttacagtgggggttagacaaggcaggcttctagtagggataacctcctcatatgttacatggagttggacctttctggatcggaaatagtccagatgcccaagatatagctagaaaaccgtattcttactgaggtttggctcagaggaggaactattattctagcccaccacccatctgctccagaatgcaaggcccccggg

SEQ ID NO: 416726 - DNA, 858 bp, Homo Sapiens
  misc_feature (281)..(340): n is a, c, g, or t
  misc_feature (496)..(530): n is a, c, g, or t
ccttccctcatctccccatgaactcttatctcaccttttaaatgccacatccttcacaaatcttgcttcaatcaagctcattgcaatgacactctcctctcaggtttacgggctccttcttagattaattataataataatagtgtttattgattgagtgcttactaagcacaggcaggcactggacactctacacaccctcccttccttctgcttcattcctttctctgctcacattgtcttcttcttcttttcattttgagacagtcttgctctgtcannnnnnnnnnnnnnnnnnnnnnnnnnnnnnnnnnnnnnnnnnnnnnnnnnnnnnnnnnnngttcaagcaattctcttgcctaatcctcccaggtagctgagattaaaggcacgtgccaccatgcctggctattttttatattattagtagagacatggtttcacaatattggccaggtttgtcttggccacgatattggccagttcaagtgatctnnnnnnnnnnnnnnnnnnnnnnnnnnnnnnnnnnngcgtgagccctcgcaacactgtcttcttaaaagccccttcccataccagtcttaggaaagtgcactttcctccacctccaactaagcccttgctcggcttcatttttcttgcacagcatttaataatctgacatattttatacttatttgttcaatcgtccatcatccgctccctctccccctgccacccccgtaacataaactctaagagatcagggatcttgtatgttttgctcaatgttatttcctcaagacctttaaacttaacctgttatgtaggtgtaaagtatttccaataatatttaaatacctccaatttaaattaatc

SEQ ID NO: 416727 - DNA, 844 bp, Homo Sapiens
  misc_feature (402)..(752): n is a, c, g, or t
cctgtactctagccttgcccataaatagatgtttactgactgaagtttgccgaggagactaaaatcttcttcaagacccactccatgtgttattcctccccataaacttccaaaatcaaaaacaaaggacagtcactatggcagagtctcctaactgtcctacagtaactattctcactttcttccataggaatagaaaactaattttcgggagggctatgggctagccagactaaaactacatttcccaccctccattgtgaaataagaccatgtgattgagttctgtccagtaggttagcccaattgtccttttgtagatttcaggaaatttttaaaaggcatctctgtgtatattttattcttcaccacttccttattcctgttatctggaatatgaannnnnnnnnnnnnnnnnnnnnnnnnnnnnnnnnnnnnnnnnnnnnnnnnnnnnnnnnnnnnnnnnnnnnnnnnnnnnnnnnnnnnnnnnnnnnnnnnnnnnnnnnnnnnnnnnnnnnnnnnnnnnnnnnnnnnnnnnnnnnnnnnnnnnnnnnnnnnnnnnnnnnnnnnnnnnnnnnnnnnnnnnnnnnnnnnnnnnnnnnnnnnnnnnnnnnnnnnnnnnnnnnnnnnnnnnnnnnnnnnnnnnnnnnnnnnnnnnnnnnnnnnnnnnnnnnnnnnnnnnnnnnnnnnnnnnnnnnnnnnnnnnnnnnnnnnnnnnnnnnnnnnnnnnnnnnnnnnnnnnnnnnnnnnnntatccgggtggggtaatttataagccaaggagaagaaacagacttttaccattggaaaggtgaatgggctacgggacccaaccttttcactt

SEQ ID NO: 416728 - DNA, 899 bp, Homo Sapiens
  misc_feature (575)..(641): n is a, c, g, or t
  misc_feature (678)..(678): n is a, c, g, or t
  misc_feature (683)..(683): n is a, c, g, or t
  misc_feature (686)..(687): n is a, c, g, or t
  misc_feature (689)..(690): n is a, c, g, or t
  misc_feature (693)..(693): n is a, c, g, or t
  misc_feature (711)..(711): n is a, c, g, or t
  misc_feature (733)..(735): n is a, c, g, or t
  misc_feature (738)..(738): n is a, c, g, or t
  misc_feature (813)..(813): n is a, c, g, or t
  misc_feature (846)..(846): n is a, c, g, or t
cggtccggaattcctcgggagtgttgtaacatttgttataataaatggggtttcaaacataacgtatgaaacattttatttagaaggacacttgaaaatctctatcagccaataaattccatattttagagttacctactgtccttcaaaaaaccatggctattggttatgtaaagacttgaatgtaaaataactaaacttctttgtagaacacaagatttatgtgtctgggctgtgagatgtactaatatgttggtaacatccaaatagcttaatcttattttaatcatatttttaaaacaagttttgctctgatacttaattttaaatataacagagaatagtcagtaatgatttgtttccttttaccttgatattacttctagatcaacgttatataaaatcaggccacttaaaattgtgacaatgattcttagtttgcaaactaaaacagtgtctttagcctaccaaatgaaaagccgaatcaacttgactcctccagtgttgatgaacagatcaacagtatctatagataaaggaataaatagagcaatgtaatttacattgaggctgcnnnnnnnnnnnnnnnnnnnnnnnnnnnnnnnnnnnnnnnnnnnnnnnnnnnnnnnnnnnnnnnnnnngagacagagtcttgcggccaccccccaggggtggganttccnttnntnnggnttcccgcctccctggccnccctctgcccccctgggggtcnnnccntttcctcttgcctccggccttccccggttgcctggggttttccggggctttttccccccctggccttgggcttcngtttttggcctttttttcgccccggcccggggntttttcccctctgggttgggccccgcccggggtcctccctcccccctggggcc

SEQ ID NO: 416729 - DNA, 931 bp, Homo Sapiens
  misc_feature (704)..(704): n is a, c, g, or t
ctggaccggtccggattcttcggaatttgagaagagtaacacgcctcatcttcctggatggtctccataccagatgaggcagcctgcatgtgatacttaagtgaaggctatagcctaactatgggctgataaaggtcttctccctcaggaaagggataaggggagtcctcttcccatcttgccctttgacatctgccacaacaggagttgtggtttaaagaagggatccacccatcttggggttgctctgtctgggccagatgaggcagaaagtctgcaggaattgggccccaggtagggtgcgtggtttggaccgcaggtgtgctcagaagttcagctagagcaggtggagtgtgtctttcatggaccaggatgtgaccgggtctgccagtctacctggaatcaccatcaagcagtctctaggcttgaccctggataactttcagggagttctcccatcttctcccctgccctctgttcctctggggttccctaaggtccttgcctgttgcccgtgtcaagaatggtgttgggagcaatccctagcgaaatgtccccttccccgggggtggatggcaagaagtgccctccttaagccccagccccttttggcggtcggcaaggttggtaaaggtccggggcaggtcaaaaaccctcctcacctatatcttgcacccgttgcccattatgggttggaatggcanaggaagcctcccattcccaaaaaatttgggcggggagcccccaaggcctgaaaataccgggggatttttcccagcgcggggggtttttccgggaatctcacatagccccccggggccgcatctctggtgtggtcccccggaaatggcccttggttgggggcccttctttataggggcgtgcgggaaataaacttccttgggaaaacgccggagtccccttattcctt

SEQ ID NO: 416730 - DNA, 872 bp, Homo Sapiens
cggtccggaattcctgcggatggatgtctatgtctccagaaaggtcaggcaagttttcttcaattattcccccaaatatgttttccaagcttttagaattctctttttcctcaagaacatcgattattcttaggtttggtcatttaacacaattcccaagttcttggaggctttgtttgtattttcttattattttttgtctttgttttattgggttaattcaaagaccttgtctttgagctctgaatttcttgcttctacttgttcaattctgttgctgagactttccagagcatttcacatttttaaaagtgtgtccaaagtttcccaaagttttgttttttctttaagctagctatttccttgaatatttctcccctcacttcttgtatcattttttaaatttccttgcactgggcttcacctttctctggtcccctctctgattagcttaataactaccctaactggtatggtaaggcaatagttctggtccccatctatgtgacccatgcctctcttgccacccctccctgacttctacacagagatgcctgctttcttcctcctcctccttcttactggtccaaaacatctgtctttgctaatgagttttcctaaagtataatatttaagtactgaattcttatcaagcaactcctttcgttttagttatcttcccctacagtaagctccgtctcttcttggcaactgaagactggctgtaccatgctgcacctctctgcttttttgccatgaacttcccttctattggctgatgagcctcagccccgttaaaaaaagaatcgacttgacaccttcaacgaagatttttctacacacgacccttaggttttttttatcccaccaaa

SEQ ID NO: 416731 - DNA, 390 bp, Homo Sapiens
  misc_feature (201)..(276): n is a, c, g, or t
ccggtccggaattcccgcggatctaactaaattttccagtcgtcagtgaccttgtctttcatatcacaatatttgtgcctatcttatagtattatttctcccttcccccctctctcctttccatttaacatttgctgagcttccattttatctatgcacccagttacatctgggtaacaataggattcattagtcaatgtnnnnnnnnnnnnnnnnnnnnnnnnnnnnnnnnnnnnnnnnnnnnnnnnnnnnnnnnnnnnnnnnnnnnnnnnnnnntttcaaataattcaataagtatgcaaaatttacttatggaatggaaggtattttagcaatctgtcttaggtggtacatgagcctggattcaaatgagtcctcaaaatgcacata

SEQ ID NO: 416732 - DNA, 125 bp, Homo Sapiens
gctgtgactaatatacaaactatataatcaacctccaaataccaaagtgttgacttcttaaccatttggccacactgtcataatgctatgcaatcccattgttaattttttaataacccaaacat

SEQ ID NO: 416733 - DNA, 186 bp, Homo Sapiens
aggctggaccggtccggattcccgggatgagtcgggaaaccacatacccacatatgaatacttgatttatgaccaattaaccttgcagagcagcaagggaagggtggtggttttgatccacggtgctggtcattgggataaccacaggacaaaactggaaacttggcccttgtgccaccccatacc

SEQ ID NO: 416734 - DNA, 752 bp, Homo Sapiens
  misc_feature (76)..(351): n is a, c, g, or t
  misc_feature (354)..(382): n is a, c, g, or t
aattacaatcggtcctaaaacagcagggctggtaccgggtccgggaatttttccggataaaaattcatctggctgnnnnnnnnnnnnnnnnnnnnnnnnnnnnnnnnnnnnnnnnnnnnnnnnnnnnnnnnnnnnnnnnnnnnnnnnnnnnnnnnnnnnnnnnnnnnnnnnnnnnnnnnnnnnnnnnnnnnnnnnnnnnnnnnnnnnnnnnnnnnnnnnnnnnnnnnnnnnnnnnnnnnnnnnnnnnnnnnnnnnnnnnnnnnnnnnnnnnnnnnnnnnnnnnnnnnnnnnnnnnnnnnnnnnnnnnnnnnnnnnnnnnnnnnnnnnnnnnnnnnnnnnnnnnnnnnnnnnatnnnnnnnnnnnnnnnnnnnnnnnnnnnnngtcatccatgttgtagcatgtatcagaactttactcacttttatggctgaataatattttattgtatgtatactccacactttgtttacccattcatctcttgatggacatgtgttgttttcactttttggctactgtgaataatgctgctatgaacattagtacacttgtatctgtctgaatccctgtttttagttcttttggatatatacttaggaggggaatttctgcgccatatgttaattcgatgtttaattttttgagtaatttgccagattggtttcctacagtggctgccatcaattttatggttcccccccagccaaatggtatggaggggttcccagtttttcttccaaggggttatgcc

SEQ ID NO: 416735 - DNA, 485 bp, Homo Sapiens
  misc_feature (144)..(286): n is a, c, g, or t
  misc_feature (293)..(309): n is a, c, g, or t
  misc_feature (319)..(327): n is a, c, g, or t
  misc_feature (421)..(429): n is a, c, g, or t
  misc_feature (431)..(440): n is a, c, g, or t
ataccttcagcattcttagctcaaaatggaagcatccatttggttgggccctaggtcctaggtctggtcaccagcagctggaaagtagggaaggaaccatcaccttcctccagcttccatagtgggagacaaagctggggacannnnnnnnnnnnnnnnnnnnnnnnnnnnnnnnnnnnnnnnnnnnnnnnnnnnnnnnnnnnnnnnnnnnnnnnnnnnnnnnnnnnnnnnnnnnnnnnnnnnnnnnnnnnnnnnnnnnnnnnnnnnnnnnnnnnnnnnnnnnnnntatctcnnnnnnnnnnnnnnnnntaagattttnnnnnnnnntcacaagtggaaaaatacaaaagtatttttccccatggctggggggaaagaacaaccggaaaaaattaggccaaaaccccccccaatattcctnnnnnnnnntnnnnnnnnnnttttttccaccccccacccggggttaaaatttggcccctggggag

SEQ ID NO: 416736 - DNA, 745 bp, Homo Sapiens
  misc_feature (144)..(410): n is a, c, g, or t
  misc_feature (431)..(673): n is a, c, g, or t
  misc_feature (675)..(675): n is a, c, g, or t
gaatttggggttaaagttgagagcaaaacacatccatgtgaaaatcctgtccaaagaaaatttgctctaagacctgaggacacatctgcatgttttgcagcttgcgggaaaagagccagagaagaagtgaggaaaggacaaggnnnnnnnnnnnnnnnnnnnnnnnnnnnnnnnnnnnnnnnnnnnnnnnnnnnnnnnnnnnnnnnnnnnnnnnnnnnnnnnnnnnnnnnnnnnnnnnnnnnnnnnnnnnnnnnnnnnnnnnnnnnnnnnnnnnnnnnnnnnnnnnnnnnnnnnnnnnnnnnnnnnnnnnnnnnnnnnnnnnnnnnnnnnnnnnnnnnnnnnnnnnnnnnnnnnnnnnnnnnnnnnnnnnnnnnnnnnnnnnnnnnnnnnnnnnnnnnnnnnnnnnnnnngtgttcatcaataaatacatnnnnnnnnnnnnnnnnnnnnnnnnnnnnnnnnnnnnnnnnnnnnnnnnnnnnnnnnnnnnnnnnnnnnnnnnnnnnnnnnnnnnnnnnnnnnnnnnnnnnnnnnnnnnnnnnnnnnnnnnnnnnnnnnnnnnnnnnnnnnnnnnnnnnnnnnnnnnnnnnnnnnnnnnnnnnnnnnnnnnnnnnnnnnnnnnnnnnnnnnnnnnnnnnnnnnnnnnnnnnnnnnnnnnnnnnnnnnnnnnnnnantggagcccaaaattgcaaccacttacactccaagccttctgtggaaagaagccaccacctttgcccctcc

SEQ ID NO: 416737 - DNA, 860 bp, Homo Sapiens
  misc_feature (335)..(494): n is a, c, g, or t
tcagaattatgcaggaggcaaaaggaacttcttacatggtggcggcaagagaaaaatgaggaagaagcaaaagcggaaacccctgataaactcgtcagatctcttaagacttattcgctatcacgagaatagcatgggaaagacaggcccccatgattcagtgatcttcccttgggtcccttccacaatatgtgggaattctgagagatacaaatcaggttgagatttgggtggggacacagccaaaccaaatcacactccctcagccggtgatcaggtcaacattttcagtattaagtcatgttgctggtttgtaaccttggtgtgatgtaatnnnnnnnnnnnnnnnnnnnnnnnnnnnnnnnnnnnnnnnnnnnnnnnnnnnnnnnnnnnnnnnnnnnnnnnnnnnnnnnnnnnnnnnnnnnnnnnnnnnnnnnnnnnnnnnnnnnnnnnnnnnnnnnnnnnnnnnnnnnnnnnnnnnnnnnnnnnnnnnnactcgtggtatagggggaaacgtaagaaagccttgatgagtaaattgcaatgggggtattcctaaaatggggatcccgggaaccagggaaagggaccccttgggtcaaaaacttagggaaatttgaaattgaaatttggggactttatgttttttttaaaaataatcccaattttggggttgaaattgaccctggggaccacaattattaccccccccaaaaggtgaaagaaaattttatcccaaccgggccggaaaaaaaggtttttccccccgggttttgttttaaaagaggggttttaataatatggggggggatttctcgggggccaaaatttcccccccttgggggaaaacctaatttttt

SEQ ID NO: 416738 - DNA, 162 bp, Homo Sapiens
  misc_feature (58)..(104): n is a, c, g, or t
tctaaggcctgggggaaccccacccccttggcccactggtgggccctggaattgggannnnnnnnnnnnnnnnnnnnnnnnnnnnnnnnnnnnnnnnnnnnnnngggaccctccccccacgggggttttttgaaaccctgtggggtatccccttaaaacccc

SEQ ID NO: 416739 - DNA, 1089 bp, Homo Sapiens
  misc_feature (588)..(672): n is a, c, g, or t
  misc_feature (736)..(823): n is a, c, g, or t
  misc_feature (1003)..(1007): n is a, c, g, or t
  misc_feature (1041)..(1044): n is a, c, g, or t
  misc_feature (1046)..(1047): n is a, c, g, or t
gctgtaccggtccggatactcgggatgagaaatgtccatattgaagtgcaggaaaagtagagacacacttgggcatgaaccaaacttctatcaaacttgcattgcagagtgaacaagctcaatatatagtagcccttcagcagccagaatgaaacttgacacttcatgagcctttccgtcagcttatcccaatgataaatccagttctacccatgttgttcacacatcgaataaccccagctcctgggaggagtttggccattaacaaatgccacaacttctataactcccacccaaggcactatctccttattgacccataactgggagtcaccattgatttccctttcccactacccatacacccctcccaacaaaccagtggacaccccccatgtcccctgcccccatctatctccccactgctataggccacccccgcatttttagctacccgcctttcctacacgaccccttaccctgcccctactaccccccaatgcactgacaaccaacatgcccccataagcctctaccccttaccctgatgagaacaccacgccatccaatttgtcagtccttatttcnnnnnnnnnnnnnnnnnnnnnnnnnnnnnnnnnnnnnnnnnnnnnnnnnnnnnnnnnnnnnnnnnnnnnnnnnnnnnnnnnnnnnttagaaaggaacataagttccgtgacgaaacagcgccctcccccttatcccattaccgccatgnnnnnnnnnnnnnnnnnnnnnnnnnnnnnnnnnnnnnnnnnnnnnnnnnnnnnnnnnnnnnnnnnnnnnnnnnnnnnnnnnnnnnnnnactcattaaatcatctcctctccatcccaccaccacatagccacgccactttccgccctcacttattacgtgccctattggtattaattatacatccctccccgtcacacccttttgataccctctcacccgccgtatgccgccgttcttaacaccgcaaatttttccgccgccctatannnnnccgagcctaagaaatcgcccgcgttcggctattnnnncnnctcttcgttttatctccccgcgccctccccgccactacctat

SEQ ID NO: 416740 - DNA, 777 bp, Homo Sapiens
  misc_feature (407)..(423): n is a, c, g, or t
aaactgccagtggcctcatttatcccccgaattgccgtagacctgaaatccgatttgcccccttgatggaccatggcttagcgaagttgtttatcgcgccctctttatcgctattgagttcgatttcagcgcaaaccgtttctccccttacctcctaaacccccaccacgagataaacagtgcaattatcaataccaccccctctacccacacgcctaagtatgcttatagcgcatcccgcagatatcttcttcaaacacccgttaacttccttatacttaccccaccaccccaaccaattgccgtattagagggcgtcagagtaccgccgatatatatccgccggttaaaatcttcagcggacaaaatccccctattctttgcctcgctgtaaataacatatcaannnnnnnnnnnnnnnnngccataaattaatctttaaatgcgccgcccccctttatataccccgcataaatatatccgcctctattaataacgtaccccggttaatatatatataccgtatatcttacccgcgcccacgtaaatccacctaatacctacagacaagagactcggcctttattatttatattattgccggcccgtatatgacagatcacatatcgcgcatcgcactataattataatatacgatatatgcgacctgcgcacgactatatatccgacgcgcgcgtacagtataattaactcccacgccgcgccacgctatataatttcgcagacaccgcgagtcgcactgacattgcgacggag

SEQ ID NO: 416741 - DNA, 865 bp, Homo Sapiens
  misc_feature (88)..(225): n is a, c, g, or t
attcacaagctgtaaaggaaaagattgatatatatgaatacaagaggaaatgtgatttattaatgcaccagaaacaaaggtatagccnnnnnnnnnnnnnnnnnnnnnnnnnnnnnnnnnnnnnnnnnnnnnnnnnnnnnnnnnnnnnnnnnnnnnnnnnnnnnnnnnnnnnnnnnnnnnnnnnnnnnnnnnnnnnnnnnnnnnnnnnnnnnnnnnnnnnnnnnntatggtcaacttctcttgtaattagaataatgcaaatttagaaaagacaatattatattcaccagcttggaaaataacaagataagatggtgtggatgttaagaaacacaaacttacatagccagaaaataaacatataaatggacagagacgtattagtgaggaatttgacaatctactggagaaccaaggtatatacttcaacccaataaccccactcctagaaaaacttcactgttgtatttctacagtgaaacacaattaagaacattttttataacactgtatacaaaggtcaaaattgtaacgaattatctcacaacaggaaaatgaatatgtaaactgtggtaaatgaatgtaattgaatatcagaaagctattaaaatgaacaaattagagctacacatatccaaatggatgtttcacaaataaaaatgttggaataaataaaactcaatttgtgaaataacacatttatgtaattatgatacaatttatcttaacttgagcacatgcaaatcaataatataccttatgatggctacacaaatgtgtgggtaaaatccaaacatacacatgggaaatggggtacaacaaattcagggatgatgagaatgttatcaaggaaggaaaaaaaggg

SEQ ID NO: 416742 - DNA, 201 bp, Homo Sapiens
gatgcgctcaggggaaacacccgtacccatcccgaacacgatggttaagacctgagcggccgatggtactgcactggagacggtgtgggagagtaggtggccgccaaaactaaaaaagaatatgggcttatagctcagccggttagagcgcacgcctgataagcgtgaggtcggtggttcgagtccacttaagcccatacg

SEQ ID NO: 416743 - DNA, 876 bp, Homo Sapiens
  misc_feature (108)..(681): n is a, c, g, or t
acgtctccttcctccttgattcacgtcctttctcatttatgggtgaccagcaaggttaactagatcagtagctttaaagttctttcctatgaaccaaaatgtgcggcnnnnnnnnnnnnnnnnnnnnnnnnnnnnnnnnnnnnnnnnnnnnnnnnnnnnnnnnnnnnnnnnnnnnnnnnnnnnnnnnnnnnnnnnnnnnnnnnnnnnnnnnnnnnnnnnnnnnnnnnnnnnnnnnnnnnnnnnnnnnnnnnnnnnnnnnnnnnnnnnnnnnnnnnnnnnnnnnnnnnnnnnnnnnnnnnnnnnnnnnnnnnnnnnnnnnnnnnnnnnnnnnnnnnnnnnnnnnnnnnnnnnnnnnnnnnnnnnnnnnnnnnnnnnnnnnnnnnnnnnnnnnnnnnnnnnnnnnnnnnnnnnnnnnnnnnnnnnnnnnnnnnnnnnnnnnnnnnnnnnnnnnnnnnnnnnnnnnnnnnnnnnnnnnnnnnnnnnnnnnnnnnnnnnnnnnnnnnnnnnnnnnnnnnnnnnnnnnnnnnnnnnnnnnnnnnnnnnnnnnnnnnnnnnnnnnnnnnnnnnnnnnnnnnnnnnnnnnnnnnnnnnnnnnnnnnnnnnnnnnnnnnnnnnnnnnnnnnnnnnnnnnnnnnnnnnnnnnnnnnnnnnnnnnnnnnnnnnnnnnnnnnnnnnnnnnnngagtggcacatgacagacagcaaaaccctggcccctttgagcctctcccctgcaccctcacccaggctgtcaggggcattgatggtaagcatcaacagaagaatgcagaaactcaagtgagcccttgaagcaccgaacataaaagtgggacagggaggcaccctttgccagaatccccccctgggataggtcatc

SEQ ID NO: 416744 - DNA, 815 bp, Homo Sapiens
  misc_feature (692)..(692): n is a, c, g, or t
tgagcctgttttgaaggaactagttccaagttctttacacactgctgccatcataaagcatgagagaacgtagccttcttcttgaaggaaaactgaatgccgagtgttgctccattaatcgacaggccttcccaattcaattctacatgaccacaaacatgattctccaatttgtcctttttcttcacatcttcgcttgcattctaactacctagattattcaaagaaacctcttatccctttaaatgatttcagtttctatgacattctgaattctccctgctgtgaattaaaacttgccgaagcagagctccatgcatgttcctctcacacttcaacactctcgacctgttttacaatgtcatctaccttcccatcctccaaatgcattttacaaatttcaacctcagtgcttttgttttcaaatattcctggcttgttcattagtagttccaaaatttctataaaggagagactctgggacagttctgtgactggaaagactgagggttgctagctggggacttttgtgaagatggcatgttggttttatttataccgcagttcagttttttggagggggaagttgtgggtattatgattatgtagtgtagggaattggggatggtaaaattcgtggctaaccattttttttaaattctcccaaaaatggcaatttctttcattcccantggaccctggtcccaatgggggaaactcaatttttaatagaaaagggggcctccattgttcttgaaacatccccttaaaaaaatttacctccttttgaacaaatccttcttgggggaaaactc

SEQ ID NO: 416745 - DNA, 869 bp, Homo Sapiens
  misc_feature (364)..(372): n is a, c, g, or t
gatttttaaaatattacaagtttaataggttagagatggattaccaaacagtcaatgtatgtcaccaacttttttaagagaaagcactgaaagcttaatcacacaggtgtctgattctcccttcttccaagccacccccgcccccattttcatttctgttattttctcattttagctggtgctgcatagcttagtctttttctttgagcttttcaatccacttttgtagactaattgctcactcatatctaatttgatattctgtcattgctgtttattccttctactttttgttgctgtttttcccagttctgtgatttttttgtatgctcacaaccattaaaaatttaagtaggaaagattnnnnnnnnnggtggcacaggaaaaaagggacaatcgacagggtagacatggtggttggagtgacataaagagacacaaaattgctattaagtattgaaactggccataagccaaccatgaaaaatgtttaatagatataaaaaattcagttgcttaattgtcataactattgtagaggagggaataatggaaacagttgggtacataattgtcaaggaagaaagtagctggtgatgttaatatgtagttatttcataacatttcagtgactatataggttgttgaacttgcttgttggaaacgttcaaataagtttagagcaaagattgtgaagtaaagagtgtgtgtgattaaaattaagaggtttttgtgataattttctttgctaaggggcagcctagtaccacagatgcttattaagcagacttaatgcttaattaaatcttatctaagaatagttttcagagagcagggatatagaactggagtagaaaagcagaatttat

SEQ ID NO: 416746 - DNA, 628 bp, Homo Sapiens
ggagaaaacagcaaaactcaaatgtgtgttcacctaatgaggcaaatgtgaactagctcatgtcaaagtaaatggccttcatttaatgtgagggcaaaggacagtaattaaagtaccacataatccaagccattacacagtagatggcagtgctactgcagctccatcatggcatcaacagaaatactaccaccaagaaagcaatcagaactgcatcccagcacggtcacgcactgcataaggatgcttccaccactgacagaccacacggaccagggatcctctaagattctaataatgcatttttactgtacctattctgtgtttagatacacaaataccactgggttacaactgcctatggtattcagtacagtaacacgctgtacaggtttacagccgaggagcaacaggctctacaatgtggcccagaggtgtagcgggttctgccacccaggtctgtgcaagtgcactctgcggtgctcacacaacaagatcagctgaggacgcttttctcagaacgtatctgtgtccttaagcagcacatgactgtatgcctcaattcccgtatcatgtactgtactttactatgaaacaggacagtgttttagacctgtagcagctggcc

SEQ ID NO: 416747 - DNA, 869 bp, Homo Sapiens
  misc_feature (205)..(218): n is a, c, g, or t
  misc_feature (811)..(811): n is a, c, g, or t
gaaaggggaaaacttacaccatttagtcattcgtggattttcagtgaagcagtgactgtctactaaagaacactagaaattaaggactctggcccctagtcctagctttgtgtttttttcacaagtgaatgtgcaccaataatgctgcagatctggggaaatccattttccccacacatctgccaagccatttacctgggcgacnnnnnnnnnnnnnnctaacctatattctctttacttgatgtggatccatgatactttctattacctgctccaaagaacaggtgtcctccctctcctagtctttcctgcagggataaaataaaagcagggctatgctaaaaagtgtccacatagaagactataataaaagagcaaatcaggactgggtgttccaagtatctgtaattggatttattttaaagaaagagaaatgaatgtactttagtctccttgagagaccagccacttcaaggcagactttaatcatcaacataagctttattaaaatactggttcatcctgaagttcgactcaatggccattttctcctttctcttaattctgcacactcgtgtccactgtgcgatgcaagacccttcagaacagcccacccctcttactgtctaatgtttccagtggcacagggacagattcatttggaaatccctgggcccagtgtcccaggaagaaacccacagttgagcctggagtgactgtcctctgattctcacacttaccgtttcctggggctcctcatcttcaacacggtggaccagcgtggaagaaacagaagcctgcccccctacangactatcattttagaggggagttttattttcctagtggtcccttccagaccccgcccc

SEQ ID NO: 416748 - DNA, 930 bp, Homo Sapiens
ttggtgattgtgttagtctgcttttgtgtcaatataaagaaatgcccagggctggatgatttatatagaaaagaggcttaattggctcacggttctccagactgtacaggaagcatggtgctggcatctgctccttgggaggcctcaggaagctacagtcatggtggaaggcaaagcaggagcagtagcaagagacagagaagggggaggctcccagactcttaagcgaccagatcttgtgggaactgactgagcgggaactcactcatcaccagggggagggatgacactaagccattcatgagggatctgcctccaggatccagtcaccttctaccaggtctcacctccaacactggaggtcacatttcaacgtgagttttgggagggacagaggtccacaccatatcagttatcagcttagtcatcgagttaaggtttcagagcaaaagtgccagtgttcccagctctcaccgcccaggacatcttctgtagtgcgagctgtgccctcactcgtgaccacgctgtgtgggctcatcctggctggggctggtcccggctgttgctgagcgtagatgaagttcccctgcatcctgcgctggttctgtcgtcgtgttgtgtaaaaagcctcacagtgcgtagtgttctcctgcggtgactgggaacgcagttttcttgtcccccagttttaccatgagatatctcgactgggggggtttggcctttgagctttgtggggcctggtggggcagacattctgccggggctttccaacctttaagtttaaggttgtgggaaggcggaacccccctgaacctttaaggggcctggtgggggaaaaatttccccccggggtccttccaggcccttttagagttttcttggttgggggaaagccaaaaacccccccatggcctaaccggtttggtt

SEQ ID NO: 416749 - DNA, 579 bp, Homo Sapiens
cattccacaccagcgaaaaacagaaaaattaaaaatgatggctaagaattctctgtctgaaacaggttcggggccaagaaaggataatatggctcactccaagaccccagaggcctacttctggcttctggtcaaagtaagagccaagtcacagatactctaattaaaaactggactgaaagtcttccagattggattttacacaggacaccagatagcaattgcttacacattactagcctagattgcattctaattattcttctgtggcaaagaaacaacctatgctttctttatcactcctaagccaatggttttgtgcattagcattaaataattttcaaataatactagagggaaagtcccttcacaaaatacacacaggagtcatgaaagaaaacattggtcagattaattagcctggacaatctttcaaatttgagcccctacttggacttgctgaaaggaaaatactttatatttaagactcaatactcttcccctcttctcattctcattattgcacttgactagtctttaaaatcaagggaaaacaagactctagttttgtaacatttg

SEQ ID NO: 416750 - DNA, 886 bp, Homo Sapiens
  misc_feature (742)..(811): n is a, c, g, or t
  misc_feature (827)..(827): n is a, c, g, or t
tttatttctgggttctctattctgttctattggtttatgtccctgtttttgtgccagcaccatgctgttttggttaacatagccctgtagtatagtttgaggtcagatagcctgatgcttccagctttgttctttttcttaagattgccttggctatttggcctcttttttggttccacatgaattttaaaacagttgtttctagttttgtgaagaatgtcattggtagtttgatagaaatagcatttaatctgtaaattgctttgtgcagtatggccttttaatgatattgcttcttcctatccatgagcatgatatgttttccattttgtttgtatcctctctgatttctttgtgcagtgttttgtaattctcattgtagagatttttcacctccctggttagttgtattttaccctagatatttttattctttttgtgaaaattgtgaatgggattgccttcctgatttgactgccagcttggttactgttggtttatagaaatgctagtgatttttgtacattgattttctttctaaaactttgctgaagttttttttattagcagaaggagctttggggctgagactatggggttttctagatatagaatcatgtcagcttcaaatagggataattttacttcctctcttcctatttggatgccctttatttctttctcttgcctgattactctggctgggatttcctatgttgaataggagtcatgagagagggcnnnnnnnnnnnnnnnnnnnnnnnnnnnnnnnnnnnnnnnnnnnnnnnnnnnnnnnnnnnnnnnnnnnnnnggggggcaagctgaantaaaaagcaagactcaatggggtattgctgtcttttgagaccttatctcacatggtgaa

SEQ ID NO: 416751 - DNA, 590 bp, Homo Sapiens
ggtccggaattcccgcggattcactaggtctattggttcaaaaaaatcattaatagtggcaaaagaattgaggatagcacaaaagtaattttcgtttcaggattggttaggatttcagatgatagtaccttgaaaaatgcaatttcctggccaatattctactggctctgcaataatagttgtcaattatctatgggccctggtctgtggacatattcttgggggaataaaaacttttctaggagtcttttgcatttcatgctgataataacttaaaaattaatataaagcatcctagatcatcaagatgaccaagtcctggctcatgatttaaatgtctgcatttgtgtttgtatttacgattgtttatatgccaaacagccatacttcaataattgcaggctaatgatgaaagaagagtgaacagagggagatttaatagaaacaccatgtgtgtaagccgagagaaggtcccacggcattacaaggaggcttacaaacaaaagtgtctcagtaggttcaatagagaaatatgataaaagaactcagaagtcacataccacatcatattttagatttgctgagattca

SEQ ID NO: 416752 - DNA, 254 bp, Homo Sapiens
tggcaaaaggccagagtgttctgtggagctggactgaagtcatgaacttcatgccagactccatttgggtaaccatattacacaactccattagggttactgttcacatgcccaaattcagcaaatttgctcaattattgtattcttaaaatttctagacattttatttgtttatctgtcacatttgggaggtaattgttgtagtttgctgttccctgtagatattttcaaagttgtctttcatttacttaaat

SEQ ID NO: 416753 - DNA, 716 bp, Homo Sapiens
  misc_feature (515)..(528): n is a, c, g, or t
  misc_feature (559)..(636): n is a, c, g, or t
gcaggtgcaccttggtgaccatgcggcctccgtgtgggccacccgttggggactggcctggcccaggctgccccaacaccagcactgtcttcagagactcaaaccactagaagaggacgcagcctgttctgcactcccagggcccggccgtgcgggtgcccaggctcggggggacactgccgacctctgacgttgagcacttctctttggagtaaatatcagtgacttttaaattattatgattatttaactaatataataattattatttctccatccctgccacctccccggctgcagctcccccgctctcggccaagccccagtttgggaggggcccccccttccgtccctggaatatttccttcctaaccctgccctctgatctgctttaattggtttgaaacccctaaaatccagaataaaatgtggtgttagttaaagggaaaataaacgtgaagcctgcgttttggggcccccgcccctttggggttttttgtggaagatcaagtttnnnnnnnnnnnnnntgtgtctgccccaatcccttgttgccccctnnnnnnnnnnnnnnnnnnnnnnnnnnnnnnnnnnnnnnnnnnnnnnnnnnnnnnnnnnnnnnnnnnnnnnnnnnnnnnttcttcccaaattcgaaccttctctatagtgggcaaaataatttcctctcccaccccttctgctgtcggtcgggttcttt

SEQ ID NO: 416754 - DNA, 442 bp, Homo Sapiens
  misc_feature (110)..(397): n is a, c, g, or t
tcagagtgctgggatttgaactaaaggaagttcatagttaatatttttaacactatgctatgcgtacgccctgcgagattcatgcagtctaattaatacagacacccagnnnnnnnnnnnnnnnnnnnnnnnnnnnnnnnnnnnnnnnnnnnnnnnnnnnnnnnnnnnnnnnnnnnnnnnnnnnnnnnnnnnnnnnnnnnnnnnnnnnnnnnnnnnnnnnnnnnnnnnnnnnnnnnnnnnnnnnnnnnnnnnnnnnnnnnnnnnnnnnnnnnnnnnnnnnnnnnnnnnnnnnnnnnnnnnnnnnnnnnnnnnnnnnnnnnnnnnnnnnnnnnnnnnnnnnnnnnnnnnnnnnnnnnnnnnnnnnnnnnnnnnnnnnnnnnnnnnnnnnnnnnnnnnncggtaggatctggaatagcttggacttgtatttctaataattagg

SEQ ID NO: 416755 - DNA, 500 bp, Homo Sapiens
caagtactgctaatactaccactgctactgctggtactgttaatactactgtctctactactgcaatgactggtctcatagtgttttaggctgccttcaatgtgcaacaccttatttaaattgtacaacaaacccttaatgtatgtacaattatatgaggaactaggtctcaaaagttttataatttcctccagctcgtagtggcagggctggactccaagctgagatgtgtctggttgtccggttctaaacctttctacaggtcaccttgtaaagaataaggatggagctcaaacacagatacataaaggattaaaattaaaacttgttcctgcttttaaaatgtagtggttgaaaagccagaagtataaataactccagttctgtataaatgatattctcaaatgctgcatcagaatcgcttgggagaatttattaaaaacatggattcctagactgcaaccaagaactcttggatgagactaaggaatttgtaaatt

SEQ ID NO: 416756 - DNA, 880 bp, Homo Sapiens
  misc_feature (599)..(608): n is a, c, g, or t
  misc_feature (798)..(798): n is a, c, g, or t
ttttgtgtgaacgtatgttttcatttcccctgggtatatacatatacctaggagtggaattgctggatcgtatggtaagtctatgtttggccttttgaggaactgctggactattttccaaagcagatataccattttgcatccttaccagcaatgtatgagtgttccaatttttccacagctttgccaatacttgttattgtctgtctttttatcaaagctgtcgaggtaaaataaagtataaaggtgaatctctatatttaaaacatcttatttgagaaggaagaattgtaatttggtgcatacatgcagacctaatggtcttccatatgtctgaagaacaatgagaaggttggaggttttgtaaacaggagaaatgttacattttgttctggagaaagatcattgggactagtaaagttttggagatctggcaagctctgattaatgagtgacagcagtgggtaaaatgagtcttagagtcacagtaggtttgtttcagtagctattagataaaactggctttaggctacaacaggcagtttcaaaagccaggcttatagggaattatatttttggagcaacattatgtgccttgnnnnnnnnnnccctggtctctcaactccattttagttggatatgagaggcatgacccaattaatatgatccactttcacattttccccttttgattaagatctttttttgaaagcattgccaattaactacttataagttagcttaattgtccctcagagctaggatggacctgttctggttgtctctgtcccacatcancagggaagtatgggggggcttatgtcagtgaacctggggccacattttgaggtagcagagtcccaggaagggaaaaagtggt

SEQ ID NO: 416757 - DNA, 846 bp, Homo Sapiens
  misc_feature (777)..(777): n is a, c, g, or t
  misc_feature (788)..(788): n is a, c, g, or t
ggacaaactgtcccagaagactctgggctaaagcccaccacctcccaggtgagccaacttgtaccttggcgagtttcagattggttcagagattcacttctcttcacttgtctctcaaagagaaacacaatttttcaggataatttcctacagatttttagaagaatttccactgtttgttttggaaagcagttagggtaaaataaaacccaaaaatttgcttttctcttatgacagtctggctgggttgactcagtggcacctgctatggggacgtgcccccgtctctctccctcagcccttccagggagaacagtcttgtgtgaatttaatgtgatcatgtctttaccatgtggtctctcagctgtcactgacagtgtgtttgagagtgtctagaaggggttttaattggcaagatctttagtaaaatttgcaaattagtgatccaccggctgatgttatgacaatgtctaaacactatcagtgccattttaaaataatctttcatcgatacaacattcattttaattagccaggaaatgttggtcccaaaggaagctgcctacagttttatagatttagcacggggttatcggacagcttgataaacttcatttatttggaaaaaagagatttattgaagtcgtttatatttcattcaacttatgaggcgctggtcagagtttagaatgattggaacacagacccagggatacaggtggaaaatgcccttctctttgatggagtggcatggtatgagtatcagcctgagagtcnctgaaacctgngttttcatcctggcttagccagaaatttgttttgtataaatctggggaaagaacaacc

SEQ ID NO: 416758 - DNA, 642 bp, Homo Sapiens
  misc_feature (39)..(39): n is a, c, g, or t
gaagctgggtaccggtccggaaaattcccgggatctctnggccttcagacatcaaaacatacagaaacctaaatgtttaacaaattactaaagtactcgatttctgcccatcaccctctctcctatccctttggtcacacctccacacagaattccactatttgatcttctatttggtctacatttgggctcatccttctatatgctatggtatgtaaagccaatcctgtccaatatggcctagtcttttttgtccaagcccaaatcttgatagaagagactaagaacaacattcctaacacgcaatagttttgtcttgaacctcagtagcaaatacagttgattggatattttgaggtcattctatgaagagtcttaaatttggggcagataattttgccttgatgaagtaattcatcaagaataagaaagtttgaggacttacttgatatttttaaacatttacttaagtatgcatgtaaaagaacaagaattgggtagttgagggtaggagcccaggtgtgaggtttgtgcagcagttgaggcaatcaagattatgacaatttcaagaaggactggcttcattcagaaagttgtaaaaatttttaaagtggcacttctcctttcaaaatacatatgcca

SEQ ID NO: 416759 - DNA, 865 bp, Homo Sapiens
  misc_feature (779)..(779): n is a, c, g, or t
acagtgggctcattcagtgtgtggcagatgcccggcaagcatgcttcatcttgctctgcagtggcaactctctcgtttcccatgtggaattgtgaccatggagcttcatattttcagagatttagttcctaatgaataaagtattttaaatgtacttatttatttgtgaccccaaaaaagaagtgtttgggttagatgatctctttcagctttcagagcctgcaatccctttcctgattccgaatcataaatgtatgggaatgtgtcaatgtgcaagagaaagaggggaacagaaaaagtcaaatacaaacacaagagtattccagttaacttaagcgagagaatcttccacaattcctctttcttttggattctctcctgttgtctccaaggctcactgactccaacacggggccctgagtgtcggttgcaaagtgcttgaacaatctgtcctttgtttcacatctagtctcatttcagggtccgtttgttgacacttgaagtcaagcgctgtgtcatcagagagactctggtgcaaggcagtcagctgtttattttgctgcacaatctctgtgcccagttcagccagagagagcagccctgcatgcagcaaaccagaaccgagcctgcagcaggactcaattaagttgtcactctggagtgtttttctggctggaaatgaagctaatccttcctaatgcgctggcttcttcgaccatgtccaagcaagggctcacatttggctaagggttcgaatcctgtttcagggaatccaattncattaaattcaatggtccctcttttacttagcaaatactaaaatacccctacctacgtaccaaaccgggaagcagttaggccactg

SEQ ID NO: 416760 - DNA, 585 bp, Homo Sapiens
tgaactgaagaatcaacttcaaaaaagcccaacctgtagaaattggtaattgattggatatggcgtatataggagaaatcatgctggtaggaagtaattgcagaagagattgagtttgggtctagatctcctgagttttggaaactggaagcatgctcaagtggaaggcaccgtaagcattccagagttttaggtctggtgtttaagtagaaggtcagacctccagggatgaacattgaagggcatggttgtattaatagcatctctgcccttaaattagcgtgagcaccgcatggtcagagataaccaggtccacacatgtttgtgtcattccacaatgtcaggcttttactgatgctatctcaataataaaagccatgggctccatggagttcccaaggaggcaattctccttagtgcctcccattcattcagaagtcagagcgcaggcacacaggctcaagctactccacaaggcagtcagtattgtaaagcatacattgtggtatacctagccaatatgtgaatgttatagactgaacattccacaacaaacaaagtaacatttaccatcaagagagaagg

SEQ ID NO: 416761 - DNA, 717 bp, Homo Sapiens
tttgaaagggcttatcagaatctctgcattgaacaagggcatatggacagtctttattcaacagacacttcctaaactgttctaaaatttgtctgcaaatgggaaaagtcaagatactaatttgggtgagaggaaaagattcctcttaggtgtagatgaatgaatcatgcagtgagattccaggctaactgtagtttcttgaatcttatttgttaatctgactcacagctgaaaagtaacctgatgaataacagactgatctttaattagagagaaatgtttttaggagtcagttttttcattgcctaaaatgttaagttgaaatttaatgaaataaaagtaaacaaactgcagagtgactgcagaataaagctgtattaaaattccagctgttctgttgaaatccttataatgtttgcagtaatgatctctgtccttcagtcctgatttttcactcttactctaagtaaatactatttatgaatgccaactgtgttagagcttgggagcacaggatttaataagtgaactagatgtacctctgcaattaaataactggatattctggagccagctagattccctgacattttatgctgccaaagagcagaacctgatttgaatgtagattgagtccatacgttatataaataagaatgtaagacatttatcaactgttacgtgtctcagagagtttctacagaaagtcaacccttg

SEQ ID NO: 416762 - DNA, 488 bp, Homo Sapiens
tccactgccacctgaagcatctgagatctggagaagggacaaggtgggagtcacagtgggctgagtggcagagctgggtagatactggctagcacagtggaagcacagctgataggagatgggcatcatttccctgtgcagacttgcagcctgcactcagccatcctcagagccaggagcaaagcaggtgcttgaaaaatatgagtaaagtcatacatttacaaattttgtaaattcatatgattgcatttaattgtgataaaatatacataacataaaatgtactcttaaccagtgcgtacagctcagtggcgtgaagtacattcacactgttgtataaccatcaccaccatctatctccaaaactcttcttatcttgtaaatctgaaagtctctacccattaaaataatcccatttctcccccccaaaaaagcccagggggaggcaaaaggaatgaatcccttctttttatacaaagccccgcccg

SEQ ID NO: 416763 - DNA, 613 bp, Homo Sapiens
  misc_feature (343)..(496): n is a, c, g, or t
gcaacccaggagtgccaaactgagatcttcagtcaacacttgagtgggagaggagtccacactctcaaagcacagagatggagcatggctgcaaacacaaggaaatacagaggagccacgtggctaagcaagagcgtatctactggctattacacttaagtgccatctactggatcagaacccaaacttcaacaccaaaaatactttgctaatatacaccccgtgaaaccaaggacaagaattcagctacaaaagaccctgcacgaagcctcagcctgctgaaaacatccagaaatgaagacaacagactatactcaaattacaccacaattaaaggaacacnnnnnnnnnnnnnnnnnnnnnnnnnnnnnnnnnnnnnnnnnnnnnnnnnnnnnnnnnnnnnnnnnnnnnnnnnnnnnnnnnnnnnnnnnnnnnnnnnnnnnnnnnnnnnnnnnnnnnnnnnnnnnnnnnnnnnnnnnnnnnnnnnnnnnnnnnnaggaacaaagatcatcaatattcaggagaaagttgaaacccaatccgaggaatctaaggaatacaataaaatgatagaggagataaaaggcaaaatggcaattttaagaaagaacca

SEQ ID NO: 416764 - DNA, 840 bp, Homo Sapiens
  misc_feature (543)..(716): n is a, c, g, or t
ctgcagtggttgtagagatttaattagatactatggagcaagtatacaatgccttgcttataaaattgctaatcatatctgctataattattattgtacatatttactgactagccattaataagctatttgcaagaaaataattatgtaacattgttaaatattgaccctgggttgggcattagactaagcacttttcataacttctttagttctccaataaccctataaggtgggtaccgttaaaatacttaatttgtacgtgaggacacctccacataattttcttggccacagcaacatagcgtttctcctaccacctactgggaagcacacatgttgcttcctttgcctaatataaccctttcacaacctgccctaacccttatattcataattgtatcctcctgaccagaatgcaatgctgggttctggccaagagggccccagaccagggaagttgtttaaaatgagtcacataaatgtgcaggaagaaacatgtggtttttccttccctagtaggagaaaggctgttgactccannnnnnnnnnnnnnnnnnnnnnnnnnnnnnnnnnnnnnnnnnnnnnnnnnnnnnnnnnnnnnnnnnnnnnnnnnnnnnnnnnnnnnnnnnnnnnnnnnnnnnnnnnnnnnnnnnnnnnnnnnnnnnnnnnnnnnnnnnnnnnnnnnnnnnnnnnnnnnnnnnnnnnnnnnnnnnacaagaaacctgcatgcacagtgggaaagaccctgaaaagacacagagaggaacgccttctacaaacccaagggaacagttgaacccaacgggaaattggggaaaaagtaatgggggccccatt

SEQ ID NO: 416765 - DNA, 832 bp, Homo Sapiens
  misc_feature (139)..(417): n is a, c, g, or t
  misc_feature (423)..(425): n is a, c, g, or t
  misc_feature (427)..(499): n is a, c, g, or t
  misc_feature (654)..(662): n is a, c, g, or t
  misc_feature (772)..(786): n is a, c, g, or t
gctggtccggtccggattctccggatttccccacactgtttagttagcttgcaagctatacaaaaaaaactggcagcagggtgcatttggctatcgggccataggttgctgctctctgccctggtataagagaatcccnnnnnnnnnnnnnnnnnnnnnnnnnnnnnnnnnnnnnnnnnnnnnnnnnnnnnnnnnnnnnnnnnnnnnnnnnnnnnnnnnnnnnnnnnnnnnnnnnnnnnnnnnnnnnnnnnnnnnnnnnnnnnnnnnnnnnnnnnnnnnnnnnnnnnnnnnnnnnnnnnnnnnnnnnnnnnnnnnnnnnnnnnnnnnnnnnnnnnnnnnnnnnnnnnnnnnnnnnnnnnnnnnnnnnnnnnnnnnnnnnnnnnnnnnnnnnnnnnnnnnnnnnnnnnnnnnnnnnnncaaaannnannnnnnnnnnnnnnnnnnnnnnnnnnnnnnnnnnnnnnnnnnnnnnnnnnnnnnnnnnnnnnnnnnnnnnnnngggggcgggccgctcctaaagtaatcccctcgaagggggcccaagcttttaccccgttaccccagttttttctttggtacaaaaaggggggcccccttaatagggggaggccggttttttatataaacctaaggggcccctggggccccgctccnnnnnnnnnaacaaacccctcctcttggaaccgtggggggaaaaaaacaccgggccttacacccttgggggggaaattctttgtgttgggaaagggagaacccctttaacctctttgtnnnnnnnnnnnnnnnacaccaaaaattttgggggacaaaaaaattctccctctttcacgga

SEQ ID NO: 416766 - DNA, 1407 bp, Homo Sapiens
  misc_feature (700)..(718): n is a, c, g, or t
  misc_feature (808)..(818): n is a, c, g, or t
  misc_feature (829)..(837): n is a, c, g, or t
  misc_feature (895)..(904): n is a, c, g, or t
  misc_feature (1060)..(1069): n is a, c, g, or t
  misc_feature (1235)..(1235): n is a, c, g, or t
tccagtccatccacgttgttgtgaatgacaggatctcattatttttaaggctgaagagtactcctttgtgtttatgtaccacgtttttttcatccattcatctgttgatggacacttcagttacttccaaatcttggctactgtgaacagtatagcacaatgtctttatgtaactgtaaattcatgctaggtggcagggttgttcttgctaccaactggccttggaaaggtggcatttcagaacaaaatctcattggtgctgcttgcccagggaagctgtagctttggagaagctcagctgtgaagtcactaaaaccagagttggggctataagtagtgagcactgcaacatgtcatctttaccctacaaacaggcataaccatgagttgtggtacccacctccctagaggtgcttagtatgttttccattgttgatgatttcagcctcaaccacagacacgttgtttttgctgtgtggccccctctctttagttttaaaattcttctttttggaaaataagggataaattccagttcccccttaatggaaactttaatccaccaaaataaaattttgccgggcattttctggaccctcatttaattggtttattaacaagaaataggccaacctttaaataaattaaatcttacgttagggcgccacgaaaatggttaaaatttacacctcgtctcaannnnnnnnnnnnnnnnnnnaacccccaccacttctattagaggcagcgcttataaatataaggtcacctatcgccccacttaaaaccactctgtgtataattgtgtttnnnnnnnnnnngaaaacactcnnnnnnnnnataaccataggagcccccccctatattttataagactcccacgcaattctacctaggnnnnnnnnnnttattttgggggggcctacactggaggacttataactttttttggggcgagaaataaaaaacatttctctcctttgcgattaaacaaggggtaaattcaacgccccttcacacaaaaatgggccggctcaaggggattaattctactcgtgttttnnnnnnnnnntgtgaaacacgcaaatatatagaacccgacgggggtttattctccccactcttaaagaaaacatttttgtgttgttaaaaaatagatataaaaacgggaaaaatcttttcgccccttttaaaaaaattattgtatccttcaccctataattttaaaagccacccanaatatttctcccactgggtacctttttgtagcaaagagggcggaggtaataattagatctcgctagatgagagctccttatactgagctgtgtagaaaaagagcatctttttggagattactatttgtcgcttgacacaaatcccacccacacagagtgcattcttactacc

SEQ ID NO: 416767 - DNA, 812 bp, Homo Sapiens
  misc_feature (88)..(171): n is a, c, g, or t
  misc_feature (605)..(605): n is a, c, g, or t
  misc_feature (735)..(735): n is a, c, g, or t
tcagacaagtggttataaagtttatatccatgttaggtatttggatggtgtattagttagggttctctagatggatagaactaatagnnnnnnnnnnnnnnnnnnnnnnnnnnnnnnnnnnnnnnnnnnnnnnnnnnnnnnnnnnnnnnnnnnnnnnnnnnnnnnnnnnnncacatgcatataagtatacatacacacataaaggggagtttattgggagtactgactcacacgatcacaagatgaagtcccacaatagactgtcttgcaagctgaggagccagaaagccagtctgagtccccaaacctctaaaatagggaagccgatagtgcagccttcagtctgtggccaaaggcccaaaggcccaagagaccccgcaaatcattagtgtaagtccaagagtccaaaagctgaagaacttggagtgtgatgtttgagggcaggaagcacgcagcatggaagacaaatggaggccagaagacttagccagttcaggttttccacgttcgttgttcctgcttttattctggccatgctgacgaatgatgagatggtgcccacccagactgagggtgggtctgcctctcccagtccactgactcanatgtgaatctcctttgacaacactctcacagatactcaagaacaatgctttgcatccttcaatccaatcaagttgacactcagtattagccatcacagatggggaagatattataccccaagagacattngaagcaattagtcttcccctactatctcccttgggtgggcgttttaggaaacttccaagtaaacccggtccaccacc

SEQ ID NO: 416768 - DNA, 233 bp, Homo Sapiens
ttgatgatgtttagagaataagaacattcagggcagtgctatgattacacggttcaccttatttccattcatatgtccatcctgcatcctcaatagtctgtaagtgcctacaggcctagagaacatgtgctgtgtcttaaccttctgtctctctcctgtcatgccatagaagtggagttgttgaattgtactcaaatctctcatacatgactcttcacccacgcaatttgtgc

SEQ ID NO: 416769 - DNA, 889 bp, Homo Sapiens
  misc_feature (44)..(685): n is a, c, g, or t
  misc_feature (767)..(767): n is a, c, g, or t
  misc_feature (815)..(815): n is a, c, g, or t
atgatgctggagaaaacaataacacgtgttggtgatgatggtgnnnnnnnnnnnnnnnnnnnnnnnnnnnnnnnnnnnnnnnnnnnnnnnnnnnnnnnnnnnnnnnnnnnnnnnnnnnnnnnnnnnnnnnnnnnnnnnnnnnnnnnnnnnnnnnnnnnnnnnnnnnnnnnnnnnnnnnnnnnnnnnnnnnnnnnnnnnnnnnnnnnnnnnnnnnnnnnnnnnnnnnnnnnnnnnnnnnnnnnnnnnnnnnnnnnnnnnnnnnnnnnnnnnnnnnnnnnnnnnnnnnnnnnnnnnnnnnnnnnnnnnnnnnnnnnnnnnnnnnnnnnnnnnnnnnnnnnnnnnnnnnnnnnnnnnnnnnnnnnnnnnnnnnnnnnnnnnnnnnnnnnnnnnnnnnnnnnnnnnnnnnnnnnnnnnnnnnnnnnnnnnnnnnnnnnnnnnnnnnnnnnnnnnnnnnnnnnnnnnnnnnnnnnnnnnnnnnnnnnnnnnnnnnnnnnnnnnnnnnnnnnnnnnnnnnnnnnnnnnnnnnnnnnnnnnnnnnnnnnnnnnnnnnnnnnnnnnnnnnnnnnnnnnnnnnnnnnnnnnnnnnnnnnnnnnnnnnnnnnnnnnnnnnnnnnnnnnnnnnnnnnnnnnnnnnnnnnnnnnnnnnnnnnnnnnnnnnnnnnnnnnnnnnnnnnnnnnnnnnnnnaatatttgaaatctaaccataagggacatgttattcatatatgctcttcatgttcatgattcagccaatctattttaatttntggaaaagtctcaaactttaaatggattttctctaaattatcttttcngggagtgaagttagaaattatttgatgtgaggaaggatatttcttccctggacatgttttattttacgtaggtt

SEQ ID NO: 416770 - DNA, 593 bp, Homo Sapiens
  misc_feature (60)..(69): n is a, c, g, or t
  misc_feature (199)..(285): n is a, c, g, or t
aattataaatttttgaaatatgtataaaatggtttaagtaaaacacaaagaacaacaacnnnnnnnnnnccctggtcttttaccactaaatttttgagaaacactgacattcctttagatgtgcaaaggaagaacaaaagtcatatatttgcgaaacatttaaagaattccctcactttgtgaaaattatcaaaatttnnnnnnnnnnnnnnnnnnnnnnnnnnnnnnnnnnnnnnnnnnnnnnnnnnnnnnnnnnnnnnnnnnnnnnnnnnnnnnnnnnnnnnnctaggcctgtggtcacctggacacagggcaaccaagaagaaacactacatttccctgccatccttgaaattagatatggccaagtgactaagtactcaacaatggcatatgagcaaaagtgatatgtgtaacttccagttttgacccttacagggaagaaaactaagactccgagaagtgcatgcaagagagtgatagttcttgaattgtaccaatgagtcaaacactaggaaagcaaagcaacagcatggaaggagcctaggcctcagaactgtgcggagccaagccattctatcagtttacacttt

SEQ ID NO: 416771 - DNA, 917 bp, Homo Sapiens
  misc_feature (400)..(413): n is a, c, g, or t
caatatagaattattctaggattagtcattttaatccacatcagcacagtgaatctagccctcaggagaagcaatattttccagtaagtttcaggcaacatttttgttggttagattgaattggaagcttaaagagtttactaattgctattgatagttctttagcctttgctaggacgggattttacaaagatgaaaacctcttacacagttttaatgaatgagttggcaaatatccgattagttgttcacattcttatcatttctttcattgttcatagtcagccttagccagagaaggtagaaactcctgtctgtctctgccaaggccactattctgctgtataatgttttcacttgtgtatgggaaggcaccacacatccttttaagaaaatagcnnnnnnnnnnnnnnttgcaataagaagctgaggcatgaaaactaagtcacttcctaatgagtcaaaagccttaaaactcacaaataaataaccatatgtacatttcagtctgatatagataccatatttttcttgacccgaaggacaaggggtcacaagcaggcacagggcatgctgtacttagaacccaaaaggagaggagtgccaggagctaaagccaacattggagggggtgggtgtccataaataatgcacgtaaccaaatacaagatggctttgaatatgtgatgatcactgtccagttttacaatgaaaaatgtccaaatatatttaggccaaccttaatgaaacagataaatacatattttgaatattaaatttttaatttggattacagtatattttatattataaaatatgtattaccaattatgtactcaatcacatattatgtaaaatttgagatatattgctcattcttgggctctcaaattttaatgaaaaaatttatttaaatt

SEQ ID NO: 416772 - DNA, 904 bp, Homo Sapiens
  misc_feature (121)..(222): n is a, c, g, or t
tgatacccaaatgagccactgggtggggttgtagagctcagtggttcaaacagactgcaggttctatctagaccctgattgcctgggtggatggctcattctgccacttcctacagatacnnnnnnnnnnnnnnnnnnnnnnnnnnnnnnnnnnnnnnnnnnnnnnnnnnnnnnnnnnnnnnnnnnnnnnnnnnnnnnnnnnnnnnnnnnnnnnnnnnnnnntcaagtaagcactcaatcaactttagctagtgctagtattagtattagaattaaaatcagagttggaatgaaaagggcatcagaatagtatcaacattattactgagggctgactttaagcccaagagtgaaatctcatgtctaaatgttggaaagaaaacaaggaaaaaagaggttgaaaatggagtagaaacaggtggggctacggcagatgacaactatttatgtggagagtactttaatccgggtaatgagtcagcatctatctgtctttaaattacaaatgtatgttttacaaaaatcacttgtcttcatcatcaagaaaatacaatgagtttgaaatacaagaactcaagtataaatcttctccatgtcttctgggtgcttttcatgccctactctgtggagtaacttacctgctgacatttggaatagcaaatttaatagctgtttttaaaggctgacaaagccatttctattcttcctggtttctgaaggacctgaggttatgggtagctctttcaaaaatacatttccataaatcatactaagtccgtagttttctattatgtaaagcattgctccttgtgtaaataatgaatggcaatttttccactaaataacggggtgaaaagtccttagcaaaggactccatttttcctccatccaacaaaaaaggggg

SEQ ID NO: 416773 - DNA, 138 bp, Homo Sapiens
aggatcaggctgaagtcatactttgcaggactttgctagaccctgcaaccttgcttagcttcctccctgtccctttctgctttcccatttctttagtgtgtccctggggggcactcccttaatcaatcactttcacac

SEQ ID NO: 416774 - DNA, 215 bp, Homo Sapiens
acgtgcaaccttcccagtttcctcctctagcagcagtggtgagaagagctgggctgcagatgaactctccaccccaggagggttttaccatggaaggagctgcttttctagctttctcctacacataacacacagatctctcattatccaattagggcctatttgggaccccacactccagtatgaataaagcattgttctctctccatgtattt

SEQ ID NO: 416775 - DNA, 905 bp, Homo Sapiens
ctggaccggtccggaatttccgggatctagctctcctgagagaaaataactctgatactgaagaaattgtcctctttcctcaaggcaggtaggggtctcatcctgaacccaagcctggcacctttgcctaatgggtgagaacacaactttgaaatcaagcttggctcaaatccggttctgtcgtttaccaccatcttttcaactttgggcagtatacctggtatctccaggctcgtttcttgcttctgaagctgggccaataatactgatccaccggggctgctataaatacgagaccactaataagaaacgctgaccacagtgaccacacacaacggaaactcaaaaaacgtgagtcccttccccttcccagaagaccctttctttctgtctgcaggctccggatttctctactaggtctgaatcccaggtctgtaacacactttctccgtagcctttaagaagctgggaacctcagggcatccactcgtttgcctgtacacgaagattatcaaacctcccatgctggccgcctggaaggttagtgagataatgtaggcatattcaagattagacaattattaaataaaaatttccccaaactgactctctgctgatgaatttatcatatattctatgtgaaaaaaagcaagcgctcagtttcagtcctactttctccttgactatataagcactcaatcttcctcctgataattaaagcaaggaaaaaaacgaagccgaagaatgagcaacattttaaatatcttgaacatggttatgattatagaacaaaatatggatttgctcactcagtaagctagtccctgcttggtaagcaagagggcacctccttgaagcttgaaaagggggggattttggaaagaatacagacagtccctactgtt

SEQ ID NO: 416776 - DNA, 820 bp, Homo Sapiens
  misc_feature (52)..(89): n is a, c, g, or t
  misc_feature (121)..(387): n is a, c, g, or t
  misc_feature (421)..(471): n is a, c, g, or t
ttcacagaagttgctacacactgaatgcttgtgctcccctcccccgccccgnnnnnnnnnnnnnnnnnnnnnnnnnnnnnnnnnnnnnngtgacggtattcagagaggactcctttgggannnnnnnnnnnnnnnnnnnnnnnnnnnnnnnnnnnnnnnnnnnnnnnnnnnnnnnnnnnnnnnnnnnnnnnnnnnnnnnnnnnnnnnnnnnnnnnnnnnnnnnnnnnnnnnnnnnnnnnnnnnnnnnnnnnnnnnnnnnnnnnnnnnnnnnnnnnnnnnnnnnnnnnnnnnnnnnnnnnnnnnnnnnnnnnnnnnnnnnnnnnnnnnnnnnnnnnnnnnnnnnnnnnnnnnnnnnnnnnnnnnnnnnnnnnnnnnnnnnnnnnnnnngaactatacacttccaaaaagtgaattttactgnnnnnnnnnnnnnnnnnnnnnnnnnnnnnnnnnnnnnnnnnnnnnnnnnnncatagaaataactgatgggtcttggtgaatggctggatatctgacagttgtggagaaggggtgaaatgtgagggtcatatagctctgaagttccttgccaagggaacaatcatgggacaggagaccatcaggagtcagggtatcagaaataaacagaggctctaagaagtactgagggtcaaggaccttggtttccagactgatttcaccaaatgagtgactccatgaaattatgcaagccacatcacctcccagagccttagtttacctacctctaaaatgaacaatggaagcatggtgatctttgaaggtctttttcctgcaaccaaaacattcctaaaggtcaatc

SEQ ID NO: 416777 - DNA, 1093 bp, Homo Sapiens
  misc_feature (274)..(367): n is a, c, g, or t
  misc_feature (684)..(696): n is a, c, g, or t
cgttatatgcaagtaatcaaattttccttcctgttaaagatgctcttattttgttctctaaattctttgattctttttggtataataaacatcagatatcaataggcaaatattacttagatgaactttgctgaataattgatttcctcaaagccccaatacaatcgcttatgaaaggactatatcttagaatgttgactttctccccaatcacttttggggattccttggagcacatctgtaatgtcagccttgctttttaagtgtttttaannnnnnnnnnnnnnnnnnnnnnnnnnnnnnnnnnnnnnnnnnnnnnnnnnnnnnnnnnnnnnnnnnnnnnnnnnnnnnnnnnnnnnnnnnnnnngtgcaaactactgtgcctggacgacatgaaaaaaccctggagtagatttttaaaggagagggaaggagaaatcctcccttaaaagtgtgtgaagaacattggcttgggaaaatgcactttactgaactttataaaatgggccccgatattctccattttatattcgcctattccctgaaatgttttactccctctcccctcggttatttttcccgacatcgctgctaatcagatccaactccttcccttttctaaaacttcccgccgatcccacgtcttttagtaatccttcccagatccctcccaaccgatggggnnnnnnnnnnnnntttttactgtctgaaaggccagcccctcctatatctttcccactgatttgttcttctgggaagaaaaacaaaaaggcacgttggccagtcgttctgccgaccccataaaaaacagcttttatctcctgcgtgaccttccaactccacctccttttctttcccttcaccaagactccttcctgcgtcctccccttactttctctggcctatacccacttacatgcccttcgattcaccccccgtctttcatggtaacaaatacctttccctaccctttccaccctcgcaaatgtatatgttccccctcttcctgtgcaagagatgccccatccctcccttatgactgctctctctcccgaattccatccccttcgtccctcgctttccgcttccttat

SEQ ID NO: 416778 - DNA, 615 bp, Homo Sapiens
  misc_feature (42)..(50): n is a, c, g, or t
taccttcaaaagatactaacattcagatcttacagggaagtnnnnnnnnnccgaaataacaaaatatattaacatgacaaccatataattatcacaccttaaaaattatattttctttaagttaaatatctaaaggggtgttaaatattcttgatcatgcctgtttttaaaaaatgtcacagtgtggactcccgaccccctacgcaagtttccctactatgccacctctgctgggctgttcctctttatggttcttcctgtttcaaatcccgggaagggttgtccccaattcggggtgcgtccccaactttctcctttttcctccatgtggggaagaaactttttatttttggtttaacaacaaaccccgggggaaactgtcgttccctcccggggaaaaagctccctccccacaaggccttgggattccctaactcggacccggccctccgccttgctaaggcggttccgtctcgaaaccatggattcctccttgggccctcctgccgattgcctcttttgccaaattcttacgtcccggaaccctcccccgaggaaacctttgtatgctaccaaccttcgaatggggggtcccatgccgtttttatctccggt

SEQ ID NO: 416779 - DNA, 605 bp, Homo Sapiens
  misc_feature (217)..(218): n is a, c, g, or t
  misc_feature (299)..(299): n is a, c, g, or t
  misc_feature (352)..(353): n is a, c, g, or t
actaaaatccaacaggattttcctcacggaatgcaactagaaaggccctgctttattacagggactgggaactggaagccagtgtgcccactgctctctgtggccaccggttctttacttctttctctgtggtttctcttcctttgctgctcagttcatgtagccaacagaagacacctgtctgcagctcctcagacagacagcctgctcctgccgnntcacttccgcaacctggggaggccggctctctgagcagcccagcttgggacagttgcctaccaagagtcctgttcactggnggaaagaatctcacccagccagtgcgttgggttccttcaaggaaccggtctcnncacgtgggcaaaggcaggtctcaccgtgtgcacaaggtgactttcaaggagcccgggtctcaccgttgggcaaaaggcaagtctcaagcgtggcacaggtggcctttccaggaggccggggcctcccgtggggcaaaaggcaattcctcaccccgtgggcccaggggggcctttcccaggaaccccggggccttggcaaaaaacattttttaaaaagaaatttgccgaaccctatattaggggtggggctcc

SEQ ID NO: 416780 - DNA, 593 bp, Homo Sapiens
ctgtctcacttaactttcaaaagaccatcagatgaaaacgtttcatcaaaagccacctacttaagtatgaacaatgaccaaagaatgacaaatcaaaattctgggcactatactaagagaaaactcttccagaacacatacttaagaattaattttctctctgaatttggccaagtttggtggtttcattcacaacatttaaggaaaaaaatgatggtttatggctagcagataataaaacaaacctttataccacttactaaatagaaacggtttaggctcacaaatatgttaaagctttctctttccccgcaatggtagccaagcagcataaacgaatcaacatttcctcagttcagacctcaactggttacaggcaagcaagggctcctcagaatttgctttactaacggtttaggtcagaaatttttttgaagatcaaatgtcttgctatgtctttgtgttctttttcccatctctattacgtttgttgccctgttggtctcctaacactttcattttctccttttatgttcctgccatgctctccaaatggcagtaacctgaagtataactgatcacccctcctggga

SEQ ID NO: 416781 - DNA, 913 bp, Homo Sapiens
ctgtcaatgatatagtgatctttaattaaaggaggacataaatctagaatttaaacaaaatcttctaaccagcatagtttcagttcatatttaaaaatctgtgcctttatgccacaatgatggcatcaagtttttactctttaagaaacatagtgataatgtctcaaacttgaccctgtttatttgatcatgagttagtacaccaaaaataatgatgggaaattagaaaaaatggaatcctgagaaacactacattgaattattgtgtgtgctattttacaacatggcagcttaaatagttttaaaaaactagtgatgtctttgaatatgaatctactactatgtcccaaggtaacatctcaaaggttattttgtttagttttaagaaaatgacttctatattcttccccactcctcctattcacatcactggagatacaaatactgcttatccagccatgataatctataaaacatttattttttatcttccaattcatccagtttttctgaagcttattgattggggtgtaaagctggtgactaatatcaaagatatactgtaaaccattttgattacaaatagttaacatccaggatagtatatatgattgttacttaaaattaaaattatcttagcaaggatgaaaatcccttagtaaaaaataaatatgtattagttcagctaaccctattcaattagatcattaattaattttccagttgatttttgaatttaaatgttgggaaacataaaaatattgggagttggaagggatctccttttttcatcatcccagccctgggcattttgttttttcctggaagaagaatactggtattattggggggttaccaagccggaaaaacaattccatttatggacctgggggggttctcctaagaaattccc

SEQ ID NO: 416782 - DNA, 498 bp, Homo Sapiens
  misc_feature (19)..(19): n is a, c, g, or t
ccggctgggtaccggtccnggaattcctcgggatccactaaatggcattgacgaattacactttctaatcgccagcattggcaatgataaatctcttgactcctggctttgcaaagagattggatttggtgaagttgttgccattccaaccatattcttagagatgtaagcaatctaattcattgaaatgatcgtttcccttgatttagagtgctgacgaaaccaaactcaccattatgattgcaaagagtagattaagttatggcccctgagtgtaccagaccccagttagcaggacagatctcatctatttgttggaaaaagaaataaatgaatgcctcttctattaattccttgttaatattagagaaatatttttaactctttcaatgaagctaataatgtaaggccaaattcacttggccttcctttgccattcttgaagtacctttattgaaggttttttgctttattctatgtcctagcacatgaaaaagg

SEQ ID NO: 416783 - DNA, 742 bp, Homo Sapiens
  misc_feature (410)..(410): n is a, c, g, or t
  misc_feature (438)..(438): n is a, c, g, or t
  misc_feature (489)..(489): n is a, c, g, or t
  misc_feature (508)..(508): n is a, c, g, or t
  misc_feature (658)..(658): n is a, c, g, or t
ggctgtaatggtcatgggatgacacagaagtgataactatgtactatattataatggtccaaaggaatgaatgtctaatggtgaaatgtaatctgtatctcccaaggccttagctctagcagctctgcccccttggcttgagttgccttggtaaccacagctggctctgagaaaccatgggaatgaagaatgggtcctattgatgaatcctgacccagaagggggcatgcagaaggcccttctaggcagggcagctgggcatggcctagtgctgccatctgtggtcttttgcctgcagagaacacaaaccagagagccagagcatggtgtgtgtgtatgttgggatcagggtaggggacacaaagggcagtgccagcagctggaatttaggccttgtttagggccagccnaggtaggctgcccaaaggactccagtgngcttttcaagctcagacgtgtctcttacactaagatgtgtttcagccaccntttgcccagtgcctgccangctcttgcatggatccattgactcttagctttgaatgaaatctaaatagctgtccattctaatccaaaatccagtgtctgaatcactctctagcacctaaagtatttgaaatactccaagtgacagggaaactcactgcccttcaggggntggccctggttcttcccttagaaaatgtccccctgttttgaagcctgaagtctggtttcctggccttcccctaaactttcaaac

SEQ ID NO: 416784 - DNA, 127 bp, Homo Sapiens
tccgtaaccgtttcaattttttttaagtggggaagggatttaaacatgctaattttaattctgaatgtaaaagagtgtacaaaaaaatctgcccctcataaaagtttttaagggattattttcagaa

SEQ ID NO: 416785 - DNA, 835 bp, Homo Sapiens
  misc_feature (736)..(736): n is a, c, g, or t
  misc_feature (755)..(755): n is a, c, g, or t
  misc_feature (795)..(795): n is a, c, g, or t
tcccggcacattgtgtggggggaataaagaaatgtctaaaacagcaacttgattatgcccaaggtatgtatttttacacatgcccagatatagtgcatgcacaaatatgctattcataaactcagcccagtggtttgaaggagaccgtatgccttggtgtaacgtggcacatgtgcagttaataaacacactgcgtcagggtgtatgtgcttcgtttggaactgatggtaaagactagaccccaaggcaaatccccggtactcatactattttctaataataggggataatctaggggataatttttctttcatgggaactagtaatcaatgagagcaatgtttcccaaatcccaggtattcaaaaaccaccttcataattgtgaccatacttataccatttacacaaccacttcataattttctttacatcaactcgctctttcgtaacttgaacacattttaaaagggaacattatctcactgcaataaaatggaaaaccagcaacacttgccataaatagaagatagccataaaaataaataatgtaacttctaggataaaaagccatgtatctggatccacttgaaatcattttgttatcgccattcactcacattttaagaaacatggaactaagggacttaaataacatgggctccggccctaccctctcccagtggttaccatttctgtcaatctcatgtgacttccagccagtatccccttgccctgngtggatctcaagggcttanggtggggggctccttggccccttgggaaaattcagaagcnaggctgcgtcattttccttccgtggttcttttaaaccctc

SEQ ID NO: 416786 - DNA, 570 bp, Homo Sapiens
  misc_feature (222)..(326): n is a, c, g, or t
  misc_feature (329)..(459): n is a, c, g, or t
  misc_feature (484)..(484): n is a, c, g, or t
ggaaagagaaagagcaacaaataaattaggggaaacttaaaggtaatatacgcatggaattcaagagagatttttttccaggaaatgatttttaaaaacccaaaaaaggttggggcacaatgggctccacgccctgtaattctagcccttttgggaaaggcttaaggggggtgggatcaccggggaacctcagggaatttccaaaacccagcccttggggcnnnnnnnnnnnnnnnnnnnnnnnnnnnnnnnnnnnnnnnnnnnnnnnnnnnnnnnnnnnnnnnnnnnnnnnnnnnnnnnnnnnnnnnnnnnnnnnnnnnnnnnnntannnnnnnnnnnnnnnnnnnnnnnnnnnnnnnnnnnnnnnnnnnnnnnnnnnnnnnnnnnnnnnnnnnnnnnnnnnnnnnnnnnnnnnnnnnnnnnnnnnnnnnnnnnnnnnnnnnnnnnnnnnnnnnnnnnaataatatattttcccacccaccanttgggggggtgcataattgggggggtttatataaaaacccccccttgttttcttttaaatggagtgcccaccaaaaaccatggaaa

SEQ ID NO: 416787 - DNA, 501 bp, Homo Sapiens
tggcttaaatgggatttagagaagattttaatatacggtaaagcttggattcattgatgggtgtgtagaggagaggaaaaggaaatagaatttactaaaggtgcctgtctccatcaccagtagtaggaataggaagttttgaggctgacaacataccatcatcacaatttactgaattatctatatatttatgagaaagcctaataactccttcttctctcattttattgacaaatcgcttaacagttcttgaaccaatgacttgcactattggcaacatttttctttattgaaaatgtattatggtttataggggattctcacttttgaaaataatctggttggtaagccaccatttaaaattgtaaagattgaaaagaatgggaaaaaattcacctccctgggggggctggggtccccaaaactggttcaaaaaccccattttttcccccccaccctggcagtaaaacccctttttttcggggaccccaaaatttttat

SEQ ID NO: 416788 - DNA, 797 bp, Homo Sapiens
ttttttgttcgtggagatccccgctttccgccaaaccccatccttccgatctccccaggctaaaactccggggccggtccccttgtcctttctctttgtcttgtttattatagctgcctttcttcccggctcttccaatttgcttgtcatttgcatacctttcacttctccttttttaaccccagcagaggaccgggaactgggaggaggagagagggaggtgggggggcgctctgttactttcgtctcaaaacgctgtcgaagccgaattgtggaaatccggcttggaggggagcggtgatgggtcccgggaaacgcgcgcggcgcccctcttccgagctcctggacccagggctgggtcaagttgagtagggtaaggcggcaccgggaggctcggggggtcgcgtggcggtgggattgggacaccagcacgaggaggaccggaggatcgcgggccgggtaagagtagggggttcttgggcagcagaaatgggaggcgatgaatctcccagccatcgctggcagactatggtgttgggcagcttcggtctggtctcgtctgggtggtacctaccgttttgccccagttaggaagactgggggagggagacaggaaaaggtgagagtaattgttactgggaagactaatgaagaagggccggaaaaaaggaagggaaaaaactggctatcttggcctgaaccaaaacagggaggggggaaccccattgggccggggggaaaaacttccccccaaaagcccaagttttaagcaaggtggttgaattcctttcgggggg

SEQ ID NO: 416789 - DNA, 623 bp, Homo Sapiens
aaaggcttttcacaaagctcatcttagaacaaacctgcatttttagggattctgtgcctctttgagcctctagggagcgagtagaggtgatttgcagggagaacttgggcatttccacacctctgaccttacaaccctcaagagcaccaacatcccgtcctgatgctgtgtgatccccgctgctccaatagtactgtgggtgttggcacaacagacagagcctgagctggaaagagattctcacaaccaaagctagggctgcaggcgaaggacatcgccagttagcagcactatggagagaaactctgctctgaagaaaagtccgtatatcactatccagaggcagtggatcatgaacaaatactcctgtgagccaagtgcacgggtttggtttgcctcctctgtactaaaaggggtcagggtagggtaagcgcttagtatggctccacctgtggagccctctgtgaggcagcctcacctcctcatttgcataatggagctgaggggaatttcctgcctcccctaggggttgctgagaagaacaaataaaacgatggatgtgcaaatcctctataaattgcaaagtgccatgtaaatgaaaaaaatatttaccctatattcct

SEQ ID NO: 416790 - DNA, 865 bp, Homo Sapiens
gctggtaccgggtccgggaattcccggggatgtaaatacagaaagggaacaaatgatacaataacgttttaaaagaggtggaagggatggagtctaaagccagagccaaggataaggaggtggtcatttgccccagaggaataagagttgggggctcaggtagaatactgataaaggtttgctaagaggaatgtgagagaaactgtctggttattcttaagtatgggcaatgttaggagaaaaggtgcgtttgacagtaacagcattagtagaggcaacagtttgcacggtcattcaattttctccacagtgctcagcagcccaagagaggactgaagaaaacgaccaattttactctgttatctgtgattccttatcatttggtttacaacatatttgcagcttttacggaattttaccttccactgtaattacacacagctctggctaccactccagtcctccccagtgcctagctcaacattggaagtcaataaattctggttaaaagagtggatacagtcacataatattttaaaatattacaacacaaaagaaaatcctgtgcttctccaccacctcacatgtaaatcaatgacatcataaagactaagcttaacacttcagtcaattgaggtttacaataatgtagcagattcggatacaccctttaattagtctgttttaacaaaacaaatcattaaaagtaatgttgccttgtttctacgacagtcttaaatacagcacttccaccccaatacctatttcaaatgaaaattcagctgaacagttagctaattgcttttttactcacaaacccctaaatatttgcattcccactaaaaaagcaaaagttattttactt

SEQ ID NO: 416791 - DNA, 802 bp, Homo Sapiens
  misc_feature (597)..(754): n is a, c, g, or t
tcatggcggccattggtgctggactcctgcagcagggctggctgttttactgtgggatggatgaagggtgtgtaaaaaaagagcaggtttgtcaggagctgagggtcggctccttggtggggaccacaccacctcccttctgggggcacctgaggacagtgtctggtgggagcttatggagaggaggcaggaagacctcacagaatggagtctgagtgaaaggactgagttagggtatggagcatggctgcacgcgtgattctgcagccctttccccacctattcctcctccagtcttacccttttcaattaatgccaactccacttttcccaacactcagaccaaaatcctcaaagtcttctctgattcttattctcaccctacatttcatctgtcagctagtactctcaactccaacttcagaatatatccagagtcatcctccacactgccccagcctgctccaaattgatagggaaacaggagcataggagagccaggatgacaccattttgaaatcaactccatcttaaagccagcaaggcacactcctttgccagtgacgacccatgatcataagatgtttacagctaaannnnnnnnnnnnnnnnnnnnnnnnnnnnnnnnnnnnnnnnnnnnnnnnnnnnnnnnnnnnnnnnnnnnnnnnnnnnnnnnnnnnnnnnnnnnnnnnnnnnnnnnnnnnnnnnnnnnnnnnnnnnnnnnnnnnnnnnnnnnnnnnnnnnnnnnnnnnnngcaaagtggcctgtaaatccccacgctggctcaaggaggcctgaggcc

SEQ ID NO: 416792 - DNA, 886 bp, Homo Sapiens
  misc_feature (666)..(666): n is a, c, g, or t
  misc_feature (820)..(820): n is a, c, g, or t
  misc_feature (840)..(840): n is a, c, g, or t
tggatcccccaacataaggtgtagacacagccaatagaccataaaagtaggcttcagaccagagcatgttggcaaacatctggtccagtgattctcaacctggggtttgtgcaatttgggggaggggaggcctactgatatattcccagaggccacaagttctctgagaattgagcttttttatggtcttattttgatgctaaacacaatttttgttacacttatgaaaacagctatgattcacaattgcaagctattttcatagcctggattcagttctgagggagcttctcaagttggggaacatgcagacctgtggtggggagttagaggtgttcattgataccttctcagagggtggttctgctgaaatttttttccttaaaagggaaagtctgtgtattccatcccaacattcagaaggactaatgtatccccgccccttcatgttccactcatggacacggaggcccagagaaggccagatacttgctcaaggtcttccagcaagccagagcagagctgagactggaaggctgggctccttcagcctggcccagggctcttgttggcacactctgcaggggcaaggctcaggccaggccaggagcagtaggggtgtcaaaggggtgggtctcagatgttttccattacaaatttgtcagntctctttctattccttggggaccgcattggacctcatttgggatctttttaaagaaatccaaggttcccagtgggggtaagctcacaccctattaatccccagccactttggcaaggccttgaaagtgggaaaggaattgcctttgaaaaccgngaagattttaagcaccgagnccttatggtttccccacaaaccatgagccaagaacccgggttcccg

SEQ ID NO: 416793 - DNA, 377 bp, Homo Sapiens
  misc_feature (120)..(203): n is a, c, g, or t
cactaaagtgtccccatacctgtggtggagtagtagcagagcatagtaaatgccaagtgcaaataaagtattattgacgctgaaaggaacataatatcacttccggtagcagtgattagnnnnnnnnnnnnnnnnnnnnnnnnnnnnnnnnnnnnnnnnnnnnnnnnnnnnnnnnnnnnnnnnnnnnnnnnnnnnnnnnnnnngagttaaaatgagatcctacttttcatctatcaaaatgtcaacttttttaacagataaagatagtaatgtgttgatgagagcatagaggatagaggaatagacatcctcattcatggctggtggagtttaaattgttatgacttctcagaaagaaaatttgatatccaaaactt

SEQ ID NO: 416794 - DNA, 1344 bp, Homo Sapiens
  misc_feature (382)..(579): n is a, c, g, or t
  misc_feature (699)..(711): n is a, c, g, or t
  misc_feature (1143)..(1143): n is a, c, g, or t
gcgggggcggcgggcgggcaaggggggtaggttttggaaggcgggtggtgccggtgcggaattcccgggatctgactgactccgtgttgcttctcacctcacaggctaaactgtttttttgctgattctagagcagaggccaagataattacaagaggaattcagtttacagataaactttgaggcaggaaaactgacctccaccttcttttgtggagattgaagctgcattcacaagaacaggtaagaattatggtagggtcctgaactttgctaaagaataagcatagacaataacgtgccactgcttagcttgtttttctgtaagttttttactgccccacagtcactaactgggggttgcatgatttataacttcccnnnnnnnnnnnnnnnnnnnnnnnnnnnnnnnnnnnnnnnnnnnnnnnnnnnnnnnnnnnnnnnnnnnnnnnnnnnnnnnnnnnnnnnnnnnnnnnnnnnnnnnnnnnnnnnnnnnnnnnnnnnnnnnnnnnnnnnnnnnnnnnnnnnnnnnnnnnnnnnnnnnnnnnnnnnnnnnnnnnnnnnnnnnnnnnnnnnnnnacatttgaacactgggagggagaggttggcgtggagctgaaaaccgggccactggtctttagggctgggggaacagggaggcgaaaaccctcgttcctcaagttagagagaggaagagannnnnnnnnnnnnctcttaagaggtaattccgtatctgagggggggaccccaaaggcctctgtaacccggttgtacccccagagagggctagtcgtagggtgggcgagaaggagggggagggacgcacgcgggaacgggctcggggaagaagcgcgcatataaggattgaagttagaggaacctagtagaagtcgccaacctgaggggcgacccgcgcgcgagcattgttttgttcaccaaaccgtgctctgtgcttgtgacgccctgtcgtggggtaaaatagttgtgggtgttcagcgccctgaacaagggagggaaatcttgtgtataagcgtgaaaaagaaggagagcaaacctagagcaagtatgtagtcccgagccgcgggaggcggatggcgaaaacgagaagactattgtccgagacattatattctgctatagccnccatgaaccagggagagggaaaatacttaagaagaaagatctctaatctggtggagtgattaggactatacgtggctaaatgaaatatatttgtaaaaactgacgggcaatacagaaatgggcgcgtagtgaagacgaaaactgagcgagaatggggggatcgttggaggtggggatggcgggtggcgatgaatggagcgg

SEQ ID NO: 416795 - DNA, 130 bp, Homo Sapiens
tgaaccaccgcgcctgtcccattgttgtgtaattttaataattagttttttaagtacttgattttatgggcacatttttgtgggatgattggagtttatcaaataaaactttgcatgggtgtagtttggg

SEQ ID NO: 416796 - DNA, 644 bp, Homo Sapiens
  misc_feature (189)..(311): n is a, c, g, or t
tgaatattaagtagactgaatttacatgtgcctgaagaaattggaattacattttttctttaatagataaggtcttgctctgtcacccaggcttgagtgcaatggcacaatcataactcactgtagccaggaactcctgggcacaagcgatcctcccacataactgggactactggcacatgccaccannnnnnnnnnnnnnnnnnnnnnnnnnnnnnnnnnnnnnnnnnnnnnnnnnnnnnnnnnnnnnnnnnnnnnnnnnnnnnnnnnnnnnnnnnnnnnnnnnnnnnnnnnnnnnnnnnnnnnnnnnntcatgagccatcatgatggccttgatttacatttttaacaatatgcagattttctttgggctgccttttcccccagtttttaaaatgagtgtgtaccttcatgtatgtgtattcacatgcagaaaactttggacatattttttctgcaattgaaataactttcaagtttctgaaaaaaatttctttttcatgaatgctaagttgtttgaggggaaaaaatctgaccttttcaaacctgaactggcagaaaagaaggtttcccaaagaaatgaagggtccctcctgggagatatttcaaaccccttactcccccgggaattttccttttgtttt

SEQ ID NO: 416797 - DNA, 502 bp, Homo Sapiens
  misc_feature (108)..(358): n is a, c, g, or t
  misc_feature (432)..(433): n is a, c, g, or t
  misc_feature (435)..(435): n is a, c, g, or t
tagctttcaagatttcgttattcaccaaaagtttgaagatcagcttagcatcttttgctgagcatcaaagaaactaaaatgaataatcactatatggagtatggattnnnnnnnnnnnnnnnnnnnnnnnnnnnnnnnnnnnnnnnnnnnnnnnnnnnnnnnnnnnnnnnnnnnnnnnnnnnnnnnnnnnnnnnnnnnnnnnnnnnnnnnnnnnnnnnnnnnnnnnnnnnnnnnnnnnnnnnnnnnnnnnnnnnnnnnnnnnnnnnnnnnnnnnnnnnnnnnnnnnnnnnnnnnnnnnnnnnnnnnnnnnnnnnnnnnnnnnnnnnnnnnnnnnnnnnnnnnnnnnnnnnnnnnnnnnaacttgaaaatcgggcccactggcacttcccaccctggggtggacagaaatgagaaattccccaattcttcccnnanggacaaaaaccgccaggggcttcccgtaaaaaagggtttcaaaaaaccccaattcccccctttctat

SEQ ID NO: 416798 - DNA, 882 bp, Homo Sapiens
  misc_feature (753)..(830): n is a, c, g, or t
gctggaccggtccggaattcttccgatcaagacttcagattcatctgaatccacttcaggtttcttgtttttatggacttcaagcagctgctatccacagaccaaaacacacaattcttatgctggataccctcaagtttttggcttttaagcaagtaataactccagtctgtgctccattttaatcaaaatgatataattatgagtctgaaataagaaaacttgaaactcagggaaacatttaaagcagacatttaacttcttcaaaaacaacagaaacgaaggtaaatctatttatcaaggttataaaacttttgagttatctgatcatggtgtatttcttcctgagaaaaattgcatttacatgcacatacccaaaactttgtcttagcttcatggccttatccgtctctttgtaattcaatcctttcaaatatttaccagacataagaaaatgttgtaagtcacatataaattggaggtaaatttctggagttgcatgaatgtaatagctagtgaaacctaacagataaagcagacataattgaagaccacccaaaaagcaaaattcagttaccgatcacttcacaagagactgcttaaggagatcctcatgactgcctgccttgcccaaaatgttcttgaatcttatcaatgtgccatcactatgatattttttaatatgatcactttttaaatatttaccccatcacatgacccttcagtttttaaatctcaaaaacggttataagnnnnnnnnnnnnnnnnnnnnnnnnnnnnnnnnnnnnnnnnnnnnnnnnnnnnnnnnnnnnnnnnnnnnnnnnnnnnnnaagatcgaggaccatccctggcctaacaccgtggaaacccccggtctcctac

SEQ ID NO: 416799 - DNA, 325 bp, Homo Sapiens
aggctggaccggtccggaattcctgcgattgcagaaagatgccagccaatttcatctcccattagccccgtttcaccagagctgctgagcattgcccattgatgttaggcaaaagaccattacaagaggaactggatactcccaagaaacagacagtatgtctgcactcgcgaagccctgggggtggtgacccacaatgacaccataggcagagggacctcaagggaggcccctcatctacctcagcctacaaagcttgactcaggattatctgaattatattaaaatgtcacttgggttttctgctgacttaaatatatcttac

SEQ ID NO: 416800 - DNA, 516 bp, Homo Sapiens
gctggaccggtccggaattctttcgatctctggtaccccatccccagtccctgaaaaccacgaatctgcttcttctctatggatttgcctgtcttgaacatttcgtgtaaatggaattatacaatatgtgagcttctgtgtctggctttctcccttagcctaatgtttttgaggttcatgcgcattgtagcatgtataagcactttgcctttgatggctaagaagtatggtatgtatatatcacattgtatctgtatatccatttatgggcatttgggctgtttctaccttttggctgttgcaaatagtaatgctgtgaatgtttttgcaagtatttgagcatttgtattcaattcttttgggtatatacctaaaagtaggattcctgggttagatggtgtttctatgtttaacattttaaagaaccaccatactgttttccgcagtggctgacgttttacattcccatcagcaatatgcaaagttccactttccccacattcttctgaacactta

SEQ ID NO: 416801 - DNA, 290 bp, Homo Sapiens
cggtccggaattcctgcggattgcaatcaaggcacagaaaatgtctctggagaacgaagcgatggcagttacagcggcccagaagaaagcattaaacatctggcataaaattgaagactccaacctgcacactctacagtaaatggccaggaacaacgtccctcttgtgtggaagccaatgagaaataagagctacatacacaacagataaggatgcccacactaggcagcctagaagacagccacaaatcagacaagaaaaaaaggagcagttcaagagacaaaaatac

SEQ ID NO: 416802 - DNA, 288 bp, Homo Sapiens
  misc_feature (162)..(226): n is a, c, g, or t
ctggaccggtccggaattcttgcgataaagatcacatgaccaaactggcttgtttaaaaaaatcacttacagattaattaattaaggtattaatgtagtatctttgggggataaagtgaaaaaaagtggcccttggtggtctagcttaggcttgaacatagnnnnnnnnnnnnnnnnnnnnnnnnnnnnnnnnnnnnnnnnnnnnnnnnnnnnnnnnnnnnnnnnntaaatggatggaaatgaaatcagcgattctggaacttacctaatgacaagcatctcctggag

SEQ ID NO: 416803 - DNA, 176 bp, Homo Sapiens
gctggaccggtccggaattcctgcgatgtgtgctttaaaagccataaatttcattctaagtactgctgtagctgtattctacaagttttaatatgttgcatttttattagcattcagttgaaattaatgaggatgttttctttgactctctgggtaatttagaagtgaattgctta

SEQ ID NO: 416804 - DNA, 926 bp, Homo Sapiens
  misc_feature (651)..(651): n is a, c, g, or t
  misc_feature (697)..(697): n is a, c, g, or t
caccaacacaaaaacacaatcccaaacccgaatcaaacaaacataaccacaataatctcccccccaacacaccgaaacccagggggcggccggctcctaaagtatcccccagagcggccccaagcttaccccctacccacagcttctcttgacaaaaaggggcccccttatccgggaagtcccgcattataaagctaaggcccctgccgcgtccctttacacccccctcccgacctgccgaacattggttaacctcgggactctcttggcgaagggaacccttcttttttggcggggggggccactactttgggcagaaccctcccttaacggaatattttaaacctcccaaacgggcaaatccaaaaccttctttaaagccgaataacggggcgcaaacccaaaccccccatacggctttccttgccttgaaaaccttttcatttccttggcataaccgatctttccgcccagtatcttttgactcctggcgccgcccaagcgaatcccaaacatggcgctgcgggaagtctctaaaaatctcccccgagctccgaaggggccccttattttcgagccgccctccgcataggttcctccccacaacccccgcgcgccccctaggcgcccgaaacattttcccccgccgcncctccccttttttgtgaataaacagagcccccacccacccgttttntcgcgaaaccgaagctctttctcgcggcgatcttatatacctccccggtgaagaccgccgcgctagccccatatatacacagagcgcgtgttctcacccctccgcgacgcgctagatatccccacgccccctatattcagaaatatatgccggcgaaaccctattaccgccccgccgactatttcctcccacatgtatatcccgccccctccccccttaaccaattctc

SEQ ID NO: 416805 - DNA, 986 bp, Homo Sapiens
ttcggataagccttagctcactctcccttgccggtatgcccattgaatacttacaggtccaagagaatgtgctgcatggcaaaaatataaagggggccttctttcaaataaggcatagaaggcatttcaaagacgtggactgtgcatgaaccctcatctcttgtacaagaataaagcagacgtacttctgggaactcaactatagtgagcaggcacaagaggtgagaggactgggccctaacttgtacaagaatcaaacaggctgaccacaaaaagagcgccagtgcatatccaggcaatgaacttactacagtttaagtcccacaaatcttagctacctctgccctgctttaaaatatcaacctcctggtgtgccagtaagtctcaccatttgaattaagacatcaaagtccctattaaaggcaaatattttaagggaaacaccctaagccaatcaactaccaataactaagtgcaggttaatttactgtagcaggagatggaaaacaaagctcccgcgtatgataccggctaagtaactgttgaaagaaaaaaaactgaacaagcaaagcaaaagcatgaatcattggcctgagatccccccgaaaggaaacttcccaagccccttaacgcttggaatggggaccacccaacaacaaaagggcccctttcccggacagaggaaacccccggatatgcagaaccccgaaaaaaatccacgtcccaattggaacctcactaaattttttttcccagccaacttccccctcacgtctcgccccgttgcgtaaaaatctggctcggaaaaactcggttactatagcctcagccaaaaatttatttatagatcgcggcggcggggtaaaaaatcccttctccaaataaatcccctccccttatatctcgccacaaaaagggtgaccaccaattcccaaactcccacctcaaaacgctcctttataaatacgccaccaccccatcattca

SEQ ID NO: 416806 - DNA, 833 bp, Homo Sapiens
  misc_feature (542)..(557): n is a, c, g, or t
tgcgatcaaagagttcccagagggttttgaccgcacaggcaagtttgggcacccctgaaaaatcactgtcactgattctaccaagagtgaccttaggcttgcagaacactagtttgcaaaataacaatcagtcccttggctgtgaaattcacaagactgctgattaattcatttgaatatgattaaactgcttccctctaccctgggtttgtgaatggtgaggaactgaaacgtttgctgcaccatccattattaatgctcttcccttccaaagcctgtccctttgacctctgtttattccggcttgtctcctatatgagtttatagttacttattattatgtgcaattacatcatgctgagtgtgaggacaccccacaagctgttagctatattaacttaataatagatttcacggtgtgatttccaattaatttcattttccatatgcacatgcagctccatggaaagccaaaattatatagtagccatatggtgcctcataccaaacaattaaaactaattttctattctttgacaccnnnnnnnnnnnnnnnntacggtttacatgccccagaacaaaattgaaactttgaacaccctccgctagctctctacaaagaaaatgcccccacttttccccaatttgggggcatgggatattcccaagtttcttttgcttgggacctgggtgggacctatgggcccccaccctgcggctttgaacccccttttccactttcctcccctggtttcttaaccccttgccccgcccttgggtccctcgaaaccatcttcgtgcaaaacaagtgcctggggccttttccccgcttc

SEQ ID NO: 416807 - DNA, 1013 bp, Homo Sapiens
catctcattatttgccaagctgggctcatctgagtcatcctttgatctcttggctcctttccggtttggcggggaaaatgatacggccctggtttttctcagagcaagcgtgttttggaatcgcacatccttcgagggcagataatagtcaagtgcctgtgggtgatgagtgactttccctatggtgagaaaccctacacaaagggcatctgagtgaggaccctgctggggactcaggtgagaaatcctacacgaaggacatccgagtgaggaccctgctcaggactcagatgagaaaccctacaaaaagggcatccgagtgaggaccctgctccaggactcagatgagaaaccctacacaaaggaacatccaagtgagggaccctgctgagggactcaaggtgaataaaaccctacacaaagggacattccgaagtggaggaacccttgccttcagggacttccggatgaaaaaaacccccttacccaaaagggaccatcttcgaactggaaaggaactcttgccttcctgggaacctcccgaactgaagtaaaaaccccctaaaaaacaaaggggggcaattccccaaaaattccgcgcgacccccctgggctttggcccgggaaccccccagggggtgggggcaaaaacactccctacttccacgcacaaggggggaacccctgccccctcaactttgttttatggcattccccccgcgcgccataaaaaaggaaattccccccacaggagtccgccataaacaacccgctgttttctccctaaaacccacggggggggttccccatcgctctggggggtcgggaaaagggcgagaacccccccttccgcgctcccttaccccgcgcccacccttcgcccgggcgctgttaatcgccacaaacccccgctctctaggcaccggcgccgcaatatgcccccgcccctcccatcttcgttccccccctattttacgcggatgccggccgtaaaccacgggctcgctatggcc

SEQ ID NO: 416808 - DNA, 901 bp, Homo Sapiens
  misc_feature (416)..(664): n is a, c, g, or t
gcggatccagaatcaaagagttttaaggaggagagtgacatacttacacttgcccttgaatgagatccctctagatgctgtttgaacaatagactaaatgtaaccaagagtggatttagcaagatgagccaaccatctatgagcacaatccatggaggggataatggtcacttaaattatatggggtggggggttcatctttatcatcaggcacactggaaattggaccaggtttgtagagggcagatcagtaattcagtttagatatattggtattgagattcctaagggaaatctacatgggaatgtcaggtcaataataggaatctgaaacttaagaaatggtctaagtggtaagtatagctgtggatgaggatatgatggtcctagagattagatacagagtgtgaacagannnnnnnnnnnnnnnnnnnnnnnnnnnnnnnnnnnnnnnnnnnnnnnnnnnnnnnnnnnnnnnnnnnnnnnnnnnnnnnnnnnnnnnnnnnnnnnnnnnnnnnnnnnnnnnnnnnnnnnnnnnnnnnnnnnnnnnnnnnnnnnnnnnnnnnnnnnnnnnnnnnnnnnnnnnnnnnnnnnnnnnnnnnnnnnnnnnnnnnnnnnnnnnnnnnnnnnnnnnnnnnnnnnnnnnnnnnnnnnnnnnnnnnnnagcccccacacacaaaaaaagagtgggaaaagggagttaattcttgaccacccaatagggaaaagatctggctaaggaaattcccctccggtatctgaacatgcaatgttcaattcctaatggaaataaattaaaaaggtcagggaatttttccaatatggaataattaaaccctggtaattgggaaaactagttccctaattaggggccgggggcacaatgggggtccccaccctg

SEQ ID NO: 416809 - DNA, 891 bp, Homo Sapiens
ccggactcacattttattgcccactgtagcttgtaatctgcttttgtaatgttttgctgcctacttacacctttcctgcaggaagtgggaatctaaaagggaaaaataacaagggcccagttgctttccatctcgctagacttagaaaaacttctgtatctagttaaaatccttttagtcatggggacaatgatgagcatcctagaagactctccagtaggatgtcttttaggttactggagcacattccaattcagcttacagaaaaagaaaccatattttgtattgcaacactgtttgggttcaatacaaattagaaaactaacagatttggtttaaacatgattctatacattataatgatgttttacaattgaacttattctgtaaaaaagaagaaaaatgggaagatgttccttattataggcttttatggccctttactggctcatgttacatgcaggcatcagaaagccatgcataagggatccattcctagctgctcccactagaaaacctacaccctccctgaaacctcctcagtccccaaactttgaggggtttcttgtcagttttctaatgaaggattccaccccaaaatcatcagacacccctccccacttatcctcctagccccagcttatactccctgcccccgacccctactgcccaagaaagtaagcacaactggtaccaccaggagtggggcccccatagcaagcccctaaaggcaaacctgtggtctgtttgctggaagtagcctggtcaaaatgccaggaatactttaatgtaaggggtggccatttttcggggcctaattttgcgtttacccaaaggaaaaaattggggccacgttttccgaaagatcctagaaaaaagtttataagaggg

SEQ ID NO: 416810 - DNA, 680 bp, Homo Sapiens
ggtgcttttggatttcaagattctctggattttttaaatgtacaaacatagccaagtatccaggtaaatgtagaggagaaaggctaaacaagctggaaacatgctggatgaatcacttgattagtgtctaaattgcccaaatgcccctttactttgctttaggggagaatctgcttgttttcaccaaaactatttgaaacaaaataggccataaaacagatggactccctccaggcattttattaaggtagcagctcaagatatgagaggtaggctcacagttcactctccaacagggcagtgaggaaaggcattttccaaaattaagctcttatgaattaaatattcagaacaggttcgctgaggaaggaaaaatggcacgcttgccctggtattttaaggaatcataaaggtttccccccctgttctaaaatggcttctttagctgtatagaataaaattaaaaaccgactggggccctcacatttaaaaataaatttggccatggcaaattatttcccggctttaactacacctttggccaacccaggggtgggaaaaaggggaatttgggttccagcaagccccaaacacactggatcctaattggggaactgggcttgggacccctttacccttagggttagggaggcctaacccctagggattccccgaaaggg

SEQ ID NO: 416811 - DNA, 933 bp, Homo Sapiens
  misc_feature (843)..(893): n is a, c, g, or t
gctggtacacaggtccggaattccctccgatactctgttgagaatagtcacaagatctaaatagttaaaaaatagtagttcttcaaataatgccttcaaggcaatgatataaaaatttaggaatagaggcctcattcaactctgactgactctaactagtggattaaagaatgttacgcacttaacagcccttttcaaattctattttatccttctctgaaaaccatagtatcaattggacatggccccctaatggaaacacctattgccttgtcatctgaaaatcctgcctctgtcttaggaattctgaatttttataggtgaataaagcaaaattacagattaaaggaattacagtatttcagaatttgaaggattcttgaagactatttaacccaaacatctcattttcctaaattttgaaaataagaggataagtaactccctacaggccccagggctcaacaatggccggaggcttacatcgctgtggtctttgaccctttcgtgttttcttgtgcttttccctcaattccttgggtgtctactttgttctggcgatttcaattttacttttccaatatgacaaaccagtcttttaatttttccagataacttgtctgtgaagaattaccttcactttaccagttaccacaaaaaacctcacatggggttgaaatgtatcccttccctttagaatatatatacattacgtgtatattaaaccatatacttaaacatatatgggttatacatatatgggataattaccgtccctaatttaccctttaaaggggatatatgtttaccatattacctacccaattatggtaccttcgcttnnnnnnnnnnnnnnnnnnnnnnnnnnnnnnnnnnnnnnnnnnnnnnnnnnngtgaagggaacacaacgtaccaggggaagggggaatggga

SEQ ID NO: 416812 - DNA, 976 bp, Homo Sapiens
  misc_feature (718)..(729): n is a, c, g, or t
tggaccggtccggattcctgcgatcggggatggaggaaggggaggcggcgagcggtgggaaccgagggcggcgcgtgcgagaacccggggcgaccacggcgggacggcattggggggccggaggcgggcatcgggaagcggggactgtggccgctttcggcctgggaatgaagcgacgtagcctgctggggctgtgagagcctgtgtcctggccgggacggggagaaagaggactcctgggatggaaggtgcacacccaggcagctggaagcgctcagtcacagcccggggactcgtcccctctgcgatacggattcggagctgcttctgaagcagaatggtgtcagaggacccagagctggcattaggatacaggtgcacacattccagacagacctgggggtggcatccaggagaaggcttataagttccctggatggggcctctgtgccatgcaacaagggacacaagaacagggcttggggtccaggctggcggtggcatgcctgccacctgcagaccctggtcagtgcaggatggtgcctcccacaccggctaggctgccaaggctgaggacacagggcccagcgagcctgcccagccaccgtgctgcaggggcttccagagacctggggctgcgggggccaggtctcttaggcagggcccccctggtgccttgcggggactggattctgggcccaggggccccgcaaaaccnnnnnnnnnnnnaacacatgcccccgcggaaaggtggggtaaatcccccgcccccgggccagcggaccacagggcgaaattttggaggggtcccctgcgaggggcgcaagcgcgcgagagaagaggggcggccgcccgagagaattgggacccccccgcgggggggctcttggaggtgcaaggcggggcggcgacccccttggtggggctgcgcacgggacacgcaggcgtgtcgttggggacatagggcccgtcgccg

SEQ ID NO: 416813 - DNA, 903 bp, Homo Sapiens
  misc_feature (181)..(189): n is a, c, g, or t
  misc_feature (340)..(355): n is a, c, g, or t
ctggaccggtccggaattcctgcgatccaggtgataatactttaaaaaagatggagcttgtggaaagaatttatactaatcaatttaataggatataaataattataagatgttttgaccctacatttttaaaaatcaaatcaaatttggtaaatctgataagaatagcatgtgcagaggnnnnnnnnngcatgaaacattgtgtgaactaatttggttgtctccatttaattggaagcatgtattaacattctgtggttctgcataatactttttctgttaaactaagcttcaaaaatctggtaacaataggtttggtaaagaaaaaaagtgatagcannnnnnnnnnnnnnnngtaatctggccttgaaactttcacctgaggaaataagcatgtgttggttgtatttggcagtagaatgttacctttgaaaataggccctttttatttgatgtgatccaaaataaagctgaaacaaattgggtcacaggtgccaacacttgataatttacagtgtggtaaaaccgagtggtgtttgtaagtataatttgctccgggaaaatttgaaaccactttaagttggaaaagtgtcaatattttataacatattttataccaaccatacccagattgcaagatcctttttaactacaagctgtagttaactttcaactattcatttaaatttgtggcttacaagtgtagtgtaaagtcactggtcatttattaaagcacattctttaaatattaaaacacaggaattgattaacatttatattttagtatgtgggaaatttattttgaaccttgtttgaggtattaacttcaaaaaaatttttggaccaaatttagaaaaatttatggtttccagcctttattgggttttatgaaaatttttaaag

SEQ ID NO: 416814 - DNA, 120 bp, Homo Sapiens
ctggaggcctcccctccgcacaccgaaactggggaggccatttaaaaccccgctttctcgggataaaattaaccccagtctccaagtaagtttctttttcagcaaggggggagaaacaaa

SEQ ID NO: 416815 - DNA, 473 bp, Homo Sapiens
ctggaccggtccggaattccctccgatcttttaatgattagttctcgcgagacctcacttactatcatgaccaaggtggatggtgctaaaccattcatgagaaaccaccctcatgaacaaatcacctcccaccaggacccacctgcaacattggggattgcaactgaacacaggatttgggtggggacacagatccaaaccatttcagggtttatagcgatgtttcaatacatatactgtatagtgatgagatggggataattaacatatccatcatctcaaacatttatcatttccttgtgttgggaacattcagtatcttccttctagccatttgaaactgtttaatatattgttgctaactatcatcatcctacagtggtatagaacactgatacttatttgatgattatagaagctggggaatgaatataaggaacttcattatactattctatttttgaatatatttg

SEQ ID NO: 416816 - DNA, 914 bp, Homo Sapiens
  misc_feature (66)..(97): n is a, c, g, or t
  misc_feature (385)..(394): n is a, c, g, or t
cgctggaccggtccggaattcctgcgatcagagacatcaagaaaaggatctgaaattggcacagcnnnnnnnnnnnnnnnnnnnnnnnnnnnnnnnnttgtttgtacgcatgatgcaggaaagttctgtccaggttttcagtcagatagaaatgtccaataggcaattagaaatgagaaacacttcactctggaatccatgacacagaagtgatcattgaaggcttgaaaacaaatgataatcataaaggatagggtagcaggagaaaatatcagaggcatgaggccataaatagatgatatatcttggagtagtgtgatacttaactattaccaggtatgcatgtatacaaatggccccgacttactatggttaaacttgtgannnnnnnnnncctttgctgtagtgtgaatgtgacacaaattcagtagaagctgtacttggaagttagaagtttgatcttttcccaggcgagccatatgtggtgtgatgctcccttgctacgctgggccgcacagagagccacggctcccagtcagctatgagatcaggagggtaaacaatctgtatgctgcagtgtattgtgttgccagcctcttttgaatactgtgtcttgtgtttttgcatcccatcatgtccataaaatgcccatctgtgtacagttttcaacactttattacaaaataggctttgtgttagatgattttgccccactataagataatgtaagtgttctgagcacatttaaggtacgctaggctaagctatgatgcttggtaaggcaggtatttttaactgccgtttttgacttacgatattttccacatatgatggggggtaatcaaaatggtaactcccactgtaaagctgaaggagcatctaccagcctccctttcatgaactgggggaaaaaa

SEQ ID NO: 416817 - DNA, 976 bp, Homo Sapiens
  misc_feature (266)..(489): n is a, c, g, or t
  misc_feature (497)..(499): n is a, c, g, or t
  misc_feature (504)..(504): n is a, c, g, or t
  misc_feature (514)..(514): n is a, c, g, or t
  misc_feature (529)..(529): n is a, c, g, or t
  misc_feature (544)..(544): n is a, c, g, or t
  misc_feature (550)..(551): n is a, c, g, or t
  misc_feature (562)..(562): n is a, c, g, or t
  misc_feature (577)..(579): n is a, c, g, or t
  misc_feature (585)..(589): n is a, c, g, or t
  misc_feature (593)..(619): n is a, c, g, or t
  misc_feature (660)..(731): n is a, c, g, or t
  misc_feature (899)..(899): n is a, c, g, or t
ctggaccggtccggaattcctccgatatcaggaatcctccccacctcatccttcctaggatagggctagtcctaggcaccgtggccctctccattctactgccgtcttatttccttcatagcacttactcattcacccaaacttatttagtcaatatttgcgcattgtcacctatcttcccactccggaacctcatttccctgaagcgacggctgtcagtcttatgcttctctacatccctgaaacagcagccaaacctgtaaatnnnnnnnnnnnnnnnnnnnnnnnnnnnnnnnnnnnnnnnnnnnnnnnnnnnnnnnnnnnnnnnnnnnnnnnnnnnnnnnnnnnnnnnnnnnnnnnnnnnnnnnnnnnnnnnnnnnnnnnnnnnnnnnnnnnnnnnnnnnnnnnnnnnnnnnnnnnnnnnnnnnnnnnnnnnnnnnnnnnnnnnnnnnnnnnnnnnnnnnnnnnnnnnnnnnnnnnnnnnnnnnngaacccgnnnaggcnaagcatgcantgagctgagacagcnccactgaactgccancctggnntgacaaaggcnagactgccgtgctcnnnaagagnnnnnaggnnnnnnnnnnnnnnnnnnnnnnnnnnnaggcagcccgcgtgcccccgccagactctccgccttcgtgnnnnnnnnnnnnnnnnnnnnnnnnnnnnnnnnnnnnnnnnnnnnnnnnnnnnnnnnnnnnnnnnnnnnnnnnacaaattggtacggaacccccccagtgtggtgtgggaaaaaaagagggcccccctgataaggggggccccctgttgtgaaagcctggggcccccgtggcccctctatcttttttcacaacacctctcgggtacttggggaaaaaacccgtcccacactttggaaggcnccttctgaggaaggagagacccccttactcctttgcggggggggcggcaaccctttgggtggggcagacaaatcaac

SEQ ID NO: 416818 - DNA, 161 bp, Homo Sapiens
tggcccccttcagttcacacctgtggtcagcatcaatatggtgacttcccaggagtaagggaccaccaggctgcctaaggtggggtgaaccagcccaggtcagaaagggaacaggtcaaactctcatgctggttagtagtgggattgcacctgtgaataga

SEQ ID NO: 416819 - DNA, 231 bp, Homo Sapiens
gggccaccgggcctggcctcacaaagctctttgtaagtacaggaatttgtatgcctacaaaaaaatttccttcccaaaaatctgcaaaaaggctggactttaatgaggccccggggtgcccccgaaagggacgaaacagggtcccaaagttgtgtaaaggccccttggaaaaaaaggtaagggccccccgggggtaatttgggttaaaagccccgggtctcctaaatgggc

SEQ ID NO: 416820 - DNA, 1016 bp, Homo Sapiens
  misc_feature (259)..(539): n is a, c, g, or t
  misc_feature (991)..(991): n is a, c, g, or t
tggaccggtccggaattcttcagatgggaagagtgttatattttatataactgtaaaattgagccatttatgccattggcatgtactgttctaatattttcataatttaagtttttttaaaaagctgagcaaaaaacagatccttttagaactgctcaagatggtgctaatggtttctgtattacctggcagttgaagatataaccaaccatcaaccccggctgactgggaggaaagacacatcataagagtggggtcnnnnnnnnnnnnnnnnnnnnnnnnnnnnnnnnnnnnnnnnnnnnnnnnnnnnnnnnnnnnnnnnnnnnnnnnnnnnnnnnnnnnnnnnnnnnnnnnnnnnnnnnnnnnnnnnnnnnnnnnnnnnnnnnnnnnnnnnnnnnnnnnnnnnnnnnnnnnnnnnnnnnnnnnnnnnnnnnnnnnnnnnnnnnnnnnnnnnnnnnnnnnnnnnnnnnnnnnnnnnnnnnnnnnnnnnnnnnnnnnnnnnnnnnnnnnnnnnnnnnnnnnnnnnnnnnnnnnnnnnncgcctctcatgagtccggacgagagaactgcgcggtaaccacagctgtacagagttgggcgccgcgcggttgcacacctcagacacagcacctctgcgggtgatcaccggtagagcaccgttacacccgtagcgcgtacgaatccacgcggcactcccacccgccgacgagacatgcgggcacactgcttcgcctgcgaaaagcgcggctacacgcatcccggaggcgcagacaggtgccgtgcctaactaggaagagactcggggcgttgagcgcccccgctgtggtaaccccgctagatcggggccgagctcggaccggggcgagccgaggcccagcaccttgactggttagagtacatggtaatttcttccagtgactgtctcgaatctgacgaataactttgcgcgaagaccgccgacaatgctactgacaaacagcgccggacgggnctgatgacatgggtcgacctaggag

SEQ ID NO: 416821 - DNA, 647 bp, Homo Sapiens
  misc_feature (289)..(347): n is a, c, g, or t
ggctggaccggtccggattcccgcggattgatatctagcttttgcccctggtcttgtcagtcccattatattaaaacatgtatctagcacttctccttccaattaactctaaatctgacaagccaggcccctagactggtagcatcttttgtgaactgtggtttcctcaaaggcaggcagcaagccttattcatatttatctatatgccacccaaagggtccttaggtgacagttgccatttgaaatgagggcacacgaaactcttaatctcaatctcagtttccctcnnnnnnnnnnnnnnnnnnnnnnnnnnnnnnnnnnnnnnnnnnnnnnnnnnnnnnnnnnncatgaaatgcttacttctctttctttatcctaagccccagccattcaagaaccaaatttaaagtcgagccaaagtagccgataaattgcttgaggcctcctggtctgtgaggagtcccagaataatatctggaatgagactcccaggacaaaatttccagtctctggccgcaaaataaggggactggggcctttctccaaaacccccgaaaaataaaaagggggccccttccaaagaaaatttcggggtttaaatatttgggggaaccccttcaatttcccaattcccccaacgaaaacc

SEQ ID NO: 416822 - DNA, 1046 bp, Homo Sapiens
  misc_feature (59)..(262): n is a, c, g, or t
  misc_feature (275)..(565): n is a, c, g, or t
  misc_feature (814)..(837): n is a, c, g, or t
  misc_feature (899)..(899): n is a, c, g, or t
gagacaaagggaggtggggctggtccggtccggaattcttcggatcttgaacccgggannnnnnnnnnnnnnnnnnnnnnnnnnnnnnnnnnnnnnnnnnnnnnnnnnnnnnnnnnnnnnnnnnnnnnnnnnnnnnnnnnnnnnnnnnnnnnnnnnnnnnnnnnnnnnnnnnnnnnnnnnnnnnnnnnnnnnnnnnnnnnnnnnnnnnnnnnnnnnnnnnnnnnnnnnnnnnnnnnnnnnnnnnnnnnnnnnnnnnnnnnnncagacaaaggaannnnnnnnnnnnnnnnnnnnnnnnnnnnnnnnnnnnnnnnnnnnnnnnnnnnnnnnnnnnnnnnnnnnnnnnnnnnnnnnnnnnnnnnnnnnnnnnnnnnnnnnnnnnnnnnnnnnnnnnnnnnnnnnnnnnnnnnnnnnnnnnnnnnnnnnnnnnnnnnnnnnnnnnnnnnnnnnnnnnnnnnnnnnnnnnnnnnnnnnnnnnnnnnnnnnnnnnnnnnnnnnnnnnnnnnnnnnnnnnnnnnnnnnnnnnnnnnnnnnnnnnnnnnnnnnnnnnnnnnnnnnnnnnnnngaaaagaaaagcaggattaaagttattattgtacctaagttttgaaataatttgccccctggaaaagccaaatgaagtatcttaattttgccaagtattctgggcacagtctccaaattccatgtatttgggcctgggttgtctcccagattccccctggtattttgtttcctaacttttaaggatcctaaaaaatttggggggatccgaagaaatggggccccccaaaaactatggctgccacccccnnnnnnnnnnnnnnnnnnnnnnnnaaggggaaacaagaccacccctccggggggatgtacccccaaaatccgtttaggtgtaaatnttgaaacgccccgcgaagaaaggggggttattttgttgaacccgttggggggtttatcccgcaccctccgcaaggtaaccgcaaaaaatgagttcccggggttccggcacaaataccctcccctggtttttgaagatgtaacttgtt

SEQ ID NO: 416823 - DNA, 301 bp, Homo Sapiens
atcaactgcaaaaaggcattttagggtgaaatcctgtatgttcattgtgttggacgttacatgacctgtatatcatcacttaaattcatcaaagatcaatccctgaaaataaaacaactaaatatgtgcttccctgctgtgatgcaaaaatattcaacacgacctaatgaggtatttgtccccccaaaattaaaaattgaacctttaatctctattaaagcctcctgaatttcccctaaaaagttttactttgaaaaaccgggtggaataggaggaaaccaactttaaagtgaccagcccg

SEQ ID NO: 416824 - DNA, 931 bp, Homo Sapiens
  misc_feature (551)..(633): n is a, c, g, or t
  misc_feature (740)..(832): n is a, c, g, or t
ggcagggcaccacactacatccctgcgaaatctgcccaaacaggctggtacggtccggaatttttcgaaaaagagccacactttgagtcttcactctgagtattcagagtgagaatcattgcatgtttaaaatgacttgagctgtgctggctttttggtcccgcagccttttcaaacgatgcttgaaattgttttttttcacaccaatcttttcaaaaaggctactcctttttgtaaggtccatgcaacccagaaataaattagaagcaagaattgtaaagtgcataggtagtacctatgtttacagaatggctaacttggtgcaatagttgctcatttgcactatttcctgagagaggaccacgcgcatgggatgggaaaggaaatataattcggaccaagcccttatccacaaagaactttcaagcatgcagaggcaggaatgaatgagggaattccacaaacaagcccaaagctgaggaaaaacaaccaaggtacaaatgcacatactacaaggtaacaagaggcacagagctacttagaaattctgnnnnnnnnnnnnnnnnnnnnnnnnnnnnnnnnnnnnnnnnnnnnnnnnnnnnnnnnnnnnnnnnnnnnnnnnnnnnnnnnnnncttacaaaccgtaacctccgacacacgcgaacccttccaacccaccccccaaacccaccaatatccccccaagtaatcaccgacaattaacacatacacaaatgttnnnnnnnnnnnnnnnnnnnnnnnnnnnnnnnnnnnnnnnnnnnnnnnnnnnnnnnnnnnnnnnnnnnnnnnnnnnnnnnnnnnnnnnnnnnnncttttcctacggatccccctctccctttccgccacccaacatggtacccaacataaaaaggagaccaatacccctccacacccttatgcaactccatat

SEQ ID NO: 416825 - DNA, 716 bp, Homo Sapiens
  misc_feature (188)..(638): n is a, c, g, or t
cggtccggaattccttacgatctaattcacttacctcctggctctactaagagatgtcacatctccaatttaacagtctgtttaatattaacttctcaaatgtatttgttcccaacatatattgatttatatgagcacacactaatgacctaagtctgttactctttcttaagaaagatgcaaatttnnnnnnnnnnnnnnnnnnnnnnnnnnnnnnnnnnnnnnnnnnnnnnnnnnnnnnnnnnnnnnnnnnnnnnnnnnnnnnnnnnnnnnnnnnnnnnnnnnnnnnnnnnnnnnnnnnnnnnnnnnnnnnnnnnnnnnnnnnnnnnnnnnnnnnnnnnnnnnnnnnnnnnnnnnnnnnnnnnnnnnnnnnnnnnnnnnnnnnnnnnnnnnnnnnnnnnnnnnnnnnnnnnnnnnnnnnnnnnnnnnnnnnnnnnnnnnnnnnnnnnnnnnnnnnnnnnnnnnnnnnnnnnnnnnnnnnnnnnnnnnnnnnnnnnnnnnnnnnnnnnnnnnnnnnnnnnnnnnnnnnnnnnnnnnnnnnnnnnnnnnnnnnnnnnnnnnnnnnnnnnnnnnnnnnnnnnnnnnnnnnnnnnnnnnnnnnnnnnnnnnnnnnnnnnnnnnnnnnnnnnnnnnnnnnnggcgaaagggaattgaaaccacaccccttttttcaaaacgaaaaaacattttatggcaacccccaaaaaaccccattg

SEQ ID NO: 416826 - DNA, 905 bp, Homo Sapiens
attcatacaaaacagggtttccatcttcgcttaccctgcaaatggtggctatgaacacatatgcattgcacgcacatatgcacagaaacacatgaagcaagaattgtgtggctccccaagtttctcacccctgttcttgaaaatgtcattctctctctaaaaattacaggtggatcaaacatgtgaatacttttcctgtaagatatggctataaggattacaagcaacatgacttactttaggctcataaagtaattataagcactcaggactagaatttggtggtatcaagcaaaagggcaagaataactgaaggcctttttccctgtaattatagtgctttcttttacttctgactttcttccctaccatcccagggtgccattagctcattttgatcataattaatattactaactatattttggttggcttttcactgcttatggtccatgagatgggcacaagcagaacctgaagtctaaggccatatttatcttagacaaacaactggagaacatcttttcccatcattacttcccagttctttactaccgtggaatcccataacagcctttgccacagagacacgtgagtgccgaccacaccacgaacttactattgttgctatccccatcaatattatttatgcatatactttcatttctccagcatgaaaccgatttccccactgacaccggaagccaaataatgccccatgaacttgctgataaacgtctttttgaagtggctgctcttttcaccaaccaaagttttccttttcaacctgcatcccccactatcctgtctacaaatcccaaccctcaactaccatataatcttttttaacatcaccgctccttcccccccggttacacacaaccctggatggccctccaaaattc

SEQ ID NO: 416827 - DNA, 923 bp, Homo Sapiens
ttttttcccctcccggatttagtttgctttaattttgctcatataaggacattttatgatagcagcagcagggacctggttctctggagtgaattcaggtgtggtctctataagatgggcagttaattcctggaaggagatgtggagaacacagtctctttccagaagtcaaggaatgatacctgtaggtttttcaatatggtatcagaggtggctttagcacagttgttcaggctgtcgatatagccctgacttgtcaatactagccagcagcagcttcttaaccatgggatagtggcaatgttggtacctctagggatagggatcagacacaccagcacagaatcatagcatccagtcaccttgcaagaacagagtgggactccccatctagttccccttgtagcctcccttcagggagatgatggatagtttatccagatgaggcctgtgttgctatttccctggaatacccaataataagcaggccaccatggcttttgtagtctgtgatggctgtgaatgcctgagaccaggttcacctggcaaaccaggcaaatttccaagtgaggttttaggagttcatcttttaggtatgactctaggaagaagtcagtcttggaggtagggagaagaggcttctttataaacctcattatgtcctctaccaaaggttccatcctgttgaacggaattttcttgtatcctatgttttctgactctagggggccctggggccttccgcccctccttggcaggaaaagccatctccgggggccctggggtggtttttttccaaaaaaagggtaccccttttgaaacccctttttggccatcaagagtttggcaaaaatggggggaccccttcaaagggggtagagaaaaaccccctggaaattttgatttgggggcctttgcaaaaa

SEQ ID NO: 416828 - DNA, 564 bp, Homo Sapiens
  misc_feature (180)..(189): n is a, c, g, or t
  misc_feature (466)..(482): n is a, c, g, or t
tttttaacataatatttcgaaagtgacatattaaaaatacatattcccattataatttagaaaggcaagttatctctgcttgctgttactgttgccatccaacattattctaccaatcattgctaatgcaaaggaataagaagaaacaggaccctaaatattctaaaggatgagaccagnnnnnnnnnnctcaccaaatgtctaaaaaatgcattgacctttcatactcataacactgttgtggagtgagtataatattgtcttcacttgcccaagctcttcaagccagcaagatctgaagccaagatctgacctcaggcagtcggaagccagacccaaaggattcatcaccatcctattacctcctatgtgctgcttggaaattaaaacaaataactgcattaaaatgatcagggttatgaaaagcaggcatcaaagttttctagctatttatcctgtatctctnnnnnnnnnnnnnnnnnctgggaagtttgcttttaaatcagaggttttgtcctaactaaaaaaagagaaagaatattctttaccaaagtaaaagctaat

SEQ ID NO: 416829 - DNA, 408 bp, Homo Sapiens
  misc_feature (247)..(257): n is a, c, g, or t
atatttaattgttttcttgagatcccagtttattgtgagtgtttttactccttaagggattcggaggtggtgaaattgatccagaatgacctgcaattctgaaaattagaaggctgttgaatattttctttgaaaatgttaaagaaaatgggcatgttgaagtatcccggtctttggtattatgttagggactctgaacaagaaaaagaattcatcaactatcaccatttttgagaccagaaagtgnnnnnnnnnnngctataacatgatctatttgaacccagataagatttacaattttgcgaatactctaaggtttcagcaccattaaagttttttgattggcttctgcttacaagaatatccttctgtatttcctaggagactgttcaggaatattctaggtag

SEQ ID NO: 416830 - DNA, 921 bp, Homo Sapiens
  misc_feature (122)..(411): n is a, c, g, or t
ttgtgctctctcacctcctcctccaaccaatcagtacctaaggagagctctgagcgttcctacccagcccaaggtaagaacgtcttcttagctgcagtccaatacattaaaaaacagtgggnnnnnnnnnnnnnnnnnnnnnnnnnnnnnnnnnnnnnnnnnnnnnnnnnnnnnnnnnnnnnnnnnnnnnnnnnnnnnnnnnnnnnnnnnnnnnnnnnnnnnnnnnnnnnnnnnnnnnnnnnnnnnnnnnnnnnnnnnnnnnnnnnnnnnnnnnnnnnnnnnnnnnnnnnnnnnnnnnnnnnnnnnnnnnnnnnnnnnnnnnnnnnnnnnnnnnnnnnnnnnnnnnnnnnnnnnnnnnnnnnnnnnnnnnnnnnnnnnnnnnnnnnnnnnnnnnnnnnnnnnnnnnnnnnnccccacagtgggaaggaaagggagagtgaacccgttctggctgtttacggaattaaatgacacagaaatgtgtgcagctagtaatgggcctgtaactgagggtgccgtccttcatgcttccctttccattccttcctcctggcagtgacttcttctggtcctgtgggggaggaggccgaaaactggcagctgctctgcctaggacaggaaggtcaagtgcagtccaggaagcaaacagcacaagctgcccttctctactacagctcttgccagttgacaaaaggccactcctgcaacctcgccttgcctcctaaagcctactcctcaaatggggtgaacatatttttcaagggaaaaagaaccactgtggtgaatatacgggccttccccaaaaatctgttctccagggctaagaacctccacccccttggagaaggggagattaaaaagcctttcatggggccaaaacacatttgctttttaatagtgcaaatctttgtccgcacccct

SEQ ID NO: 416831 - DNA, 809 bp, Homo Sapiens
  misc_feature (463)..(645): n is a, c, g, or t
gagaacaggcctcattcgtttcactttaattggccctttgacgttaaagtctacaactttgtgcagttagtgctgggcccatcctggctagccatgctaagcagtctccctcctcacagctaagctcctctggttcttacccaaggctaatcatcatttcaagtggaatctggcatatttactcctgatgtgattctggctgaaatctgatgacgcaggtctgacagcaatgcctacgtctgtcttttgtttagagcttagtgccttgcatatctaagacaaggacactgcttctttttggcagcttccttcccagggctgaagtctagtccctgaactcaaacgaggatcttcccactcaattttctgaatgccttaactgtctgcctccctggatcaggtcctgctgtggacacagtatggtagagtggttgaatgtggctatcacatcaacttgatgttnnnnnnnnnnnnnnnnnnnnnnnnnnnnnnnnnnnnnnnnnnnnnnnnnnnnnnnnnnnnnnnnnnnnnnnnnnnnnnnnnnnnnnnnnnnnnnnnnnnnnnnnnnnnnnnnnnnnnnnnnnnnnnnnnnnnnnnnnnnnnnnnnnnnnnnnnnnnnnnnnnnnnnnnnnnnnnnnnnnnnnntgctcctatgtccagttagatgatcagcatcctcttctgatggttaccccaccctcgtcatctcacttttggacctccttgataccaagttggctattggttctacctgcctgcccaattgtggcttggggctctcttctctcttcatcctctctccttacacg

SEQ ID NO: 416832 - DNA, 131 bp, Homo Sapiens
ccctgaaaggtgacagggaagaatgggaaccacccttgggaaaatcactccttccgggaatattttatcccagggaagaaaacttttccccaaacccctaagccaaagaaccagggcccccaaacattttc

SEQ ID NO: 416833 - DNA, 1416 bp, Homo Sapiens
  misc_feature (61)..(146): n is a, c, g, or t
  misc_feature (371)..(382): n is a, c, g, or t
  misc_feature (886)..(886): n is a, c, g, or t
  misc_feature (973)..(973): n is a, c, g, or t
  misc_feature (1011)..(1011): n is a, c, g, or t
  misc_feature (1206)..(1206): n is a, c, g, or t
  misc_feature (1227)..(1227): n is a, c, g, or t
tctcctccttatatgttaaacgaccgacggggccggcccggaatttttcggatcgccctcnnnnnnnnnnnnnnnnnnnnnnnnnnnnnnnnnnnnnnnnnnnnnnnnnnnnnnnnnnnnnnnnnnnnnnnnnnnnnnnnnnnnnnccacaaaacccatccccttttatttttcattccggcccaccaacccttttggccaccctgaagaagagggggttttgcaacggggggcaaaacattgggggaccaccccccccgggaatggtcctcgccccctgctggggttggttaactttgaaaaacgattgccaaaaaacttccaaaccacgggaaatgttccaaagggtaaggggggccccgggttttttnnnnnnnnnnnnggggggggaaaaaccccccaccatcccgtggcaaagggccgggccccggcccaggggcacccagatttctcttgggggaacaggagttgtccctccccccccgaaacagcttcctccccaccaggcgccccaggggttgtacccaaaaagaggcgggcccccccaaaaatccgcggggccctcaaaagatatgattcctcaccccccgcttcttttttgtccccgccccctcttagagaaaaaggtcgtcacagccgccgcgtgtgggcggttctccccagaaacaatataccatgcgcgaaataatccccccaccatgggagcgcccaccccgcttgtggtggagacaaaggaggtgtgcgtctttcttcacgcgaaagaaaagaacgcgggcgggccccgctgtacgtaatacactgtcacatccccctcaatcgtcccctaagagtactacatcccaaaaaacgccgcgacgcgcccccctgtagggggggttctctcccnccacgcaccctcaatcagctactatggacggatatttgtttacctcgcgccaggcgggggccggcccacgctacccgcgaagccggngagaaaatcacgcgcgcatgttttcaccttggcgggcnacgggggccattttccctgatttacggtcggacagggcgcaagacaaaaaagagggcaggtgtctggtggccggacaaacacccaccctcgcccgcgcaccatctttctttgcgccacgcacccctcgtgtgtcgaacaacaaccccctcgccctctatctgcgctgatcgccgcgtgttaccggcggacgttgnccccgcaatcggcgccacccnccaccttcttctctccctgtgtggtgagggggccgccaccttgcctatgagatgccaccggcggggcgcagcatggattttgccccgagtgcgtttgtatgactccaacacgcgagtggagtggagagacgtgccgtactccgcgccactccttctgctaacgcgcggcgttaatcaggtctcgtttcg

SEQ ID NO: 416834 - DNA, 859 bp, Homo Sapiens
  misc_feature (135)..(184): n is a, c, g, or t
tgcaataaattaaagccagaaaacactgctcatctgcaatccaaaatgttttagagctcttcaactattcttgggttgattaggaaatgcaaagtattaaaaaaacatttcatatctaaaatataaacttgttcnnnnnnnnnnnnnnnnnnnnnnnnnnnnnnnnnnnnnnnnnnnnnnnnnnatttatgtattaaaaaataagataaatgtcatataactcaaaatattaggaaaaggaatcttttaaaggcaggctaaaagaatcaagaaaaattaattagaaaaatgaggaaacaaagctaatttttaaaatatgtagtaaaatatgtaacattttagctaacattacaagagaagacaaacacaaaataagaattaccaagtattgaataggtaagagtcataaaatattctttgctcaactgtatgcaaacaatttaaaaacttggattaaatggataattttccaggaaggtatagtttgccaaaaaatgacatcaaaagaaatctaatataacaattgtcatagaagaaatgaagtaagtatttcaattagcatgacagactaaatacttttaaagacccaatgaaaacaaagaaatgcatttggagaattaacagaaactttttgtaacaccaattttttattttacattttaaagcatggaatggaatttattgtaaagacgtgtattttatagaatccaagcaaaaagctcaccagcccaagagataaaagtggaggccccacttcaagggaaatgtgaagccagtggcccgaatttatttccccctcctgggtggtttccactggtttaaggccttggaaccacaaaaagagcccccccctttctta

SEQ ID NO: 416835 - DNA, 347 bp, Homo Sapiens
  misc_feature (164)..(178): n is a, c, g, or t
  misc_feature (196)..(197): n is a, c, g, or t
  misc_feature (200)..(254): n is a, c, g, or t
ctggaccggtccggattcccgggatctgagattggaattaaggttcacagaagctgggtaagctgggttcacccagtcttccttaatcagagactttaatgaaccctctttattaaataaatgggcttctagtcattcaagagttagttatattgcctgatccnnnnnnnnnnnnnnngagaatgggggaaaagannttnnnnnnnnnnnnnnnnnnnnnnnnnnnnnnnnnnnnnnnnnnnnnnnnnnnnnnnattttttcaggctaaagtgcaaatgggggggccccctttatttcttcggggccttcaccttggcaaaaacccttttccgggcccttttctttt

SEQ ID NO: 416836 - DNA, 869 bp, Homo Sapiens
  misc_feature (610)..(672): n is a, c, g, or t
gggggcaatttagaaagattatagtgtcaaaagattcaaactcagaaaagaattgaaaggttgcctgccagccatatccccagacgaacctagaccactggggtttcactatcatacagaatagagaaaaacattggttactgacacctgaaatcaaaaagcttggatatttttcagtcccaaaccagaacatagctcccgtatataaatgtaaatcttccttcaaaagtataattaagtataattatgggtgtatgtcaaaaatatagaggaagatggatttttacttatacgttgttatacatagttgggacagcaatcaaatttttaaacagttttcaagaatgtatgaccttaaaaagaaacgtggcgactcctgatcactttccatataatggcattacacgggacacgctaatggtcccaaacactaaaagtttcccctacgacccgggaacctggacactcggtttttggtggagtatatgaagttaaacccccgttctccgtcttcccattttctggtgttttaaacttgtgttcgttgtttcaatcccagtcgctttcgctcttcgtcccataatcccccccaactcatcttcaccctccnnnnnnnnnnnnnnnnnnnnnnnnnnnnnnnnnnnnnnnnnnnnnnnnnnnnnnnnnnnnnnnttacttcccgcttttatcccccacgttcgcaatctcatcctcccaccccccccgctcaatgtacccccacctataccatccactacgtctactctatttcgtacccactgctttatcacaaaagtttattacactcactcctcttaaatctccgtcttaaaccgtcatataacctcccatcaccatctctctattcc

SEQ ID NO: 416837 - DNA, 775 bp, Homo Sapiens
  misc_feature (193)..(258): n is a, c, g, or t
  misc_feature (321)..(374): n is a, c, g, or t
ggactattcaagttatctgttatcttgggtgtttttatagtttggaattggtccatatcatctaaattgtcaaatttatgtgcatagagttgtttgttgtattcctttattatcctgtaatgtctgctgggtctgtaatagtattccttctttcattaccaatattgatcatttatgtctttcttgcactttnnnnnnnnnnnnnnnnnnnnnnnnnnnnnnnnnnnnnnnnnnnnnnnnnnnnnnnnnnnnnnnnnncccaccttttgtcagccttgcttgaggttgatcaatgttattgatcttttcaaagaataaacnnnnnnnnnnnnnnnnnnnnnnnnnnnnnnnnnnnnnnnnnnnnnnnnnnnnnnactcttacgtttattccttcctcctacttgctttgggtttattttgctcttccgcttgtagtttcttgaggtggaagctttgttttggatctgagaccatctttcaatataagcatttagtggttaaatttataaattttctccaaaaagtggaaactgcttttaactggctcccaaaagatttttaataaggttggaattttccattccccttcaagtgtattttttaccttttcccttttggaaacctttcctcctttgaccatttggaagaattttaaaaagggggggtggttttaaattttccaaaatgggttttggggaatttttccgggggaaccttttccgggtttattaattggaatttcccaggttaagaatttcttttttgagaaacggag

SEQ ID NO: 416838 - DNA, 845 bp, Homo Sapiens
  misc_feature (450)..(450): n is a, c, g, or t
  misc_feature (716)..(716): n is a, c, g, or t
aagttagcatgtacctaatggtcgcacacaccaaaagtgaatgatgccaattggatttctacgcctgagactacatcttaaacaccctctcctcacaattttcaccctatataacaaaccacacagagctcataaaacacccaaagccaatgtttaaacccaccccacaatattcactcttcccgacattcacaaggatgacctacaagcaaatataagtacccccatgctatattcctcaacacccatttctatttttccccgtcatatcattgactcgccagatatccatcactgttccttgtcacttataaaaccacaattctgcaactacaaatttctatcagcagaaacatttgcccacatttgtttagcacgcatttacccgaaaccactactgcacacacagaacgcaacatcaaatacaatatagacactcaataatcagtnacgatattatgtggatataacaggacaacacaaacacatgaataagtataatgatagaagagtaaacttgcaggttgtatacaattcaagacaaagtacctacgacttgactatgatactctcactggacacacaagaggtacacaccattacactggtgtatacggtgaacaagattagctcatctaagacatgtcagatgttcatctccactcgtcaacctatagtgatactcacgaaactatactgagatataccctcatgcncaccaactatgtagtgaacgcattgcgcaacaactacacacaacactgagtttacagtatccgttaataactatacgatttgtcaagtctggatatgaatgcacatagctcacaatatatctcttctcg

SEQ ID NO: 416839 - DNA, 776 bp, Homo Sapiens
  misc_feature (154)..(168): n is a, c, g, or t
  misc_feature (235)..(249): n is a, c, g, or t
  misc_feature (420)..(428): n is a, c, g, or t
gggtttcatattggcagtcattctctttactagtctttactctaatggtcagagcattctttgcattcacacacatgttgacattattaatttttagggataagaagataccaacttctgtccaaagtcaaatacagcccatatctaccatacnnnnnnnnnnnnnnnaaagaaagggcccagatgtcaattcttattttgtgttacccacccatccagttttgaatacataccnnnnnnnnnnnnnnnacttcaccgctttttttaggaataccctcaactatataagaattgtatttcatgaagagacttttaaaataatctttcactatcagttatctttgcctcctctgaagactattcagtgtggttagatcattctaaagcatgaaatcatctatttaagctcagcataaacannnnnnnnnccctcagaggaaagcattttgctgggtacatttaaataaaaattgtaaattatgaaatcagagcctttaaacaagatttctctgtagcaaacccaacagttcttcacccctaaacatttatcatcaggaaaacaatttcgcattgcttaccagtcagtatgcaggaaaccatttttgtttcatgctccaccttttccttcttaagaaagaaatttgaaacctcttaaataagggtatgtgcaccgggaagcctaaaaagggctgaaggggggggtttttagaaaaatttgcaaactggaattttttggggcccggaaccctcaagtgttttacacacaccctagggcg

SEQ ID NO: 416840 - DNA, 797 bp, Homo Sapiens
gggtctttgaccacagcactagacaggtaggtattcagtagcctgttaaagctgtgcctttgaaaattgtagaaccttgagaatgtaagatttatttacgtctttgtatctctgttaaaaggaaaaagagtaaatagtttgtttcttttatttaacttagttattttgaagataagattatgtgaaatactttaagctgtacaggggaaaatgacttggtcagtcttgcatataattcacttttttagccaatgcaagtcagtttagcccattaaaatttcatgaatcccatgtcactggggtcagtttttaggcacaagtctgataataacagtgctttatgatgtttctcctcccacacatactcttttagcataatggttgcagtgaaaacaattccgtatagcctctggttattaagtaaatatttatatatttctattaggctgaacacatttatgtgtacttggctcagttaaaatagggcatgcaggaatgtatgtgggggagcatgaagaggacatgaatctgttacctaaattaatatacattgttacttatgttggatcgcaaaagtggtagtataaggtgaacattgggcccagttagagatttctcatctagaacagagagtattatttttccccttagtgaccatgagccagtgaagaagcacttcttcagatccagtccaaaacttgacctaaagtctaatgttcccccaaagattaaggctctttatttttccggtcttccggaacttaaaaccaaaacctttgaaggggtttatcttgggg

SEQ ID NO: 416841 - DNA, 1064 bp, Homo Sapiens
  misc_feature (490)..(521): n is a, c, g, or t
  misc_feature (662)..(662): n is a, c, g, or t
  misc_feature (856)..(856): n is a, c, g, or t
  misc_feature (901)..(901): n is a, c, g, or t
ggaaacagagatacagaagatgaattatgatgccatgtgacgcatggtgcagagtagcatgggataagaaaggtccacatgtaaagtgatgggaacagaaagatgaattgatgagcttgtagggagttggaaagacttcccagagagggagctgagtgttgaggaatgaatatgggtttgccagatagaaaagggaatcttggcagagaaccttagaaaggaagagtgtggtaaaatggagggatggtgacctcccctgaagtggctagaacaaattctgtccgaattgaaaaaaagggggaattctgggttggggtgggctataagcttttcccttggatggaattggccacagccctagagggtgaaaccctgttttacaaaaaaagggggaaacctctttttgggaaaagaaatgtggtctgtttctttacccctaaaaaccccccgcaaagacccccccggggaagattttggggcctctctttannnnnnnnnnnnnnnnnnnnnnnnnnnnnnnnggggggagaagaggaggaggagcaccgacccacccacgccctgaggcgtccaccatatcaaggcattctaacacaattttacttctgttgtgtaactgtcttatcatcattctccacgggcacctctaatgcaattacacncccacatacgtaatcacctatcctaacaacacggtgtttctgatccgtcgcgcgatcgatttgaccggctcgcgtgcacacgtaacctgctactctcccgcgatgttcaacctcccacaatctactaacccatccgcactatggcactcgccaccccacatacacggcgtccgcagtcagatacgtccgtgtanttcgaggaatccgggcggttatccgcgacatcatacgctcgaggnaatctatccacgtcctgatatacggtaggggcagtggcgagacgtgagccagtatatatgaaaagatgaatatcgtacacagacgtacgtaaacccgacgagtgccccactacgttccctcgcgcactgccccgcccgctgatatgcgtcctcggcctgcgtg

SEQ ID NO: 416842 - DNA, 940 bp, Homo Sapiens
  misc_feature (109)..(118): n is a, c, g, or t
  misc_feature (764)..(764): n is a, c, g, or t
  misc_feature (771)..(771): n is a, c, g, or t
  misc_feature (789)..(789): n is a, c, g, or t
tactatcgatccaccaatgctctaaactttgcccctgtgtggtgttggggactaacgcattatcccttactcgcaatcgcccgccgggtgttggcttctgtgcaccctnnnnnnnnnntcgttcctcctcgtctccctattcacccatccgacccacttcgtagccgccccatctctcctcctatcttccgcccttatcgcggctaaccgccctctggtctcctgtcgtatttcccctgtccccttcctctcctctacatatatcactcgtgccctccttcagcttcctgtcgcgggtagcctcttccgctcctttatactccagttcggcatgtctcgcctctcaaccagttccgggttgtcgtttccctcgtgcagccgacaggcgcgcgcgtctgaatctcagttcacttcctccgtctccctcccttcgtgctcgctctgctcccgtttttgtgctatttgatgccctctcatgtcccaggagttgtttgactctcctgaactcctccatccctcctatacatgcgccacacttccgcaatttttgacgtctcgctgtgcgcgcgctgtatcctctgtctccgtgtatatatggttatattctttctgctcgttctgctgtgtgcatgctccgcaccgctgctgcctgcgttcctccgctctccggtttggtatactcttccctctatctgtttcctctcacgctgtcctctctgtgtcgagtatctgttcggcgcgtgttactacttactatcacacangtcgcanggcgaagactctgttccnggcggcgcatatgcgttgtcgcagactacgccggtgcgcctctgtctgcgtgtgattgctaatggcgtgctcttctatctatatcgaccgcccgcgcggcgttcgcgcattattagcacggtgtctgcactacgatatgtcaaaactgcac

SEQ ID NO: 416843 - DNA, 625 bp, Homo Sapiens
  misc_feature (455)..(455): n is a, c, g, or t
  misc_feature (521)..(521): n is a, c, g, or t
cgacgcaaagataaaatgatgggaggtggccctgacgagaaagacaccggtatacggacttaagcaagagcacaatcttaagaaccgacagaaaaaggcgtcacacgaaaacattgaccgaagacacgaaatcacaaatcctcgcgccgcgagtagaaacgaacaaaaaagagggctaaccaacaaggcccagaccttaatcaacagagccttagtagcgacacagaatgtgcttaagactttgcatttaacgcaggcgactcggacctagtccccaatgtgtgacatcaatcgttacacccagcagcgagcagaatagcgagccttctagaagccagctcagctacccgaagaggaaaccggcaacggagtacaagtcgaagaacgacgagagaggaacagagtatggaaataatacagcatcgataggtatgtctaaacaagtacgaataaancagcaacaagacatacagaacacagacatactatgcacgtcgccaacgcgaatgagtgagggctgntgtgatacgcgcgtaacagaagacactactaagattaataactggatatgaaggacagcatacaccgacacaaacacacatatctgctcgctcagaacttctgg

SEQ ID NO: 416844 - DNA, 541 bp, Homo Sapiens
cactgtggtaatttggactctttaaatgaagtgcccaataaagatttttatttctataacatgctttagctatatttacaattagagattttcttagtttgtgtttattattagaatttccatttaaaaataatttttaacaagccatttatgatttatatgataatatagtttcttttgctgttttaaaaaattctaaaagtaataagatttgcatagtgcctatacttttagattcactgtttttccacacaaagtccatgtttgtatttttcagtaaatatgtattctaaaataaactaggcactttttatttaggcatagtaaaccatgaattcctctttactccatcacttagaattcctatctgaagcatgatagtaggagagccctctcctgataacagtagatctgtactacaagtatgctagtaaggaaccctactaaaacagctattttgaagaataatgtacttcttttgtaagtattaggtatggttaaataatactagtatggaaaagttttcttaatatgatttttt

SEQ ID NO: 416845 - DNA, 788 bp, Homo Sapiens
  misc_feature (651)..(701): n is a, c, g, or t
  misc_feature (734)..(745): n is a, c, g, or t
gggttttcatttttactgtaagaggccaagacttcacttatgtctcctgtggagctgaggctcctgggccttgttattataacaaactctggctccttgtaatgatgcttactagctcaaagccttctccagcattcagtgttagcctttcattgcctggatcttcttacaaagccatagcaagtggttagtgccatttgctccttggtgttgagagatatacctgttaaatgaggcttctttcctttctcattcatagccagcgtggaaaaatcatcaggtagtttgcccagatttgccagagccctaaataaaatggcaaaacgatctccctgcctgcttctcctccccacccccacttacatgcacaccgtaaatcaagaaatgctttttgggcaattagactttatcttctaaatttttgcatagaatggctaagcatgatcttttgcctcactttgtaattcctacaccttccttgtaagcttcaccttttgcttacctaatatttttatttaacatggtttttttaaaaaaccctgagcttttaaaatcatagttcataatttaattttacgctaaaaggaccgaaagaaatttttcccacccccttaaaaagaaacccccctaacttccgccttggccaaggcnnnnnnnnnnnnnnnnnnnnnnnnnnnnnnnnnnnnnnnnnnnnnnnnnnnttttcctttgaaaaaagccctttcccgggggannnnnnnnnnnnggtttggattgggcttggacataaaaaaatttcccctgggcca

SEQ ID NO: 416846 - DNA, 708 bp, Homo Sapiens
  misc_feature (66)..(666): n is a, c, g, or t
ggatttcttgattttggagtctgtcattaattttggggaaatcttggttattgttactgagaggtnnnnnnnnnnnnnnnnnnnnnnnnnnnnnnnnnnnnnnnnnnnnnnnnnnnnnnnnnnnnnnnnnnnnnnnnnnnnnnnnnnnnnnnnnnnnnnnnnnnnnnnnnnnnnnnnnnnnnnnnnnnnnnnnnnnnnnnnnnnnnnnnnnnnnnnnnnnnnnnnnnnnnnnnnnnnnnnnnnnnnnnnnnnnnnnnnnnnnnnnnnnnnnnnnnnnnnnnnnnnnnnnnnnnnnnnnnnnnnnnnnnnnnnnnnnnnnnnnnnnnnnnnnnnnnnnnnnnnnnnnnnnnnnnnnnnnnnnnnnnnnnnnnnnnnnnnnnnnnnnnnnnnnnnnnnnnnnnnnnnnnnnnnnnnnnnnnnnnnnnnnnnnnnnnnnnnnnnnnnnnnnnnnnnnnnnnnnnnnnnnnnnnnnnnnnnnnnnnnnnnnnnnnnnnnnnnnnnnnnnnnnnnnnnnnnnnnnnnnnnnnnnnnnnnnnnnnnnnnnnnnnnnnnnnnnnnnnnnnnnnnnnnnnnnnnnnnnnnnnnnnnnnnnnnnnnnnnnnnnnnnnnnnnnnnnnnnnnnnnnnnnnnnnnnnnnnnnnnnnnnnnnnnnnnnnnnnnnnnnnnccggaagggaacccaatccccgggaaacctttactttcaaat

SEQ ID NO: 416847 - DNA, 862 bp, Homo Sapiens
gggttaacttgagttccaacatgctttgtagatggtcagtcacctacagaggacaatttttctagccaaggagttaaatccaccttaaaatgcttcttgccaaggacaatgcctttgcaaatatttgagatgtttattctcagttgtgatttattactgaatctgtgtcttcatagcgactccttgggaggtgcaggaggaggcagagccagaaagcaagtccctgcaatcagttcattatagagaaagaaaaagcttttatttcaggattctggtggatagacttactgatatgtatattctgtgtctatttaatttcacgtagtgctgcatctaatcacgctgtttaaataatcggacagaatgtccttttgctttgcttttgattgtgaagagcacacagcactgccaccttgttgccaaagtttggtctgatttgaatgtgcttaaaaatcaagtgaaatgcctgttgggaaaaagcttactccttctctttggcagtacttgcaaaacacctgaaaaaaagttacgcatcattgcaccggacttccccgtctttaacattaatccatgagcgctatcttattgcaccaccgcggccacccctccctctgcccgcctttatctcctctaacaacggaaccccactgctacccttcccccaacgcggtccgccgcggccctcacgcctcccagcaccaacccgactcgccgcccaccccagccctccccgcccgcacatctaccagcccagagctccaccccccctccgtcgctcgcgcgaccaacgagaactcgaacccgccgaaacaccgcaggaacccatccctcacagtcgcccacagatccgactaattacatc

SEQ ID NO: 416848 - DNA, 730 bp, Homo Sapiens
  misc_feature (302)..(302): n is a, c, g, or t
  misc_feature (641)..(649): n is a, c, g, or t
actggcctcttttaagatgtttattgtttaagctcttatatttaggtcattggtccattgtgagttcatttttgtatatggtgtggtataggggtccaactttattcatttgcatgtggaaatccaattgtcctagtaccatctgttgaagagactgttctttctccaagtccagtggtaccaatgggcttggtaccattgtcaaaaatttgttgaccatagatgcgtgggtttattcctggattctcattctttttttaaaatatgaaatgcttaataaattgtgcatcatccttgcacancagccatgctaataatctctctgtatcattccagttttggtatatgtgctgccgaagagagcactggactcctcaggccattctattggtctgcatgtctggccataaggatgtcattaccccactgtgcctgactaacggtaaccttttggtagaaaggtttttgaaatttgacaagtccaactcgggccctccccagcttgggtccctctttccaagaatggtttttgggcccctacaaaacccccctgcccatcctccaatgcaatttgcagggattgggccttcccatatcctccgcaacacaacctttgttgggacattttcgcacaaaaacgnnnnnnnnnaatcccctaaacatttgcctttacgcgaagctcctgccaaccttcatccccgactaccgacacttccccctcaatccaccg

SEQ ID NO: 416849 - DNA, 775 bp, Homo Sapiens
ggttattgatgcataccataataaaatttacccttattatgattggaaattgtgggagaaagtataaactcattacattttgtgtaagatacataatatgaaattatctacaaaatcagtttgaacagtaggtgtttaaaatgtattctgagtagtctaagctttattatttgaaatagaattgtttaaaacaatttatattgtaataacaacagatattttagagtttttatggtataggatttattaaattgtctcttgaaatagggaaaataaattcctctttgagttcttgaataattgttctattattttctttggtctcatttataagagagattgtattagcagttggagttctaaggagtagactgcagtggacttttcagggccagtagtgagacaaaataaaatggttttaggaaagccttctaatgttattatgcaaccaaattgtttaaattagggaaaaaatgtaatttattcatggaccccctataaatatctgaacttaaatattttttttcctcccaccttttttatttgcccagtaaccacaatatgggctgggccaccgaaaaccaaaggggtaatctttgggtacatgaaaaccccggaaaaaccccttatgccctcacaaaatcactttggtccagaccacctttaccaaaaattatgaatttggagggtgggccaccaatgagaaaaatttttcttccagaaacaccacttaatggggaatccttttgggcccaaagaatttaaattctaaaaa

SEQ ID NO: 416850 - DNA, 383 bp, Homo Sapiens
ggattttcccttctactgataaagtaaacttagcaggcttgcattcttttatgaactgccagaataaataagaatatgttacagtcagactaaatagtgcgaccagtgataagaaaaaagggcagcactgattatggctgaataattattagaaggcaggcatggcaaagaagcagtggtagaaagtgaagtgtcttcagtcagaaaataaagaaatgatcgaagtaggagtagaattaagaagtccagaatcttagcaacataaagttgaagctgttatatttttttatagtagacttcgtagcagctgctatgggaaatgcctgcaaggccaaagacactgagaagcttcttgcaactcagacagtcttttatgcggggat

SEQ ID NO: 416851 - DNA, 144 bp, Homo Sapiens
gggaaaaacatatttactttgtcttttcatttgactggcttttctctttcatctcatacacctgacagattacccaggtttgcaacagtctcataatctgatcctgtataacctttaaaataaaattctgaagccaaaacccac

SEQ ID NO: 416852 - DNA, 586 bp, Homo Sapiens
  misc_feature (65)..(82): n is a, c, g, or t
ggttcacaaataaaactaatcaccacaggtaaggaagccacaactgttatacagcatgggttagnnnnnnnnnnnnnnnnnnaacttatttttattagattccaattcaactcatctttattaagtacctaatatttgccaggtacttcacagtgtgttttcacatgcatcctgccatttaaatctcataaccattctttttatcagtttttgtaaaatgagaaaaatgatttttgataaggctaagtgatttgcccaaaagtcacaggccttcaacaagagtgaaagttccagaatagggaatccttggattcccggaattcccaaggtcccaatggcccagcctggttcccatttataccccttgtaactttttcccccaaaaattaaaaatttcccgggggaaccttttcattgccaacccccttaaaaagggctttttttaccggggtcccccttttttgggaattctaactccattttttgccctgggggcccctttaaaaaagggttttccccttccaaggggccccttttaacccttcccctttttggaaaaggggtttccggggccccctttacccct

SEQ ID NO: 416853 - DNA, 571 bp, Homo Sapiens
  misc_feature (65)..(87): n is a, c, g, or t
ggaagtgcttactatgtggagggctgtctgctaggtgttaggatgaacaaaagaactgtagtttnnnnnnnnnnnnnnnnnnnnnnngtataatatacactcctgtagtccaagagcataaaatccaattgaagcttgtgtacatacatcaatgagttaaaaagctggtcaagacaacacaagggatggaatgcaaggcggtacttgatttagtgttatttgcctaaagcagactataagtgtgatgacttcaaaggagtgaccagtctcatcgctggccatactgtagtagttgaaagacctatctagacttggaattcatgaaagcattcactctgagccagatgctgcattcacacttcagtcagttaatctgatgcactgcaaaactcattctcaagtcccatatttttgggtgttctccaaaaatttgcctcttgagagttggctttatgtctttgaaacagatgtgtacttctagctgtgcctcaagatgaaatgcaaggtgattgaatgtgacctaaaagacttgccttttctgaatcagtgctggtcgctcatcagacaaatt

SEQ ID NO: 416854 - DNA, 733 bp, Homo Sapiens
  misc_feature (243)..(509): n is a, c, g, or t
ggaagcagtggtatcaacccagagggcccattacggccgggagagagttaagtggcagcagtatgtacaatacattcgtgagatgagggacactagataggaagtggtttgaagtgtctgggtgggagatgatcaggttctgaattagagcagtggaggtggaaagggggtagattggagagatgctagagaggttaacacacagggaaaacagggagaactcctgtcctttgctcatcatgnnnnnnnnnnnnnnnnnnnnnnnnnnnnnnnnnnnnnnnnnnnnnnnnnnnnnnnnnnnnnnnnnnnnnnnnnnnnnnnnnnnnnnnnnnnnnnnnnnnnnnnnnnnnnnnnnnnnnnnnnnnnnnnnnnnnnnnnnnnnnnnnnnnnnnnnnnnnnnnnnnnnnnnnnnnnnnnnnnnnnnnnnnnnnnnnnnnnnnnnnnnnnnnnnnnnnnnnnnnnnnnnnnnnnnnnnnnnnnnnnnnnnnnnnnnnnnnnnnnnnnnnnnnaaatgcagtcatcagaaaacacagaattgcatattcatttgcattactggagagtgctgctctaagaaaaaacccatagggaaataagccccaagaaaaggcagttttgtcctgaacactttggaaccctttctttctacaccctgtacttccctactcgaggaaagttcaaggagaacaattgggccccataaaaaaccccttgggcaacttggtccaacccc

SEQ ID NO: 416855 - DNA, 787 bp, Homo Sapiens
  misc_feature (769)..(769): n is a, c, g, or t
ggagttccccactgtaagtaaaattttctggcaagctcaatactaccatctgatgagaacaatgtagtctgttagctgcctgcaagatgactagtctatactcccaagaaaacacccccttcagaacaatagagaaggaactgttttgcacgtggaccacttaaggtccaatttgaggctggtttggggaaaacatccactcctcctcaaatctatctttagacttaaagtcaacttaaatgtcattgagtttcccaccctgggttaagcactttcacttatctttgcttacactatttttctatctaaacatacatttttaaagcagaaatcctcatttaatctttaaaacagatctgtgattttgaaacactatttaatcaaaattcagaattgtggtagcatttttgctgtttgtaagttaaacaaaatagattgtaagtgtgcaatgccattcattcattcaactaatgtgccaataatttgttttgtgcttcagggattcagaagtggacaagatagacaaagtccccactctcgtggggcttttatcctaatgaaagagatagataagtataaatatacaattacataatactttatatacagaaatatacacacaatcactttttaccctggtatggcaatgcgaaaacatcttccctgatttcttcagctatgtgcaataggctaaactcatgaatctctttgctactgcagtaactaaaatattttttgcattaattttcaccaaagaataatgtttcantgaacttgagagtgcaaa

SEQ ID NO: 416856 - DNA, 850 bp, Homo Sapiens
  misc_feature (820)..(820): n is a, c, g, or t
ggtcagttcttttgagtatatagccagaagtggtattactaaatcttacgatatttctatttttaatttattgaggaaccactgtagtttttcatagcaactgcaccattttacgttctcaccaagagtgcacaagggttccgaggttcccacatcctccccaacacttgttattttctgctttttttagattgcagccatcatagtgggtgtgaggtgacatttcattgtggttttgatttgcatttccctaatgaggagtgatgctgagcatcttttcatatgcttactggtcatttgtatgttgtctttggaaaaatgtctattcaagtcctttgactattttaaaaattgggttattagagttatcgttgttgttgacttgtaggagtttctttctatattctggatattaatcccctatcagatatatgatttgcaaatatcttctcttattccataaggttactttttcactttgttgattgtgttctttgatgtatagaagtttttagttttgaaatagtctaatttatctgtttttacttttgtggtctgtgcttttggtgtcatatccaagaaatccttgccaaatccaacgttataaggtacttttaaggtattttagttgtcttagtctatatttctgtactcaccctttctttatccactcatcacttgatgggcatgtaggttggttccatatctttgcaattccgaattgtgcctgtgatccggtgttctttttagaataaggaatttccctccctttggggtagatacccaagtagtggggatttgccgggatcccaaaggggtntttaaaaaatttttccaatttttcccccac

SEQ ID NO: 416857 - DNA, 266 bp, Homo Sapiens
ctcataaacttttctcttaaagccccactcgcctatacccctctacgcctgatccccggtggcccccttttctgcccgttctatccctctttcccgcagtccccctgcttgttccgcttaaccaagcccgtttccctttcgtaaccctgtcccggtcgctcactgtggccgtttttcccccccttcgttctgtatacttccgctcacctaacccgctggttgcgaataagaagctctgatttgggtcttaccgagatggcttcttt

SEQ ID NO: 416858 - DNA, 901 bp, Homo Sapiens
  misc_feature (158)..(284): n is a, c, g, or t
  misc_feature (863)..(863): n is a, c, g, or t
ggcattccaagattcataagataactactattcatctctcaaatggtatgtcaattgctgcttctttagaaaagaaactcaatcctccctcacaggatgtcttaacccactttgaaggcccatgatctgtacttcttgccagtttttcttatagaaannnnnnnnnnnnnnnnnnnnnnnnnnnnnnnnnnnnnnnnnnnnnnnnnnnnnnnnnnnnnnnnnnnnnnnnnnnnnnnnnnnnnnnnnnnnnnnnnnnnnnnnnnnnnnnnnnnnnnnnnnnnnnngcaacggtgggtagggataatgcagaaaaaaaacttgttcggctgcgcttggcgcctcgaacaaacttctcaaacaccattgcgttttgtttgcccggggccctagtggtgtaaagtgaagacgcgccgattacctgtttccctgagaagaatcctgggaccgggccgtaaatgccgttggaaatttctcaacgaaacacgcaaacaccctcggcggctacctaatacggtttcatcaaaaacaatcctaaaggcgaagttctctgggagaaaccctccccttggacccccgcttcgcgagggcagccgcaagatatagccgttcaaagcttaataatgtaatactcccggtttctcgcgcaattcgccgcgtaaggtagcgccgcgttgtgaatccttatatcgaccctttcgccggtcgcgaatttgcggtaactccttatcccgcgaacgggtcacgtgactcattacactgacgatatacgatcatgtacggcgtttatacccccaccgttgggtacgcaccatttagtccagtagaataaataggtagaggccccgcggaggatgaaaagaagnccaggttgggacgctataacaatagttatctttatgtt

SEQ ID NO: 416859 - DNA, 874 bp, Homo Sapiens
  misc_feature (291)..(394): n is a, c, g, or t
gggaagctctgggtcttcagtccctttccccaatcttaaataaagccaacagaagaccttccattcatctggcttcttcctgccaccatgaagacagctgagaagcagcagagattttaggcacagctgaaccactgcactgccagttcaactaagatccaaagactctagaaatagtgctaccctaggtcccaggtctaatttctcatttcttgccctgggtcagccagagtaatgatcaatctgctaattctaatctgtcagaaggcaatctggtgggatggaagtttnnnnnnnnnnnnnnnnnnnnnnnnnnnnnnnnnnnnnnnnnnnnnnnnnnnnnnnnnnnnnnnnnnnnnnnnnnnnnnnnnnnnnnnnnnnnnnnnnnnnnnnncttgacaaatatttactgagggacaagtacatgccagtcacagaagatttagggtgaaaaaaaattcctcaaaaagctcatttataaaactgagtttattatattctcctcagaaattttgttatgaggataaaaggaactaatagttttatgatgactaggcacattctaattcagtaaatattacttcctcccactagatcaagctctttataaaataataatgatgattatgttaatattaccgttactttcttgaacagagtttaaaaccctgactttatctataacaatggtaaatttattttctttttacaaaacaggtatttcctaagtgaaaaaatttctgatggaaaaaaacatggaagaaaaacctggaagccattttgcgaaagaattttggagctcctccttggcaagccttttgccccatattggagggaagaaaaattttttggggaaagaagcctccttaacata

SEQ ID NO: 416860 - DNA, 843 bp, Homo Sapiens
ggcatctgccatgggcacctcctccagcccgtgcactaagactcaagagagtcgaagaaccagggaatcgttgtaataacaagcattctgaattgcatcgtactgtgtactaggtgggtttaaaagataactcatctcaaatgggttagcgtgaccaatatggcttaatcgtgatgtttaactgatttcatcttgccatggagcctatatccccattgagggtggaagaaaagataacatttttcttagttaaaggtaacaatcttttctggactgaaactatttctttttgaaaaatagagtttctgaatccatcaactcaaaactcagattatttaccagggccatttcctgtttgctgcttcttccaaagtaggtgccctgtggcaagacagatgcgatggcttcctggagtcaggacagggaccacacataatcgaggctgtcacgttttgttgcatgtacctgacctcacgtggtggcacagcttctctcactgggactctgggccaaggcctcagtcctccctgtacctactgctgtggggccagcttagtcactcccctaagcatggccaaggcggaagtcccctctgcagcttgctttgtcccaccttggcattcatgtaggattcaaacaagtccctcacctggcccctgggcttaaactgtccacccacaacaatcttgggctctgaaaatccccttgttttcccaccctcaatgggtttctttgatggggcctcagcctcctcagctacccttccctttagcagggagttattccgggaaaccttcctggtttgcctgggaaaaccccggggggaaaagccatttttctgcc

SEQ ID NO: 416861 - DNA, 855 bp, Homo Sapiens
ggagaatatcctaaagcaataaaacctccactatgtgaactctaagttctgaatatccgaatttttcaaatagttctgagttatatttaatttgttctttactgactagaacacttcctaatttatcacatcatttttaacctcctcaaacatactgaatatatttttttccaggtttattgaggtataattgacaaacaaaaattgtgtatgtaaggtgtacaatgtgatgttttgatatgtgaatacatttgatgattctggcttcccaatatgaagatcacttattgtgtcagccagcataaaacgtaggactgttgagatagagtagaatcatttatgtctgcaatgactgcctccatgctaatatgtctcaattttgttttgtttttagaatttatattttcacatttgctgcatatgatgcagagtaggcttggggaccaggttaccaatttgatatgattgcataaaacaagaatgaaaatgttctgtgtcacggcccttttagtattggtgttatgtcatcagctttgactattataagaattttgtgcttggcttcccgctccatttagatgcatggaacttgggtgcaatttaaagagtatgtcaggtgtagatgtccaacagtctattctccccaaaatccattttaatatgtgaaggataaaaattacatttgattaaatggttctaaattttataaacattttttaattttaaccgaaaaccttaaaggcctggtagactaccattttagaaattcccctttatggagggaatttacctaatatccaaaaatacccaattctccctcccccgagacaggaatttaaaaaagtgcccccctta

SEQ ID NO: 416862 - DNA, 828 bp, Homo Sapiens
  misc_feature (64)..(76): n is a, c, g, or t
  misc_feature (94)..(104): n is a, c, g, or t
  misc_feature (135)..(135): n is a, c, g, or t
  misc_feature (213)..(272): n is a, c, g, or t
  misc_feature (302)..(583): n is a, c, g, or t
  misc_feature (587)..(608): n is a, c, g, or t
accacctccaaaccccaaaaaacatgtttttccctgcctgcccgttcctccccccgcaaccccnnnnnnnnnnnnntttttcacagaggggggnnnnnnnnnnnttttttccacaaaggggaggggagaaaaaanaggggaagaagagagaaggaagagataagccaaaagtaaaggaaaaaatgcccgggaattccgcccttaccgccgggnnnnnnnnnnnnnnnnnnnnnnnnnnnnnnnnnnnnnnnnnnnnnnnnnnnnnnnnnnnnaatcacatctagtggttcaggagtgtctannnnnnnnnnnnnnnnnnnnnnnnnnnnnnnnnnnnnnnnnnnnnnnnnnnnnnnnnnnnnnnnnnnnnnnnnnnnnnnnnnnnnnnnnnnnnnnnnnnnnnnnnnnnnnnnnnnnnnnnnnnnnnnnnnnnnnnnnnnnnnnnnnnnnnnnnnnnnnnnnnnnnnnnnnnnnnnnnnnnnnnnnnnnnnnnnnnnnnnnnnnnnnnnnnnnnnnnnnnnnnnnnnnnnnnnnnnnnnnnnnnnnnnnnnnnnnnnnnnnnnnnnnnnnnnnnnnnnnnnnntgtnnnnnnnnnnnnnnnnnnnnnnttcttgttcggccggcctcgggcccttcgaagaaagcttttcctagaacccatttccgttttggccgcccccggggtcccccaaattagggtaaaaatctggaaaccattgtgggcccactaaaccccctgatctttccccccgtaaggggaaggaaatcccccccggggggggcccaatgtggcacccttcgacgtgttgggccccttttggggggaaa

SEQ ID NO: 416863 - DNA, 708 bp, Homo Sapiens
  misc_feature (159)..(194): n is a, c, g, or t
  misc_feature (222)..(297): n is a, c, g, or t
gggggggcctgaagggggatatttgctgcagggagaattagtgagtatggtagacccacttgatttgttgcctaccaagtatagttggaagaagcaaaaaggagtagtagtcagggatgacttctaggcttttgccttaactttgattcattgtggtcnnnnnnnnnnnnnnnnnnnnnnnnnnnnnnnnnnnnaaaccttttgtagaacaggtctcactcnnnnnnnnnnnnnnnnnnnnnnnnnnnnnnnnnnnnnnnnnnnnnnnnnnnnnnnnnnnnnnnnnnnnnnnnnnnngtgcgagccaccactccaggccttgttttgttttaatgatgaccacaacttgtttgagttttgatggggtggaatataggaagtctaaacagggaacgtaccagaatttaatttaaacacctcgatgctaaagaatagggattggctggcaggatggcttgtggacttcttagattggttcttgactttttcgtaatcagttggatgcatgtagtctacataaaggctttgtgagacactttattacaacaaaagatcatgaaatttgtaccttccgtgtttgattccattgttgtttaatgttagattaagagccctgttagtaaaagatacatgagttcacatgtattcagtgtcaaaatattttatttagtatacactacattttcaagcatggtgttaaatgtttta

SEQ ID NO: 416864 - DNA, 772 bp, Homo Sapiens
gggacctttacacattggaactcctcaggttcaaccttagatcctcttctcccaccctagctgcttaaatcatctcaaccacccatattgccttgcctctatgctgagagctttcagatttatacgacagcccagaatttcctccaatctcctgagccatggcaagtagagctgcggctgtctggcgccactgtaatgctgtctcctcctctgagtgagttcatcctggaaacattttctcccataagacatgcacaggtcttacgtttacatgtttcactgaaagaaatttgattccactgctgggatgacaaggaagactgaagaaacctaatcctaggtgctgccactgggacaaacaagaagcaccagacacagtgctgttttagggtggggcagaattatgctgagggaaaagttattatcactctttaaggccaaggaaaccacaatttttaaagaagcttctagaaattctacccagtagaaaataaagataaacttctgtaaggaattttcttcttttcagaattcgcaatctgaaatgtagaaacccattccttcatggttctcataaatatttaagtgtgactgaaggggtcactggacccatagcactcaagccaggcctcttcctgaagtccttttcctttggccacggaggggattggattcaccaaatccttctaaccccccaaagggcattggttttcctccattcttcaaaacaacagaaaccaaggccactccggttccaattgttattcacaga

SEQ ID NO: 416865 - DNA, 747 bp, Homo Sapiens
  misc_feature (463)..(477): n is a, c, g, or t
ggtggatgcctgcatacttttgcattgttaaaaagacacccacatgaaatcttagccttagaaaaagtagcctactaagtacatacatctttcgttttcttttaacacagatgggaagagagatgcctttttgtgtatattatagacattatattttcttgtaatacttggaggttatatattttaaagtctgcttccattaaaaaaactgaagagcactatgtattctatggtgaaagataagggaactcctccttaaagtttgttgaattaactggcagattttcttgttctggctttatttgaataattgaacagttgaatcatcaatccctattcagagtcatttcttattatttgggattgtccctgactctactgtctgaaacacattaaacagtggtggaagtacagctgaagtgggttgttattgtgattgagctacacagtcccctagtcatannnnnnnnnnnnnnnaccgtttatgcacacttcttatttttgaattatactttaagttctagcatacatgtgcagaacgtgcagttttgctacataggtatacacgtaacatggtggtttgctgcacccatcaacctgtcacctacattaggcatttctcctactgctgtccctcccctacccctccctgccgcaacagaccccagtgtgtgatgtttcccctcactggtgtccatggtgttctcattggttccagctcccacctttatgaagtggaaaacatgc

SEQ ID NO: 416866 - DNA, 841 bp, Homo Sapiens
  misc_feature (411)..(431): n is a, c, g, or t
ggactgagctgtcggagctgctgtggccactgcagtgctcagaagcccaggagtctctttgccagtgctgctgacaacttaacactgctgctgtccaggctgccaagcccaccaccaaaagaagaaacatctctgcactttctccaagcttctaatttttaccccagtgccaagaaatagcagaaccaaactggaagccacctggctagaagtctgggaggagtggtccgcaactgtaaacccccagcactgcagccggtggcctagaaaggcgtgtggagcaaaaagccagcacacagaagtgttaattacacctgttattctgactttgtagtcctttgccatacttgcgaataacctaagtgaatttgatgttactgggaattagtttgcctttattttgccagttgnnnnnnnnnnnnnnnnnnnnnctccatgaaaacatgattcaacacagcgttccgaagtaaaataaattctgggttttgaagttctaagttctatccaccttaatagcctgtgttggggcctgaaacaaagtatattttaattttccccccacaagaagaaacaaggggtggctgtttggctgcttacccccaggcccgggagcggtaactggtttttgaacccattttcctccacctgccaacccctggaaacccctgggggccttagcgggaaatccttcccgtgcttcaggcccctccacggagttttcctggtgaacttgccaggccacaccaaccaccctggatgtatttcatcaggagtattttaaaatatttctttttgttaacaaaaattcgcgggtctttagcttctcccgcgggacacatga

SEQ ID NO: 416867 - DNA, 760 bp, Homo Sapiens
  misc_feature (417)..(457): n is a, c, g, or t
  misc_feature (518)..(552): n is a, c, g, or t
  misc_feature (576)..(629): n is a, c, g, or t
ggattcagtatggataattcagtatggatattcagttttaaaattatcttttttctattgtgtgctcatgtcaattttgtgggagattatttggccatattcagaagggttatttctgggctctctgttctttcatctgtttatctgtctttttgtcagtaccacattgtgtttgttattgctgcttttaatatgtttcaaaatcagaaattataatgcacctttgttctttttcatgggtgtttggctagaggtcataataaaattttaacattttaaacaatatttctttaaaaaactgctgttgggatttttatgaagattatattgaatttgtctaccactgtaagttgtattgacatctttgaaaaactattattttttgattcctgagcaaacatatgttgaagagtgtgnnnnnnnnnnnnnnnnnnnnnnnnnnnnnnnnnnnnnnnnnatagcttaattcagttttggtcagaaaacacagtgtataattttgctcttcttaaatatannnnnnnnnnnnnnnnnnnnnnnnnnnnnnnnnnngagacaggatcttactctgtcaannnnnnnnnnnnnnnnnnnnnnnnnnnnnnnnnnnnnnnnnnnnnnnnnnnnnnggttaaagtgatcttttcctcctcaatgtctcatgtagttggggactacaaacattaaggtaccatgtcctgaataaattcctttggattattttgtagggggatagaagtcctccactatggttggcccc

SEQ ID NO: 416868 - DNA, 949 bp, Homo Sapiens
  misc_feature (368)..(376): n is a, c, g, or t
  misc_feature (757)..(774): n is a, c, g, or t
ggggccaccagtttgtttaagcattgtgaatgctttttaatagcattcattagcattaatggaggaggacactgtgttttctcaattaatctcattgatttgtttggtataagtttgggtcagaaatgaaactgccaaaacatcgatcagtacaaggaagggacacaggtgcttaaaatgtccacagtcttggcagtggacttggcagttctcccagtaagcagaagtacttgagcttaattccgaacttcaaagtaatattttatcgctaccccttgtatctacccctcccatcccccaaactctggtcgacccgcacccctctacgcggttcctccattattccatccccttttcctctccgtcannnnnnnnnaagtttcgccctttctcacagaatgaacctatgtcgcttttgcgtctcctcctctctctagtggtctcgcttatacctttcgcatttccgtcgtccttcccaccaacccttttggcgtctctatcccctcctgtactcatagcgggggccgcgcccctgtaaccggttcgcttcagttctgcaatacccgcgcgtagattacgacgcggctcccttccgtccaaccctaccaccgagcccacaacctgtaatactttccggcaccggtcccgcgccgcgcgctccctttccttattcgccccgccccacccccctccgatactaactcaatcgccttgcccctcattgccgtgatctcatcccgctacccactctcgatannnnnnnnnnnnnnnnnngccttaactcatcctacccgctttctttccgcgcatccctaccgctctcactgcttgaggcacataaccttgttcgtcttctcgctttatcgcctctagccagctccctcgccgggatgggtctcgacgtggcgcgtagcgggtactctttcactggcggggtctgcatcactcc

SEQ ID NO: 416869 - DNA, 410 bp, Homo Sapiens
  misc_feature (212)..(220): n is a, c, g, or t
ggcatttaatcatatatagaagagttcatttctgtgccgtattctgttctgttatctgtttttctgtctttgtgtcagtaccacattgtttttgttattgtagcttttaatatgttttgaaatcaggaagtataatgcctcctctttttcgtgagtgcttggctagttatagttcataatcaaatttaaaaattttaagcaatagttctgtnnnnnnnnntcctgtgctattgggatttttatagaaattatattgaatttgttcacaatgtaggttgtattgacatcttaataaaattaaattatttgatccttgacccctcccccaaaaaaaggaattaaatgaataaattgtagctgggaaccatattctttttgtgggaagagggaaatacaaatataaattgagg

SEQ ID NO: 416870 - DNA, 829 bp, Homo Sapiens
  misc_feature (649)..(657): n is a, c, g, or t
ggctggatgggttttgttatagcaattaattaggtttcacaaacaacttaggtggaaaatgatgacagaatattacagaaaaaaataatcaacaccctttgctttttattaagtgtgacatgttctaacaaaaccctcggtttattccttgggattaggttttcccttcctctccagtgtcccaaagatagaatttcttgcaaaccctgaagggagtcattgcctccaacaggaggcaacttgcacagactccgggatatttaagtgaccaataagaggctgggtcagctcccctgaggcaggtagctgtccctgagggggtagcatagagcacagaacacggcagagtctgtaggctcaacttgagcaaatttgacctcagacaaattgctttccctctctgaacttcatttcctcctgggtaagagtgggggaacagaagcagccgcattatgaaatacggtgagaaattcatgacggaacatatatatcacttagcactgtttcctggcacaaaccaaatgcttcaataaaatgttaggctcctgggtttatgttaaaaggaattttaattaccggaaacttcataaaaaacggtcactttgattagaaggggtagccctaggggggccatttaactcaattggcnnnnnnnnnagggtggaggactaaattttcccttccaagtcctccaccctgggtaccttgtggtggaaaaactaacacttttccccaattttttctacactggtttttccccctaaatagaaatagccctccaagttaaaacaaaaaagcaacctggttcgaataaatatttctctcccaa

SEQ ID NO: 416871 - DNA, 542 bp, Homo Sapiens
  misc_feature (282)..(290): n is a, c, g, or t
  misc_feature (482)..(490): n is a, c, g, or t
aacctacttcacctatttcagaagtagaggggtcaaatgaagcaaatgggacataattgaagtgcacgtcttcctgggccgttttttggataattcaaacaatccctgcatcatctggaattttccaatgttcctttagcctttttctggatggtatgtcaggcctgtaacagagagctcacatactgagttccatctttggaacctataaaccatgcagaatgtctcccaagcactgcatttaagccacacttctacgagttttttgtctccctcccctgnnnnnnnnngttggaaagctggaaatgtgaaaactgggaggaatcctacaggtcaattagcccaacttccaatttagtaaatgaggaaactaacgccccagaagtagctacctttacctaacatccagtaatttagggagcagaatatttacaaccctcttttaatttacccgcttccaacatccttttctggttttgctnnnnnnnnntagggctaatgtaatttcaacgcttttttttatttccttgcccccattgggg

SEQ ID NO: 416872 - DNA, 638 bp, Homo Sapiens
  misc_feature (584)..(584): n is a, c, g, or t
actaagtaaacaatacatgtggtttaaaatgagatgagctaaataaatgactaatcctataaatttcaaacatttggggaaaaagctctagaaattttaggtaattctaaagaatcatttcgtagaggtacctgaataacttattcttggcacctatattttgcctttttacgagaaagtaagacagttaaatagcttagatttaaaggataagtgatttttttaagatcattcatgaaataacctccagttttataatcagtttgtgtcttcacttgacatatgctattataggataaatttataaaaaatatactgttattatttgtgtttagtaatagaaattgaagacaagtgtggcaaaacctggaatgtttctattaaagtaagagcacttgagatacatttctagaagatccattaacaaattcctcatgtagtacctagaagtaaattggcagccagaaaagtgataaaacagtgcttgggagattgtgcagctatttgtagctctgtgttttccttatgatttaaaagtttatatttttgctgtcaaggtaaatatgggaaagactggttacacnatattgggcatcctctgggtggttttcctggcaatatataatttctggggacaa

SEQ ID NO: 416873 - DNA, 703 bp, Homo Sapiens
ggggaaaatttatagaaatcatctagtcttacccttcatcttacatataagaaaaatggtcttttcttctaatcacattcacaaaatatgatataaaccttgaccatgaatgtatgagcctaattagagaaacagaaaatcagcatgtcagttttccttcattcaaaataacatagtctttctaagcagtcattctggagttaacatgcctagttcagagccgctgtggatgctcaaatcatttctggaattgccttcaggacacaattatgagaaagtcagacttccaatattttgatcatgccttgtgttttcctacgtgtccttatcccactggattgtgtctcttactcccaagacttattccaaatgattttttgactcttttcattaatcaaattcaccccaaaccagaaagttttgccattagcgtagatattaaaaatattactggctgggaaagcactcctcaaagcagaggttctaaattaatttatctgttcttttaccatttgctcactcactcactcatggacccattcaatcatagaatatttaagatttatatgcccagaattataatagtggcctaggcccttgataattaagtgaattttgtactttggggtggaatgtggtaagtgttccaaaaggtaaactatttattggaaggaagaaaaataatccgaattttaaataatgt

SEQ ID NO: 416874 - DNA, 643 bp, Homo Sapiens
  misc_feature (70)..(160): n is a, c, g, or t
  misc_feature (281)..(366): n is a, c, g, or t
  misc_feature (568)..(579): n is a, c, g, or t
ctcacccttttataaccccttttttttctgtccatttattttcgttcgggccggcacggttggtggtggnnnnnnnnnnnnnnnnnnnnnnnnnnnnnnnnnnnnnnnnnnnnnnnnnnnnnnnnnnnnnnnnnnnnnnnnnnnnnnnnnnnnnnnnnnnatgtgatttcttataaaaataataagacatttatcttctattcgggatttttgttatgcagacatcacataaaatttattgtttttttctcactaatttgacacgacttttatcggagacnnnnnnnnnnnnnnnnnnnnnnnnnnnnnnnnnnnnnnnnnnnnnnnnnnnnnnnnnnnnnnnnnnnnnnnnnnnnnnnnnnnnnnaaaattatacgcttttattgtttatctattcgtcgacttgttgttcctctcttttatttctaagttacatcattattatatcttctgctcaccgctacatataatcaatagatcttattatattttagaacatttgctaagaacaagtcttggcgatctctctctacgccgttatattatgtatcctccctagacgttgtannnnnnnnnnnnatatgacagcggcagaagtctcttacttctgatggttgccgctttatgatccttgatactatat

SEQ ID NO: 416875 - DNA, 759 bp, Homo Sapiens
  misc_feature (356)..(364): n is a, c, g, or t
  misc_feature (391)..(399): n is a, c, g, or t
gggtggtaggttagatttgagaaatggttaggattgttctgttggataagtgcagacacctgcccagggaagcagctctttttttgtaagagttttcttggttactgaaatcaaatgggggaccagtttgttataggagacatctgtggccagcaaatctgaacagcttcctagagggaaagtacctcttttaaactaagttattatagacagtgaatgaatcctaccccttaaaagagatgaccggcggggtaagtgccaaagtaaaaaccctccttgctctaggcctcttgggggagaataattggtaatgaaaagccagccgtttaactttccctttgtttggttggccattnnnnnnnnnaaaaaatatccgtaaaatgcccttggnnnnnnnnngggccaaagggttttgcgccttttctctcccctttcccccttttcccggaaaaaagcccctggtggtggggggccaaagggctcccccaacctttccccagaatttgttaaaacaaccccgcggggcccctttgtgtgtcccccaccaaaatatttcccccaatctcccgggggttttttttctccccgcccgggggcgcctctttttttgagggggaggttttatttatacaacaaaagaatctcctatttccgggggtggtgtttatacccccactagtgggggggcggggtatttatttttgtctcccgcctgtcttcgagggggggaggatatactgtctttcttctcaccgatag

SEQ ID NO: 416876 - DNA, 1073 bp, Homo Sapiens
  misc_feature (193)..(252): n is a, c, g, or t
  misc_feature (959)..(959): n is a, c, g, or t
  misc_feature (990)..(990): n is a, c, g, or t
gggggcacctacgtaaacacacatgtgatgctcatgtaaacaaacatccatgcacacactgccacccaggtacacacacccgagaatgtgtgtgtccctgtacgtgaacccgagtgtgcccacgtacacgtacccaactgtcctcatgtacacgtacccgagtgtgctcatgtacacgtacccgagtgtgccnnnnnnnnnnnnnnnnnnnnnnnnnnnnnnnnnnnnnnnnnnnnnnnnnnnnnnnnnnnncttgagtttgtgcccatgtacgtgtaccccagtgtgtgtacgtgcctgagtgtgtgtacgtatcccaacaccccgcccgttggtccgaatgctgataactgtgcctccgctggccgctgatctcctccgaaagcagacagggtccccgaatatatcgtgtggcgtgcagcatcgactcagctggcacaatacggacgcgaagccgcaccctcgttcgtcgatgctaaatgtgtataccacctctttcctacccaccctaaacacccgttctcgagcgcaccgaaccacgaaaatcatcacgtccgctcacagacttctagcgctacttcgacatgtatctgctccaacgtctagaccccgacgatcctcacgtgacccatattctatacactaaactattcattacagtttatcatcttaatagcgctcacgtcgccagcatcaacaccgcgatactgccacggttccgagacagacgcgacgtggcttgcactaatgcgcctgtgctatatctatgaatataccgcgtacatctgtcggtctgtcttgaggtagcaatgctcgtatgagcacatattcagagctctgcagcacacgacaaagactcctacacgcctctctcaagagatagacatacctcacgctcgggggcaagtgaggcgtgcggtgagagcaggtgtcacatcttccatagactggatatcatntctgagctgatcaacaactctaaagtccctncactcccgcctatacctctcgagatccacatcttgaccaaatcacacaactctgtgagaattctgcagcctcgtctatggttc

SEQ ID NO: 416877 - DNA, 1136 bp, Homo Sapiens
  misc_feature (58)..(105): n is a, c, g, or t
  misc_feature (605)..(605): n is a, c, g, or t
  misc_feature (731)..(731): n is a, c, g, or t
  misc_feature (829)..(829): n is a, c, g, or t
  misc_feature (910)..(921): n is a, c, g, or t
ggggcctacgtcagaatctggagtcagctggagtgtgccagcagcaagatggcccttnnnnnnnnnnnnnnnnnnnnnnnnnnnnnnnnnnnnnnnnnnnnnnnntcattaatgatgtcagaagtgtaaaactaaaggcagaagactgttgttttccagattgctcccccactaggcttggcgacccttgaaggcagaggacctttctgagttatctttgtaccctgccatagtcctggcacaaaataacacctaagtcattcatttaggcaaatttcttaaaacaatattcctggtcttggcacaattcagccaagtacttaaatcaaggtaacactaagtggaaatgacgttctttagaaaaccggggggcttggctcccgggcaccccctggccggggaatggccaagtgggggggccaaacccataaagccggcacaacccaatgaagaccttcccgcagaggtcttgaaagggggaagttccccgtcccctcgccctctacgttattccttgtgtgcagaacaatacgccacgcgggggtaaactcacacggcagggcactatttagttaccggtcaccacgcaccacaagaaagaccgncctcagggactcctccacaggtgtttagcagggaacatcatttatagtgaaggtgttgccccccgctgatgattatatccaaaactaaaacatcccttaaaggggacgggagaagcggctccccgntgggcggctattttatatattaaggtatgttccgtatcaaaaaagggggccactcggaggaaatctccatccgcgacgataccgacccccctccgtgntcaccctccccactcacacaatcacgcacaaggagcccctctctctacccgcccacatttccacgaggcggcccacgcctnnnnnnnnnnnntaaaatatgcgacgccctcgcttgagaatgagggtctcatccgaaggcccgcccctcggttgggaggcccagcgctccctgaggtcttctctagtaaggccttcatataacgagacgcaaccccctcctttgtctctgttataggtgcgggagcaccgcctgatgtagtactgtatgtatgcgcctccccaacagatgagttgtcataacaaaaa

SEQ ID NO: 416878 - DNA, 669 bp, Homo Sapiens
  misc_feature (172)..(203): n is a, c, g, or t
  misc_feature (410)..(410): n is a, c, g, or t
  misc_feature (412)..(412): n is a, c, g, or t
  misc_feature (414)..(414): n is a, c, g, or t
gtttaactcaatgtggcagatattttttcttagaagggttatggttttaattcttacattgaagtctgcaatccaatttgagttaatttttgtgtacagtgtgaggtgaaggtcagagttcatttttaaatatgaatatccagatttttcagcaccatgtgttgaaaagacnnnnnnnnnnnnnnnnnnnnnnnnnnnnnnnncctggagaactaccttggcacctttgtcaagtatcaactgaccgtatatgtgtgggtctacacctagattctctgttctgttccactgatctaaatgtctgtccttacatcaataccacacattcttgattatgtttaaataacaaagcacttcatatacgtgtgcttatacaggcaacagtatacttccattaacccccccaaaantntnctccaatccccacaatttcgccttttattatccaatacactctacctcaatactcttgttcgccccccttcggccctctaagaaattattctaacaccttttcttttggcacccggggccccctttcgggccctcccaccttcccccataacattcttttccaaagaaaactcctttggtccactaccaccgccctcggggatttccctccccaaataacgactagcccgcggtggtcaaccaaaagatatcttc

SEQ ID NO: 416879 - DNA, 333 bp, Homo Sapiens
  misc_feature (138)..(138): n is a, c, g, or t
  misc_feature (143)..(168): n is a, c, g, or t
  misc_feature (193)..(223): n is a, c, g, or t
aactgaatattaatgttctatttcttaggcctgtgttataaaaatggataagtactgcatatatttttaaaatgctacctaagccaattttggaccttttttaatggaaaaatttaccattaaaaaattttaagattnccacnnnnnnnnnnnnnnnnnnnnnnnnnntttttggggccccccttggcccctnnnnnnnnnnnnnnnnnnnnnnnnnnnnnnngggccccgggcccccccttgggaaaaagggaacaaggggcccaaacaggtttttccccaaagaaaaaaccccgggacaaaacaaaaaaggggtgggggatttctcccccc

SEQ ID NO: 416880 - DNA, 771 bp, Homo Sapiens
  misc_feature (615)..(629): n is a, c, g, or t
ggggtgggtggttagaaatacatgtcaggaatttaggagagaagtcaaatattttaggagatacatgtttgagagtcatctgctcctaggtggtaattgacattctgaaagtagctgagattacccagagaaagaggtaagagaaggtgaacaaagacagcaagatcctggtaaacaccctatttaacagttgagcagaggaagaggagttattaaagggtctgcattagcgtcccattgctgctgtcgccaattaccacaaacagtggcttaaagcaacacaaatttattgtcttacagttctggatgagagaagtccaaaatgggtctcactaggctaaaatcaaggtgttggcagggctgagttcttttctagaggctctagggaataatcctttgctttttctagtttctacaggctgtctgcattctttggctcaaggtcccccttccaaccagtggtcttatcactccaacccctgcttccacagtcacatctccttttacaactcttttctcctgccttccctttttcacttataaggaccccctgtgattacattgggtaccaccccagataatcccagtatgatccccccatctcaaaatcctcannnnnnnnnnnnnnnaagacagaagtctccctctgttgcccaagccttggaatggcatgggcacaatctcgggctcattggcaaccctctgccttccctgggcccaggcaaattcctcaatgtctcaaccctccccaggtagcctggggccttacca

SEQ ID NO: 416881 - DNA, 924 bp, Homo Sapiens
  misc_feature (58)..(134): n is a, c, g, or t
  misc_feature (690)..(690): n is a, c, g, or t
ggatagtcaccttgtaagtacttcctttttacttgactatttccatacagtgaattannnnnnnnnnnnnnnnnnnnnnnnnnnnnnnnnnnnnnnnnnnnnnnnnnnnnnnnnnnnnnnnnnnnnnnnnnnnnttatataaaatggtatgtatttacatataacttacatacctcttcccatgtactttaaatcatctctacttattatactgaacacactggaaatgctatcgacgtacttgttacactatactggcttgtattcatatttatgtatccatttttgagaccgattctgcctctcgttgcccagagggatactgcaacggtatccctgtaaacccttacgctcccggagtttaagtcgtttttcccgcccctacccccccctctagtccccagggcatttcctggccgtgagccaacccccaaacttggctaaccggataaagcctaacagatgggaaaatggaacgccctacaccatgcataggttcgcggatggggggtcggcctttccgttattcttgccgggtgtttccccgccaacccccgggatttcgtcccgccgcttcgcccggcgccccgtctcctatattccgtttccccctctttgttcccgtgtaatcccacgcaatttccccgctattccccccgtattgttttccgcccgctattgttgtccctntatttccgggcgtttcccccctattccttttatggcgtaaatcctttttgcgcttttcgcctacaccttgctctgttatctcccgctttcacggcgcgtggcgccgttatttcgccccccgctgtgcgttacctcttactccacccgactcggagttgtcgcgcatacgttatcacgttcgtacgcaatcttagttgttctgcgctattgtttcctgtctaacagcttgttttt

SEQ ID NO: 416882 - DNA, 1053 bp, Homo Sapiens
  misc_feature (129)..(190): n is a, c, g, or t
  misc_feature (646)..(654): n is a, c, g, or t
  misc_feature (832)..(832): n is a, c, g, or t
  misc_feature (912)..(912): n is a, c, g, or t
  misc_feature (1017)..(1017): n is a, c, g, or t
ggaagcactggtatcaacgcagagtgcccattacggccggggaggagcgccgagccagcggcgcgagcgtgactgagggctagccgcacgggcggcggcgcctcccgcgggtccttcagccgctcggcnnnnnnnnnnnnnnnnnnnnnnnnnnnnnnnnnnnnnnnnnnnnnnnnnnnnnnnnnnnnnngcgggggcagcgcgtggctgaaactctttatacccaattatctattttccgcggccgaaattactcacgacgggatcgtctacctaagcggaatccctcatcgtttattaactacctatatcgcaaatccttttcgttccccttcattattttccccccgcgtcccctaccgccaaaatttaacccgcgatggtacgatagctgcaagaagcaagcatattttccgacccgctatagcgttgcttgtctttttcctaccccggctccgcccgtactcctcgacctcccgctttccgtattttaccccgcgccgcccctcctaacacatattcccccacgtttagtaccgtttagcatgcgccgatttactttctataccgcgactttccgccattcaaagtatcgcttgttagcgccgtcttttgcgccgtggtggtttatcccccccgcacgtgnnnnnnnnnataacctcgcctacgttgctataaatccgctatattcaaccccttttttattgtcaattctggcttaatccggggtgcctaaggtgtggaatgcgccggtgcggatctaattagcgccgtcctcccaaggccagttacaccctcgtacgtatcggcgcgctaagcccccggcgataanaggtctccccatgtatatatgccccgcattttacgcggtgcgcgcgtatcgcgtacgcgttatggcgcgacgcctaaatntggagcgcatatatacgataagcgcaccgcatcatcgtattacacccaccggcgcacattgtcgcgttaataccgcgcgtatatcggcataccctaccttcgttntgttgtgtgagcagtgagccacgccgcggatgatgg

SEQ ID NO: 416883 - DNA, 430 bp, Homo Sapiens
  misc_feature (221)..(316): n is a, c, g, or t
ggaagttataaatactggatataaaaagtataagaattggaacaaagaacataatgagtggactgaataacaaattaggtacagttgatgaacaattagtaagtataacaatttaaggtactgtctcagattgcattaggagagaatagagcaatagaaaatagtaagagaaaaagttaaaggagatagaagatcaaagtagaaatgtcaatgcctttatnnnnnnnnnnnnnnnnnnnnnnnnnnnnnnnnnnnnnnnnnnnnnnnnnnnnnnnnnnnnnnnnnnnnnnnnnnnnnnnnnnnnnnnnnnnnnnnnccccttagatttaaaaaggtaatagagaatggagaatagtcattaattttaaaagacctaaaagatatataagccaaatacaatgttttgatcatgtttttaatcctattttgg

SEQ ID NO: 416884 - DNA, 793 bp, Homo Sapiens
ggccaaagttatatttttgaaaaatagctctttgccttaatagtgagggaaaaaacaaggttaccaactccagtagacttagattggacttatatttttttcagtgaagttaatttcatcttactctttttaatgtaaattgagtctggcaagcataaaggtttgttttatgctactttaaaggcagtgcagctcagtggaaatagcataaagtcggaggaacacctgaattcaagttctaagtgtaacttactagatcctaggctatgttctttctgaatttctcatctttacaatgtggatggtgataccccatggaaggtctagaaggattagagcatctcgtttagccgctgacaaaattgttggaattattacttaaaacagctccttgtgggtttgccctctggaaagcccacaaccttttagggcttctgctgatccgagtaaattgctcaaacacatttgggagtatacactgaccaaaaccgccttgtgctaatacaatcgtcggggagactgtgggcaggacaccgcaagggagtaaaagggaatagggccgccgcgaagaaaccacggggggctcaaggcggcagcccctgcggggcaacggccaccccgacgtgcgaacacgtgcccgcgcagtagctatacagaaaaacggggggggcggtggaaaaggagcaaaggggggactcatgggtaaagtgcacaaaatgctagtagggtggcctgaccgtgaatattggagtgggcaatagcgtggctgggcggaactgtggcaggacccacc

SEQ ID NO: 416885 - DNA, 667 bp, Homo Sapiens
  misc_feature (587)..(627): n is a, c, g, or t
ggatagttaccacgtaggactggctgtcagtcctgacatcgtcatatctgtaggacacagtgtgcttcagtggttcccttcccttcagggttgttctgtttctatatgtcattcagtgttggggtctgacctttccataaagttgaagggattaaagaatcccctaattcctatatacctctctgtactgcttgatatgctctgatcatagcatctcaactgtgagatacagaagttggtttctgatgtgctattaaacagaatcattttgcagtattctttattctcatcatgtaaacataagtttcaaatttaacgtcacttaactctaccaaatacagagtgccagatagcagaggcttgtatggtctaggcccctaaattttcactaatgatgtctcgcacatatccttgagggatagggacagaatggcagaaaataagggagcctggtcctttgaaatcccaaagatttaagaaccaggaaaatgcccactggtatttccaggaattgaaaaaactccccccgaaaagaaaaccggggtccataatttttgggtacaccctttttgttttccctcaaaagnnnnnnnnnnnnnnnnnnnnnnnnnnnnnnnnnnnnnnnnnggaagggttttaaaaaaaggggggggttacacaaaagggt

SEQ ID NO: 416886 - DNA, 396 bp, Homo Sapiens
ggcttaaagctaaatttagctaatctaaaggattatattaaaattcttctctacttttattagtgtaaaaatgcttggcttctatcttttacatttaactggaactataaaatttgaaagcctggcaacttctcttttaaataatgccttttgccaagaatgggttatcattttggaggaccactgaatgaaaatacttagttgtatcttcaccaattttttgaatccttataattagggcttagatttttgaggttcaaagagttagaatgtctaccttttctgctttctagatgagaaataaggaacatcttattgaaattacacagtgaatttggttgaaagtaaatttaaaaatgagcaaagaattaaagaatttgaaataaaattttaagt

SEQ ID NO: 416887 - DNA, 803 bp, Homo Sapiens
  misc_feature (659)..(668): n is a, c, g, or t
  misc_feature (789)..(789): n is a, c, g, or t
ggtgtggctttaggaaaataccaccagctagtacttacctatttaaagatgtagaatttattatcctctaatattcttatcagttgtttccacaactttagtttactattggactttcaaaaatttaaagaattacaagtaaaattcattaaacacttgtgtgtgaatagtaatacacagtaattagtacagcatgttgcttcttcaacaaattgagttttcagggaaatcagcaagtaaatgaaatataaatttttggtaaaagtatcaaacattcatcttgcccatttttcctcttaaactttattatctaatcaaacatagttttccataagatgtaataaaatatagataaggttggaatatttgaggatccatttgtggaactgaatttaatgagacttcattggtgatacactcaatttttactgggtaattagctaataatgttggtcactgtctcacagttcaagtagctttaagatgatgtggcaagggaaaaccaaagcttttgggtaaccagcgttcttaaatgtatggtttttgaccaggtgaacccctttaaaaatgatttctggttttaaaatgatggtctttaaaatacccttttggccgtgatgcaaggtttatttccagtcagaattaccaaaaatcccaannnnnnnnnngacctgatcaatttggtacaatgcctcaaagtgaatgacaattgaatctttgggcggcccccgcagcgagaggtgggatttttctttaaaggtttttcccacgttactgttttcacttcantcctcccggcccgc

SEQ ID NO: 416888 - DNA, 778 bp, Homo Sapiens
  misc_feature (139)..(147): n is a, c, g, or t
  misc_feature (360)..(435): n is a, c, g, or t
  misc_feature (464)..(464): n is a, c, g, or t
cttttattttcacttgctgccccgtcccttatacccggtctatacaccattctaacttccttattccacccttcttttttaccctttcttcctattttacacacatctatatatattttatatatcaggtcggcgaggnnnnnnnnntttaattatctgtccatttctccttgattcctccctcgtccccacccactaccgcctcttttggtcgcttctctccatttaatctcaagttgtagtataattttatatcgacaacctcccacctctaatttactacctctcctctttatatatcccccccaccactataaccttctaatatatataatcacccataataccacatctttggannnnnnnnnnnnnnnnnnnnnnnnnnnnnnnnnnnnnnnnnnnnnnnnnnnnnnnnnnnnnnnnnnnnnnnnnnnnacccgttcccctctcccatatttctatgnacctttattatgtttttgcacgacaacattttaccgtggcgacctgccctagtcatgttatgtagtttctttatattacatcaggcgaatgcgccgcccgcccatctttaatctataacaccttttgcttctacttacaatgcagcgtcgctattatatatgtttccacatccgcatttatccagtttgcgctgtcaacggctgccatctctggataggctgtacttctctctgtcggcatacaattcagcccatgtcgctctacctttctactgactcgcgcactgttattcctgcctgtctcgctaatactt

SEQ ID NO: 416889 - DNA, 799 bp, Homo Sapiens
ggttctggtacaagattcttcccaaaggcaatcaacattgtgcatttccttgtggacacatttcatagtatgagttgagatttgagctctgcaccatatgtaagctcacagagacctgcacagattctttgctcctatttctgtaagttttgcagttgagaagaaaggagcaagcttatattagctgaagccatggtgcctatcttcaaatttcccttgccaacctaaaataaaacttagccagaagactgggtgctcctccctaatataaatgatagtttttaatagcatttacagttgaataagaactatctttgggtcaacatttattgcacgtctagtcttccatttaaaatattattggaggaatggagcagtaactagtagagtaagttaatgaggaactgctctgttttgacccaaatctatattgaaacatttggctagagacaagtggagacagcctgggtgtttttaatggttttctgctcttattgcttctcacactttacctacctcccatttctgaatttgtgtaccagaaagcaacatggggggctgagttggccctaaggtaattgttactttttttggggcctaaatccttaaaaagggtttccataggaaaacgggatttttaaataaagaaaattttaatcattttcaccaagggtttccctaaaaaagcccctaaaatggaatggccaaagggggtcttttcccttcacagaattttaaatggtccaagggaatggaatttggccaaattcagattttaaaaaacaccaaaacttacccc

SEQ ID NO: 416890 - DNA, 1034 bp, Homo Sapiens
  misc_feature (138)..(163): n is a, c, g, or t
  misc_feature (697)..(697): n is a, c, g, or t
  misc_feature (700)..(700): n is a, c, g, or t
  misc_feature (708)..(708): n is a, c, g, or t
gggaagcatctggaaaaattacatctgggtggttttgtgactgactgaatggctctctggttaagctgtgttaagatatctgtgtctcttttacggtgatttatttggccgtttttggccaatgacagggtgttagcnnnnnnnnnnnnnnnnnnnnnnnnnnaagacaattcactcagagctttgagcctgataattatagcatgagaattggtgcctgaagctggggggaaggtaacccaggccccacacaaaggtggttgcatgctagtgtctaaagttttccttgacaatctccctttcaggactccgacgtctacacaatatgcccaccggataggacccacaaccacctcctcccctttggttcaacctcggtccaacatccttgcccactgccacattcattctactgatcagttgttccacgcctcgctgcctaaatagctaccgctgcacttccacccccagtctacgccttcactcgccaccactcaaacccagacaatacgccgcaatcactcacccgtgctacgcgcagagcaaatacccccgggccggcccggcgcaatcagtatccccctcctctcttcccatgcgctcccttctcgcttctgccccctcgcccctctgcttcgacgtctttctccccatctccctttcgctctccacagctgcccctgtaacgtttatacangcngcgtcctntgtccccgtcgatctacggtgctgtacgcgcttacttctgactctgcgctagcgagcaccctacttcgtctctctatcttcttcccccgcagtcgcccggatcttgccttacccgcgccgacatctcacacactgcccgcgccagctccccgcctccatggtcccccctgcgatcgcctacccatccactctcactcgctcgctcgtcttcccgtcataatacagcctccccatctgcctcatcaccccctcctctattcacatctctgtcctcgacggcttgcctctcttcatcgcttccgttaaagcctgcactcgcgcgttac

SEQ ID NO: 416891 - DNA, 737 bp, Homo Sapiens
ggatgtcccctctagacagtgccatatgcaaggaacacgtatcattcatttctgtgtcctttgcagagaacctgagcacctagtgggtgctgaataaggtttcctgaatgaataatgtaattgtttgttaagtcaggaggatactgaagcctgaacatcaatctgctaacacaagtcttgtcagagaccacagcttcatatttatgcatccagcaacactatgattctccagtgagagaaagacaccagcttaggaaaacaggtatccaagtctctatcgaggacaatcaatcccggtggctcccaaaatgtgaaatgccagaagcacagtaagcacttaatatagcgaaagcccatgctgacagagatgccgagaggatgtttgcagtcatccctgccaacacacagataaagcaggcgctttaatagaagacattcaggatcccccaagcacaattccctatattccctccccagccagtattttaccagagttgacagtgagtgccaaaaatggctggcttaggttttggcaacttgctctcgaggaagaaaggcagcacccctgaccacaccacccacttccctcaggcagatgcctcataatccggaaaggaacagagagaaagtgcagtgagagagctggctgtagaaaacacagaccgaaagcaccttctttgaaaggggtaaaatgtaaaaaagcaaatgtactttaaaaagaagaaattttcaagcat

SEQ ID NO: 416892 - DNA, 419 bp, Homo Sapiens
  misc_feature (131)..(150): n is a, c, g, or t
  misc_feature (246)..(255): n is a, c, g, or t
ccttggcggccccccaccgcccctccaaaaacttttctaaacctttgttctgggcccggggccccatagggaaaggaaacggggccataccttttcccaaggaaacccgggccagaacaagggctgggttnnnnnnnnnnnnnnnnnnnnggggggcaccagagggttcggaaaattcccaaagggattttgaaggcctttccgggctttacaaacggggtcccaggggggcttgatacaaatttnnnnnnnnnngggccactctcggcggtagtgggtgattttcctttagccttctcgcctcgagggggagccttccaataatgggcaggattaaacctctaattccctggcgggcgatactcacctttgtacctctgtgagaaatttttttgccccctgggacaaaaccggggggg

SEQ ID NO: 416893 - DNA, 601 bp, Homo Sapiens
  misc_feature (337)..(536): n is a, c, g, or t
gtttagggttggaagtgtttgccacttatttcctttgtctcctgtcctctttccctgtttcaacctcaaatcacccttctctccctggtgagaacgcctgaccaggggcatagagtgtggtgagcaacagtttccaggaaacaagttactctgaaaattgacacctgtttctctcagttgttgtgcactggccacgtgaagctgagggcataggccctccagacccgcccctaatatttgcagagctgggagcaaaagtacaaatggagtcttatatgtcatatgtctagaaaattttaagtcatgagtcaaattaacagattgcatttagatagannnnnnnnnnnnnnnnnnnnnnnnnnnnnnnnnnnnnnnnnnnnnnnnnnnnnnnnnnnnnnnnnnnnnnnnnnnnnnnnnnnnnnnnnnnnnnnnnnnnnnnnnnnnnnnnnnnnnnnnnnnnnnnnnnnnnnnnnnnnnnnnnnnnnnnnnnnnnnnnnnnnnnnnnnnnnnnnnnnnnnnnnnnnnnnnnnnnnnnngagtactctttttcatattgtctcctactctgacaaagacatcttcatagggacctgggaaaacc

SEQ ID NO: 416894 - DNA, 719 bp, Homo Sapiens
ggaattaaaaatttttccaattgaatttttttctgccaataattgggcttaggtgtttctccaccaggtaccatttctactcattatatagaaaataacaagtcttgaaatatcgccatagctatttaaagaaattggaggcattgcagtctagttttatggtagaggtgagtagataatttcatatagcagtatacagcccttgacagagccaccgtaaatattaaaatttcaagttgtgtcttttacaggaacgtcaagattttattcctatcatgctattatgaaaagttattttctggcacctatacatgtattttttctaacggaaaaatgttactttagaattatgtcatttgactttttaatggactgttgtaatccaagcttgtaagtagatttttaaatgaatcctttcgacagtttgtttgaaaaatgaatatttgccttataaactgagctattcatttgaattttcctgctccaggatagagaagcaggacctttatttaacaaatattcaattagagctccgggctcataatgttaaaaagccattccctatcaagttaccttgaatgaaaccaagaatgggacaccctggagaatattaaaatcttttagttttgggtaaaattattaactttgaaaagcccaggtggtttacctttggccccctttgggacaagttgttttaaaaccatttttggggggcgccc

SEQ ID NO: 416895 - DNA, 842 bp, Homo Sapiens
  misc_feature (586)..(670): n is a, c, g, or t
  misc_feature (827)..(827): n is a, c, g, or t
ggagggactgcaaatccaagagttcctctgttttcatggtccttctatttggaagaaatttcccctttttcaaagtgttcccattcttgcttactttgggagcatgtggtgacattgtctgctctgtcgtctgttttccgtgtgcattgtatttccttgaaatccctccaccatactctgcttggatagttttcttactcacattctcactacacctgagggacacagatatgtaagtgtagtaccattttgaaaacctggttttgaatgttattttttcctctctattccttcaaacatccctattatcaaaataggaatttattgttcatattcatgttatttatcgtattctcatcttttgtctggtgctccagtgggggctcttatttggtacactgtcctggtacagtgtatcccatgatcatgtacttctgctggaagtaattattcaaatgttcagaaacccagactccaacagcagtccaacggagtggtcattagacaccagtaaccttccagtctgggggccagtaagaattaaaatgaagcaagatcaggggaatgagagctgctatttgtgttnnnnnnnnnnnnnnnnnnnnnnnnnnnnnnnnnnnnnnnnnnnnnnnnnnnnnnnnnnnnnnnnnnnnnnnnnnnnnnnnnnnnntgaagtccgggatttcaagaaacagccctggcccaacatggccaaaaccccccttcttctacttaaaagtaacaaaaatttaccccgggccctgggtgggtgcaatgttgttgttaatctccaagatacctcccggaagggcttgaaggccccaaanaaaataaccttggac

SEQ ID NO: 416896 - DNA, 453 bp, Homo Sapiens
  misc_feature (172)..(172): n is a, c, g, or t
  misc_feature (268)..(278): n is a, c, g, or t
gttcattgtccagtatttgtcggcttgtcgtcttgcatgtgttctgtccttttcttcactctgtattcctctccttctaattacttctctatttttctttgcttgtcctttctgtgtcttatcttgttcctctatttgtgctgtcttgtttttttctcttcttcatccattnttgttttcttttttcgtcttctattgtattagtttatttgttttctattttgtcgattgagcttcgtacattctcctttctacgtcttctgtgtgnnnnnnnnnnncttacttgccttgtgctttacgtctgtgtgttatttggttctgttgtgtgtttatttttagtttattctttcttccttcttgtactggatccttatctcttgttttgttcttaatttgctatgtttcatataacatgtgtcggtttttttgtgtgagcttgtctctgtcgcttgc

SEQ ID NO: 416897 - DNA, 562 bp, Homo Sapiens
ggtggctaatttaaaaatttttttatagagccagagtctcactatgtcgtctaggctagtcttgagcacctggtctcaacggattctcctgctttggcctcctagcatgttcggattacaggtgtgagcactagctttgcttatagtctgcattttctggtgatgctgatgttgctagtaaatggaccaccaaggccatataggtctcaaaatctgtacataaattgcaagcgcaaataataacaaacactaaaaatacagtgaagttaaaagggaattgttttcaatatcacctctgagatcttctggcaactaagtaattgaaggatgtacatggagaggagtgtgtgttatgtgtttgctgggggtagggaagattggcaaatctgcatgttttaagtatctttttcaaaaattttcatatataattttgaggtttcactgagaatcaaagctttttaactttaggtagttttatttcttatattacttttagtactctataaaatgataatgttctgtagcattggcgtgtataattttagtgtctacggttccagag

SEQ ID NO: 416898 - DNA, 632 bp, Homo Sapiens
ggcaataggagctgcggcagaagtggtcttatttgactacagtagaattttctttgcctgtcaaaagcagtccagacccttcttgagtcgtcatatcaggattattacagaatagagtccagactcaagaatgctaaatcaaatcatgaagtacaagaagcactcagctggggaatggattaagtatcctggattttgctgtatgtaaattagtacctggaaaccaagtcagcaacaagaaagcagtcatgaacacggagaggagtatcgtgtttttaatagagagtaactaaatgcattcttattgtgttctttcgtactttcttcaagttttagaaagtacctatttggcacctaaatacttctgaaatataatgtataatgcaatgtagttctttcctgaattaatactccattacttacataaaaaataccctggaagttgagcctagagacctctcctgagagtaaggtgatgggaatctcttgcttaaaaccagtgatgaagaagggagtataaatcctatgaatttaattgaagtgaacaccagtcgatacgtaaaggaacaagagacataaccgataaaaaatctccacacctgctggtaacctcagctttagtactattatag

SEQ ID NO: 416899 - DNA, 326 bp, Homo Sapiens
ggaatattcctaatacattgcaaatgtggatttgaaaatttggggtatgaaaattaagttcacaaggaagacacataaatgagaaataagcttctgaagaaagggaaagatcagaagccggttggcgggtgagaggttttttcgctctagggagattctttcagcaatcactatgtcagcagaacccggtgttttctcttccttcatatgaggaatatccggaatcccaaattattccaaaagctaagaaggccccctttcttacccctttggaaaaaccaggtttttgccaccaatttgttgccaatggggttttccccaaccct

SEQ ID NO: 416900 - DNA, 853 bp, Homo Sapiens
ggcagatcctgaaatatgacagaaaaaggagtcaaagatgacatcaagatatttgttctcagcaactggaaagataaagttgccattggctgagatggggaggaaggtatagataaagtaagagttcagtctggggctttgtcaaggcaaataaatgttaggttattgctggcttgacataattttcttctggagatcatgtcttaaaagtagactgctgtatgccattttctttaatgaccatgtcctatattctggatacatgccgcatgcttgtactctgcgacctccttactcatgcacccttttgtaaaggtaaaagcaactttacttctcgcaaagccttataatcgtcgtctaaaagctaggaccggccgaatcgggtgttttcatattattcgcctgcacgttattgccctactgccagtgccgcgtcccgtgcgatacccttatttagcatagcccgcgagatgcattcgctctccctgatcacactcatacattcaagggtgggagtaccatacgattgactaccggctcaaaaggtgtcccaacatatggagcccctacccccgcttaatccttaccaatctactagaaaaacaatatttaccttcacgcgtcgccttaacgccacatcgccgtgcagacgcgaccgcccacgcagcacgctagagcgagtcttccttcgccgcgcccggagcgcgcagactagaaaccgtaagctattcttaccgtccgtcttatgtctattctcatgtgatactacgtcacgattagtgtgtaattcgcccgccttgcggcgctaccacacgacatgtactcgcgccctagcgggaatgtcactcatctg

SEQ ID NO: 416901 - DNA, 809 bp, Homo Sapiens
  misc_feature (169)..(325): n is a, c, g, or t
  misc_feature (353)..(683): n is a, c, g, or t
  misc_feature (784)..(784): n is a, c, g, or t
gggaaagaggaaaaaagtgatctgggacctgttgtttttcttgcatcccatttctactctgcctgtgagtgaagactgttgtggaaaagtcaactggagagaccaggtcaaaggccaagcagaagaggaattaggcttaagactgcactgagagggaacactagaccannnnnnnnnnnnnnnnnnnnnnnnnnnnnnnnnnnnnnnnnnnnnnnnnnnnnnnnnnnnnnnnnnnnnnnnnnnnnnnnnnnnnnnnnnnnnnnnnnnnnnnnnnnnnnnnnnnnnnnnnnnnnnnnnnnnnnnnnnnnnnnnnnnnnnnnnnnnngacagtgctctgcagggagtctaccacnnnnnnnnnnnnnnnnnnnnnnnnnnnnnnnnnnnnnnnnnnnnnnnnnnnnnnnnnnnnnnnnnnnnnnnnnnnnnnnnnnnnnnnnnnnnnnnnnnnnnnnnnnnnnnnnnnnnnnnnnnnnnnnnnnnnnnnnnnnnnnnnnnnnnnnnnnnnnnnnnnnnnnnnnnnnnnnnnnnnnnnnnnnnnnnnnnnnnnnnnnnnnnnnnnnnnnnnnnnnnnnnnnnnnnnnnnnnnnnnnnnnnnnnnnnnnnnnnnnnnnnnnnnnnnnnnnnnnnnnnnnnnnnnnnnnnnnnnnnnnnnnnnnnnnnnnnnnnnnnnnnnnnnnnnncttggctacctcagcttgggcaaacagtccttattgtggggaacttttatgatcccgttgaagttttaataccttttgtatcttaaagttcttctgatttnttcccccattgcgcccttttcccca

SEQ ID NO: 416902 - DNA, 976 bp, Homo Sapiens
  misc_feature (861)..(861): n is a, c, g, or t
  misc_feature (923)..(923): n is a, c, g, or t
ggttgttggacatgagcttatccctttttaaaaattacattaaattattatgtataccttatttaaaaagaaagtctgttaacatgaaatgaactgtgatatcaaagcctacccacggactatagatattaattgtaggtgttcttaaattaatactttttgctacttttgcattaattgaaatataaaggaaggtgcaacgtgttctaatttttcatactgagcaacgcgcctttcgtgcttcctccattcttataatttgtgttatacctcttcacattctacttgacgcggccattatgttttcctctttcaccccaccttcccctccgtacctcactctagcttactgtgcactctatcgcactgcgcgtgcgttcttgaccttttttgtgtcgtctgcggcgtttggggtgtacacgctccgacgttttcgctttctcccgattttatcctccgcagttatttccgcttttttcttgtaccgtttatattttcaccgtggttgtgttcacccttcctctctaactccaccgccagttttacgccgtttacacttgagcgtcttactgctgcgactatctgtttgttaccttcatccccccccgccatagcttttaatttattgccaatcactaaaggcaccctctccattttccatgcctcccacgtctacgccgctttcccgcattcagccgccccaagagagcgagaattattaaccgataatctctctcgtgtagtcattaattatatatgcgccgcggcgctacactcgctcacgatttaaccgccgaacacctcaatatttttactatctcgccctcgcacggctttttgcgtcttatttcggcccgtttngttgctctacttatgatgaggtatcactagtgtccccctgcggtgatgtagaactgctcganagtatcgggatatagattactgctgatacatcatcttgcgccgcgcacgactg

SEQ ID NO: 416903 - DNA, 777 bp, Homo Sapiens
  misc_feature (465)..(478): n is a, c, g, or t
  misc_feature (487)..(708): n is a, c, g, or t
ggacctttttaggtgctttacagaattatccactttaatgcctataacaatcatttgttacttgtcttcacctcctgttttacagatgactttcagtaacctgtccaggtacataagactcataagtaaaacttagacataaatctgactccaaagcctgtgcttctttgactacagtctaccctgtgttatttaacctcagttgagattcttctttcgtaaacctggagtgatgtataacagtaagatttgagaacttgctccttgtcaggttttatgcctgggatttaacaggtctatctcatttggcccttattaacagtccctaggagtagacactattttcttcccatttgacaagatgaggagtttaaggtaagaggttaaataacttgcctgaagtctctcagccagtaagtatggctctgacatttgaactggcttagtaattgcagagcatttgcnnnnnnnnnnnnnngagacggannnnnnnnnnnnnnnnnnnnnnnnnnnnnnnnnnnnnnnnnnnnnnnnnnnnnnnnnnnnnnnnnnnnnnnnnnnnnnnnnnnnnnnnnnnnnnnnnnnnnnnnnnnnnnnnnnnnnnnnnnnnnnnnnnnnnnnnnnnnnnnnnnnnnnnnnnnnnnnnnnnnnnnnnnnnnnnnnnnnnnnnnnnnnnnnnnnnnnnnnnnnnnnnnnnnnnnnnnnnnncgcccgcctctgttgtccaaaaatggctgggaataccgggtgtgaacccaacgcggcccagttgagctt

SEQ ID NO: 416904 - DNA, 244 bp, Homo Sapiens
ggtactctaagcacttgtcacatctccctctaaaaaccttttcctctgaaatcacttaaatttaacccttttttctaatttctaagggatagagtaaaataaggaaggagatgccttattctgatacttggtttctcttctactactattcccttcttagggaaaactaaagaaaagctatttgccttaagtaactattaaaactaatatcaaaagtttgtaattgaaaatgaacatataagaa

SEQ ID NO: 416905 - DNA, 757 bp, Homo Sapiens
  misc_feature (553)..(591): n is a, c, g, or t
ggaacctcttactggtgttcctgcctccagttccttccttttactgttagcagtgtagtctttgttaaaccccaaatttagcacgtcaccctaacttaaactcctgactgcatacaggtagaaatcaaaattccccactaaagcccatagggcctttaatgatgtggtctggcctacctctccagcctgttctctaaccactgtcccaccctatatctttctgttcagtcttacaaaactatttcataaaaattttctcacttctctgcctttgcacaggctgtttgatatacctggagtaatccccaccattgattcttttcttggcaaaaatctattgtaaaacttatcatcttggcctggaaacaatccataacttctactgttctggattaagtgactttttagatgttcttgtagttctttgtatagacctctctcaaaactgtcatatgacattaaattgtctattttatttgtgtgtttgcccctttacactgtgaacttcttaatggcagggaccattttttatttatttttgtgtcttcaaaannnnnnnnnnnnnnnnnnnnnnnnnnnnnnnnnnnnnnntatttctatagttatttattttaatcctacacagaatgtataaaaataatttactatattgttagtgaagaagattgtatcaaaatgcagtatacaaatccttaaagtatgtggggatgcttggaagtaatacaaatgtatgaataatttgttccgtccttctcca

SEQ ID NO: 416906 - DNA, 814 bp, Homo Sapiens
  misc_feature (498)..(629): n is a, c, g, or t
  misc_feature (649)..(657): n is a, c, g, or t
  misc_feature (676)..(686): n is a, c, g, or t
  misc_feature (696)..(722): n is a, c, g, or t
gggttacaattcaatgttttcttgtttatgatgaaaggatactttgaaatagttcaagaaatataacttgttacgccttttatcacataaaatacgaacaattttttgtcatcgaaaagtcatcacaaagatttggtggcaaaaaaagttgaacttcagcaagatgtttatttaaagtttaaagttttcatttccccattgagattttatatttaatatactctaaaaatatggtcggttggaaaccctagaaaactggattatactgcacccaaaatgtaaaagatgcctatttttccaattttccaagaactccgggaaattcccttcccttatggacgggccggtttttgtaaaaacctattcccaaaatttgccttaaaacccttattggaaggggccccattttttgagaaatatcccccatggcccaaaaaaattctttaaacgggcctttaaaggggaaggggaatttttggaaaattccggggaacccannnnnnnnnnnnnnnnnnnnnnnnnnnnnnnnnnnnnnnnnnnnnnnnnnnnnnnnnnnnnnnnnnnnnnnnnnnnnnnnnnnnnnnnnnnnnnnnnnnnnnnnnnnnnnnnnnnnnnnnnnnnnnnnnnnnaaaaagggggaaaatttttnnnnnnnnngggagaaaaccgggggcannnnnnnnnnngggggggagnnnnnnnnnnnnnnnnnnnnnnnnnnnaaaaaaatatttttcccgggggagaagaaaagccccctccctccaaaaatgttgggggcaccaaaaaaattgtggttaaaaaggcgcgcttt

SEQ ID NO: 416907 - DNA, 249 bp, Homo Sapiens
  misc_feature (194)..(194): n is a, c, g, or t
gggctgaaatatgcgcttaaggagcgctggaaccggaggaaagagccatcctttgacaattgggtcattgaagaagccaactggttgacgctggacaaagatgtgctttcaggagatggctttgatgctgtcatctgccttgggaacagttttgctcacttgccagactgacaaggtgaccagatctaggactnccgcctcagagaaatcgcccgcgcatgcattcctccccacgcggccctttcttcc

SEQ ID NO: 416908 - DNA, 755 bp, Homo Sapiens
gggggtgccttcagataacaaaagaaaagtttcaggtatcagttaggatagaggttagacattgtactgaatatatccagcagatcttacatcccattacaaaccccagtaggtgtgttgtatacatacggcttaggggttaagttaacaaagaagtctgataagaaaaggaaatacagaggaagcataaatctctttggaataggattttgttccactcccttagagccctaacagtataccttagaaattattttagacagtttgtacttaaagaccagaaagctactttagagacttggaaataatgagcctattgtcaaaaggtggtgcttgcggggcattaggactagagggttggtgaaaattcagacagaatgtaacttgacaaagagaagacagcaacaactgtaacaattatcttatgaatatttgcgaaactcaaagggatctgattggtgacctctgggctttatcaaattaacatcacaacttctagaagaaagtcaaccttcatcttttacaatagaaatcatatgttttgctaacccattcctatttaggcttgaaacaattaagagttatgggtaccttaaaaaaatcattatgttttataaaatttagtgatagaaggagcatagttgttctatacagtccacacacatacactttccttaatttcttttaatttaaactttgaagtaacctaccagtcctatgttttgggtcagtttttcccctttttttggaaatta

SEQ ID NO: 416909 - DNA, 384 bp, Homo Sapiens
ggccatggctttctcttacgccgctgtttggctttcagatgtaatcctgtcttctcctctcttccccacgaaagcgcactcgattttgttaggaatgaacggaagtttaaaaattcttgtgcccacccccgccctccacccattcctgttaaaagttctctggcgaagagccaatgggtgaacgtaattgaaagagctatttactcttttggaaatctgatttgaagtctaagttttcagtaacagaaaacacacaagcaatgtggactgccaagcttgaagcacttcgggctctgccttcactcgcatgctaccatgttcgagcccaaactccactttaattaaaaaaacctgtgcctgtggaatttccacaactttcgggtt

SEQ ID NO: 416910 - DNA, 697 bp, Homo Sapiens
ggcaaaccatgtgggtcattatatcaggccatgttgataggcaaaattcagcctttgggtggccaaagtctcctttggttgagaaaaggaatcagtaggcagaaccatcaacagaaaatatgagaaagaatgctcaagtctaaagtgaacttaaacagttccactgtagtgtaaaacaccactcaatttggtaagttgaagggattttatttttcagacattgcctaacttagaagagaaagataaacctatcttggaacaaaggttagatgaaaacaaagacttaggaaccatggtaagctatagcactcactctctaaagcttctgattcatacgctctattgctagattcgtctcatcatgctacggatagctcaacattacagccatgacccacatgggcgagagttcgtttttgtgattctttgtcctttattttagcaagagagtcctggagatcactgagtctaatgaacgaaccccagggaatgaaagtgaagcattaaccattactgaaatgactgtaggggctctgcagggttgttgtgggtggtactgacagggctaaataggactgactcagttcctctttgacattctgatttaatgtttctgattacaacagcaaatctttgatttgggggcttgtatattcttcaacacctcttttacacttggaggttccttccctttttt

SEQ ID NO: 416911 - DNA, 734 bp, Homo Sapiens
  misc_feature (489)..(509): n is a, c, g, or t
ggggacataaaaatttataccactcatttggtaccctagtcctatcttagtggtgtcaggtgcaaagtcactcattctgagaaattttacttctgtagccattcagattaaattttttaaaatagggagttaaactcagcttgaaattgaaggcttcctataatctgatcctaatgcatcttctctgagccttgcttctggcaattcacattatattatctatatgagtaagccaaacttgtctattcattattccaggaataagtaatatactcatctacctcaattacttttaatgcaaacctctctcccttctacttacggaaattataatgggtttttaaggttcataattctatttccattaggcttcagagtctgataatgcttcacagagatacacctttaccccagtctcatttagcaaaccttttccctattcattttagaaataagcattccaactgtatggatgtcccattcaacacnnnnnnnnnnnnnnnnnnnnnacagtcttttgttgatggcgcatgctgatgctgaaaggagaaaataactattgaaaatatctaataagttaaggttaaaaagaaataacctaacatagtgcacactgagtatttttcagggtaaagaaagacacatttatcaaatgcctactcccttttcagggactttatatcaattatttctcatctttaaaaaacactgcaagaaaaggttttattatcact

SEQ ID NO: 416912 - DNA, 534 bp, Homo Sapiens
caagtatatatttctaaatattcagtttggtcatattaattatatagacattgttatgcaacatctctagaatgtttttatcttgcaaagctaaatctcactacacattaaacaactaccaattcatccaatttcgaggcactttttcaacaccactctgtttttctgtttctaggaccataactgctttacatatcctcatataaccctccgcccttttttctagctggcctcattttattttggcttaatggtgcccccattttcgatgcgtaattggtttataactatttttcccgccaatttgacaaccctgaatgcagattcccaggaatttttttccgccgaccaggaatgacttttgcgggcccgacaaactaggcctttggtttataaccctcgtatggcattttccattgaaacacaggcatggcagtcacgttctgggggaaaaaccccgaacattattgtcgccttcgacaatctccatattttttctgtaggccaacacttttctccactcttttagaacgc

SEQ ID NO: 416913 - DNA, 815 bp, Homo Sapiens
  misc_feature (336)..(412): n is a, c, g, or t
gggtaggataacctggagcagctgtcacataagacgttttcctatctacttcctgttctagtatcccaccacataccagtacatacagctgagtggcatggcatactgtcatctatagctatgctacacattttgacaaagctctctcaagtaatgctgataactggaacctctacctctttaaagtcactgttgaggatggatttgtttgcctatcctgtcttcaagtattcattagtactatgtaaagaactttggagtttcagatttgtcatttattctagggttctctgatgattccagagtggtttgtatccaggatgtatcacacttacnnnnnnnnnnnnnnnnnnnnnnnnnnnnnnnnnnnnnnnnnnnnnnnnnnnnnnnnnnnnnnnnnnnnnnnnnnnnnacatgtattctattctaatgcaaagttttgggcattcctcttaaaaatgtgaaaagaattttcaaaagccggtttgtcccgacttttgaacggcacgccaaaaatggaagccggtccctctgtattcccaaattggccacctcaggtttgaacaggaacatttccccaccttgccgcaggttccgctttggcaatttcacttgtcatgtgcgtaccctattttttattggcgggccggtccggaataatcggtacccccgcgcaaaaattaaaaccccgcgcgaatacaaaaggtcctagggcgggagaacgatgagggcgccctcttcccctagggcaatgggaaaccgctctgggggaatatcaccccaatagacccccttattgggcttcacccttaagg

SEQ ID NO: 416914 - DNA, 702 bp, Homo Sapiens
  misc_feature (72)..(160): n is a, c, g, or t
  misc_feature (511)..(511): n is a, c, g, or t
gggatgcaaggcagagtccctgcccgagacagcgcacctctgactttgagaactgagtttggttttcgtcannnnnnnnnnnnnnnnnnnnnnnnnnnnnnnnnnnnnnnnnnnnnnnnnnnnnnnnnnnnnnnnnnnnnnnnnnnnnnnnnnnnnnnnncacccaccattttgctcttcattctttttcatcctcatgactctaacaatcattttcgtctcactttatcaaatctagatatatctgaatagaaaaataatcaaagatctaaactccagccaacacccccaacttcagacatggttccatccctctaataacaccctcaacccaccactgagcagctctgagacaccttttcacccactgggtgtccccaggggtctggagagactcattcttcttgccttcatccctgccacctggctgcatattttctacacacttgaaaaactcgtttgaagaacccaggaacctggctgggcacctagaagatgtctgagtgagcanaggaggcactgagccatttggaagctcaaagactgaaaggcagaagccatttgcctgtccgccattcctagcattaaatggaaagtgtgtggacagtgcagtcatcactgtaagcctttgcccagatacaatgtccacagggacaattaatgatgggaagtccttatagaccaaagtcctctatttaaaat

SEQ ID NO: 416915 - DNA, 622 bp, Homo Sapiens
  misc_feature (154)..(203): n is a, c, g, or t
ggctcccacctcagcccgagttgctgggatgacaggcacacgccaccatacccagctaatttttatattttttatagaaaccaggtctcactatgttgcccaggccggtcttaaactttgcccaggccagtcttgaactcctgagctcaagcannnnnnnnnnnnnnnnnnnnnnnnnnnnnnnnnnnnnnnnnnnnnnnnnnttacccggcctctgcctcttgttaatttgaccacatcatgtacctgctgtgcccgttccttcctccgtagaagagggtgctggtcctgcccttttgaggcctccatgagggccaaatgtgccatgggacacttagtgccatgcctgcgcagacctgtggaataaacagcaattctgagcaggctcattttaaagggacttgcaaatttgggcgttccttgtgtgccttcctcataaaacccactcctcccagaatatgcttagaggtgctgctgtatttacctgagagctatgcttttcatcaaaaacctaaacgtggtcatctcttggatgaggtgtggccctgcaccctgctgagacgcactactgcagccctaatgagggctctgcaatgcgcgagtcctcatgagctactacccc

SEQ ID NO: 416916 - DNA, 759 bp, Homo Sapiens
  misc_feature (645)..(700): n is a, c, g, or t
ggattttcttggttatgtacttatgttactcaaaatcacatgcaatgcagtttcaaagcagaatgtcaatttatttttgtgattagaatgcttttgacccattttcaaggattccactttttagtgtcaaggaaactaagaagcaggatgaataattacaaggttacttggtgatcgttgaaaaatagaaaggaaaataaattgtctaagagaatgactaatattttaagtaacttctcaggagatcgccccacaacagaattcatttgtcttttgctggaattatttgtgcttcccaaatgtcgctctgtcttaagttagagttaatgttcaatgactgtttttttaaaaacccaatattcctctgattagcaacccattaatacactatttaaacctataaatacccacttgagaggtccagcttggcttttctgataagctgggagacattctgttggcatgtacttattgaaatcaggcaaaacctcaagaatctaactagagccatttcaactccgcttcactggtgaccattttccttagggaaccccttcccgaaaaaataaaattctctatacaatcttttttttccccccctaaatggaaacccttacccacctaaaatcctcctgagccaatggnnnnnnnnnnnnnnnnnnnnnnnnnnnnnnnnnnnnnnnnnnnnnnnnnnnnnnnnaaccttaaatggaagtggtgaaactgtgccccttaagtaatcattggacaaagtttccc

SEQ ID NO: 416917 - DNA, 629 bp, Homo Sapiens
  misc_feature (481)..(496): n is a, c, g, or t
ggggtcccttttggaaaagttaaattccttactgcatgaaccactaacgtatgtgcatatttacatcaatcttaattttagttaattttagccaaaagtcataaagtaagagtcttaacttgacttcactgttggctccaaggaatggagcctccagaagctcatttataccttatgactgtctcaaaggctaggagggagggaataagaagaatgcggagccaggctgggggctgcctgccactgctcagatgctgtccagaggtggtagatgtttctgtgtactcctcctctggttctttgaaatggatacacttagatggctttctttctgggatacctactgttttagtacaaatacatatcggatattaaataatatttgataagaaatgaaaaagatgccacaaaatcgcatcccggcgatgcccatatgccgctgcgcttataagagggaaatatagaaaaaaaccttttaggnnnnnnnnnnnnnnnnaaaaaaattttctgacacatattcgtttgcgacccccgggcccccctaatgtaaaatgaaaagggggccccaacatttttcctacaagaaaaaccggggcccatagcccaaccagcttggaaatccttccccc

SEQ ID NO: 416918 - DNA, 403 bp, Homo Sapiens
  misc_feature (117)..(346): n is a, c, g, or t
ggctggaacatagaggaactgagaatgggtgctgaatgaatgaaagattgaaacagtattacatatctaatagaattgctccagtgaccttgttgtattctcaagagttacaagggnnnnnnnnnnnnnnnnnnnnnnnnnnnnnnnnnnnnnnnnnnnnnnnnnnnnnnnnnnnnnnnnnnnnnnnnnnnnnnnnnnnnnnnnnnnnnnnnnnnnnnnnnnnnnnnnnnnnnnnnnnnnnnnnnnnnnnnnnnnnnnnnnnnnnnnnnnnnnnnnnnnnnnnnnnnnnnnnnnnnnnnnnnnnnnnnnnnnnnnnnnnnnnnnnnnnnnnnnnnnnnnnnnnnnnaaatggatcgtggccatgcatttccagctggggcaacagaggggaaaccccattctc

SEQ ID NO: 416919 - DNA, 881 bp, Homo Sapiens
  misc_feature (64)..(350): n is a, c, g, or t
  misc_feature (352)..(371): n is a, c, g, or t
  misc_feature (612)..(612): n is a, c, g, or t
gggctgtgcttttatacctaaattgtctccaggagtgcttaatagtccattaataggtatttannnnnnnnnnnnnnnnnnnnnnnnnnnnnnnnnnnnnnnnnnnnnnnnnnnnnnnnnnnnnnnnnnnnnnnnnnnnnnnnnnnnnnnnnnnnnnnnnnnnnnnnnnnnnnnnnnnnnnnnnnnnnnnnnnnnnnnnnnnnnnnnnnnnnnnnnnnnnnnnnnnnnnnnnnnnnnnnnnnnnnnnnnnnnnnnnnnnnnnnnnnnnnnnnnnnnnnnnnnnnnnnnnnnnnnnnnnnnnnnnnnnnnnnnnnnnnnnnnnnnnnnnnnnnnnnnnnnnnnnnnnnnnntnnnnnnnnnnnnnnnnnnnntatttaagtaatttccaaacatagcagaaaatataagcatggtttatcactttgatatgacaccaacagctacttaagatagaatcatgaattcagtaaattgttgtgtggaaagctaaggtgccaacccaagccgcatcttcttaggtgctcctcactggtgtcatcagctacagcaggcagagcattgccaggagctagctcttcccttcaagaacaaagtctttgttaaaagcacagntacccacaactttgctctttctcctgcaatcctcctttatttccctccttttcttagggatcacccggggttcttagtattttgggggccttcaccacaacccctttctttctgggaaaaaacccaaaaggtcttttgacccccttgaaggttctcctccgggagaaattctgattctaaaaacaccccctttgccctaaattacccatttctccagcctgggattaaaggaaacttccttttggggcaggggaatttttccaaggatc

SEQ ID NO: 416920 - DNA, 275 bp, Homo Sapiens
ggatatacatatcacacataattgctttcttttgggtttctgtactttttccgtctctgcagtagttaccttataccataccatgtcttattgataactgttcttttgttgtgtaatgatgcatgctattcttaaatatcttccaaagtcttggttccttttgcaaacttaatatattttgtgttcacttaagttggtcattaatgaaacattttagtatggaaagttcagaatatgaattaaaatagtccattgaatttcatacaacacaacac

SEQ ID NO: 416921 - DNA, 490 bp, Homo Sapiens
ggggatgatgatgaactaaattaacttcaaacagaatattgccaggccatacgatttagtaacacttgcgtacaatttacaggtttaatacgttctcctatccatttgcttattaaacgtttcacggcaacttaataacaaagcccttcagctcagatactagtcattcattaacttatttgttggcttatttgttggtctattctggctaatcttctgcacattgccttgtatccagtctctcctctagtaaaattgaaatttctgacgtattagacttgaaaatatggagaataattaaatgccgatgacgggcattgtctcatgaaaaagtctgggaattgctctcagggagaaatcatgttctggacctgaatgaagcctggcagtggcttttaggtttccttgatagcctttgtttccacaaattaagaaccataaactcaaaagtgttgcagttcactttgtgttgctactcagatcgaaatgc

SEQ ID NO: 416922 - DNA, 747 bp, Homo Sapiens
gggccttcagacgaaatccttgggacaggcaaaaccaggggcaggatgtgagaaacagcctcagtcataggcaacagggaaaatgattaatcttgaacaaggcattgactgtgcaactcctccacaagataaagaatcaacaggaaagcctaacatgactttccagtaactgccaagtgtccgagatgcaacagccctggttgaggctttgaaagacagtgagctgtgcccctgctccatgcagctgtctggacagcttccaatctgagagctctgtgttcatttctacctttgtgctgatttaatttacaacctggggcaaatctcctgagctcatttccttgtctattaaatacaaggtgtctgagacgtctcccatggatttgagaaggctgttgggaaaactacagagcaaacttctttactctgcctacagcaagctctgcaggatggatttcagtgttcagcgtccctggacatctgcctctaaaacaaatctgcaccacaacagaggtggcatcagtcaacacaaagggcctcagaaaagttgggggtgaaactctccacttctggctttcataccatttgaagttcagaccagtgagaatttccatcagttggggagttgaaaatgccccaaggaaccagaaactggagatgggctttcctcagaaacttgaatttttagaacacccgttttttccaggggatcccctgggtggcccgaaggagcctcttttttttggg

SEQ ID NO: 416923 - DNA, 567 bp, Homo Sapiens
ggctggaaacggggacaaataagcaggatgtgcatttgttatgttgagaatgttccttgctgtgtttatagcttatttgaaatgtactaaattattaaaagtttctccttaaatacaaagatttagaaagctgaggcctaaaagtagatcctactggtcacagtagattaagaaatgtttctgtatctgagcttaagacaatgagtaagatacgagaaaagtggttatcagggttggggttactgacccttctaacttcccctctctcagacctcctcgtgggatgaagtaaatcagggagtctctcgctgctttcctcagtgtctgtgggtatttaataaacgttgatggaaacgcttcaccaacctgagtgcattgcctctcttctctagcctcatctataaaagaactctaagtcatttctaaaccaagaaacggctgtgcttttactacctttgtcattattatatgtcagaatagaccttacctgattcagcgttttccttccaacttcttattctacagcctttgcaaagatagttgatagtaatttttccattttccatt

SEQ ID NO: 416924 - DNA, 539 bp, Homo Sapiens
  misc_feature (341)..(349): n is a, c, g, or t
  misc_feature (405)..(448): n is a, c, g, or t
  misc_feature (486)..(494): n is a, c, g, or t
ttattgttttagctgcatgtcttcagctatttagaattcaaagactaatgaattgtttctaagtcaccctaacatcaaggtacttattttataaagaatttcctccttatttgtgttctaattgacccaggaaattttactttaataaaagttttaactttatttcctatggaaaaaatccctaaggggggagtggctccctccaggccagaagcaaggcgaaccttttggtggcccacttaccaaattggattgtgttactattttagaaagaattacccgtcctttataatttataaagaacttttttaagttccgggcctttttttgaaagtttaatnnnnnnnnntttcccaactaaaaaatgggtgggcttttacttggtgaaatggggaaaaaaacccnnnnnnnnnnnnnnnnnnnnnnnnnnnnnnnnnnnnnnnnnnnnccccctattcccaaagagaatgttaaaatggccttttnnnnnnnnnggaagaaattttggtacggaaaaaaggcccctttcacaaaataac

SEQ ID NO: 416925 - DNA, 936 bp, Homo Sapiens
ggacacacaactaccaataccgtgtatttcttcaaatctctgcaaaattatgatgaacagcattctgttatccccatcttacgagtgtgaaaagggagacttggagaaggtagattgacccagcacacatgactagttagcaagggacagcggtgagacttaaatccagggttgtccagctctagacaccaaagtcctgaacactgtgcaacactgctgctgagaattctcatgttccttgacacaaaataacattactaagccttacccttaatcaaatgaggtgggggggaaatcttttgtgtaatgctttataaacatctgcagcttgaatccataaatggcttctcagtgattcagaatgtggagagctgccctttatgcagctccacaagggaactcatggttacacattttcaacttttgtgttgagagaaatttgttttttcccctttaagaaccactcaccttgggaagtccaacgaatagttgggagccaaaacaccaaacccccctggggtcccttaataagaggaacacccctccaaaactttccccaacaaaatcgggccttgtaatccaataccattggggcacattccacccccttatggagcccctataggccactctttggattatcctcatgggaaaacttttggcccacttgttccaacttccacaccatgttcctcaaaatgaaaaggtggttcgtggccctagcacaacaaaataaaagcctaagctcggattccaaaccggttgagcccaacatgccgataccctcgtcgtgtaacggaacacgaaaaaacgccccaagagtgggggacttctcaacccaggcaaagtaggctccatccctaggttctttcagagtagaaaatagggtgcgccgctattccgggcggcaatcactagggtgatatctctccgcaa

SEQ ID NO: 416926 - DNA, 361 bp, Homo Sapiens
gggagtgtcagcagagctgtcacacagaaccgaacaggttgtgcactgcactctacagtgactgttcttgaatccaggactggccgccaggggcacccccttgagctggcggtattttgccaagtccgtaactgcagtgtagacacttcccagacggtggcgccaaagaccaactttacttcttaggagcagagtcgggttccgcctggggattctcagccccaggtcgtcatccgatgggacgggggaatttccagatgcctggtggccgggtctctcctaccaccacaccctccaaatctctgtcagagcagttcacctagcgttagcaactcacagaaataaactatgcaccacgtaa

SEQ ID NO: 416927 - DNA, 434 bp, Homo Sapiens
aaaaacaacaacagggataagtgctattgttatgcggatttcacaaatcagggaaattggcaagatggtagaaaacatccaccaacccttccctgaagatcattatagaacctcaataaaacaaattaaatatcatcttgaaggcatcagaatgcaaacaatgtaatgaagagtcaccagggcaagatccagggacgaaggaaacccagaggggctgcccagcctctgaggctgcttcacatcagagagttcattcagatcagagagatgagaggatgcaggtcagagagacctacatccagatcacatgactgagacgctgaacaggggctttggcgacttggggtacctaccaagaatcaggcccctggcaaaccctctcctgtacttggtgggttagaaaccccaaaggggctgcatcccaagactttaag

SEQ ID NO: 416928 - DNA, 739 bp, Homo Sapiens
  misc_feature (390)..(592): n is a, c, g, or t
ggaacattatttaataagaattgtggactaagtaactttagtgtgcattttcagtgtctctaaagatttgggcgcagagttatgagctccatttggttgaactggtagttttagaaacagatttttaaattacttaccaaatgtaaaaggaaaacacttgtattgaaaacactggttgcagatcgttctaaaggccatttgggacaacagaacaaggcaacatctcagagaaaatggttagtaatgggctcttagagatggtgtcttaatgcagtagttattttgaattatctttaaaatggttttttgaccctgttcttctgttttgacattctcctttgaaggcatacaagttatactgatgatatttgaatagtggaactcttgtgnnnnnnnnnnnnnnnnnnnnnnnnnnnnnnnnnnnnnnnnnnnnnnnnnnnnnnnnnnnnnnnnnnnnnnnnnnnnnnnnnnnnnnnnnnnnnnnnnnnnnnnnnnnnnnnnnnnnnnnnnnnnnnnnnnnnnnnnnnnnnnnnnnnnnnnnnnnnnnnnnnnnnnnnnnnnnnnnnnnnnnnnnnnnnnnnnnnnnnnnnnntaaatgttcagtaagtggttgctcttttttcataagtagtccaatttcttttagaaaattttcataataatatggtagtgtaatgggaaagaatgcacacctggtcttggtctaatagaccccggatttgaaacactggtttctgcc

SEQ ID NO: 416929 - DNA, 193 bp, Homo Sapiens
tggggccaaaggaatattgaacagacccctttctcagaaagaaaaaccttttttgctggccccacaaaccttggataattagcctcaatcatccccaattcctttagaacaaaatggccaaattcaaaaaccctcgcgtctaagaataacgcactctcatccagccaatttagaaaaatgtgtggattaaccc

SEQ ID NO: 416930 - DNA, 690 bp, Homo Sapiens
  misc_feature (406)..(570): n is a, c, g, or t
ggggtgtttgtgtttatgtttttgctagggagatgaaagtagtttttgtttcttcattagcgtaggatgtgtacattgaaagccatgttcccttgtagaaagaaaaatgctgttgccttttgggttgattctattatctgatgttttattaatctctgtgaaataattgtgtaaattaatatagagactagttgagaaatggtggataacatgaagaagatacccatttttgcatagattagatgtgatcaacctcacactatcatatgaaagttggctgcattggagagacaggaattaatattaaaaatgttttcagttcagattgatatcttacatttccaaatattattttcttttgaatatgtggtataagtaatctgctttaagtcctattttaggttgnnnnnnnnnnnnnnnnnnnnnnnnnnnnnnnnnnnnnnnnnnnnnnnnnnnnnnnnnnnnnnnnnnnnnnnnnnnnnnnnnnnnnnnnnnnnnnnnnnnnnnnnnnnnnnnnnnnnnnnnnnnnnnnnnnnnnnnnnnnnnnnnnnnnnnnnnnnnnnnnnnnnnaaaagggaggatagccttggaccctggggaggctggaggcgctgcagctgagctggtgaatcaccaccactgtcacctcccggcctgggaccattcgaagccaggaccccctttctctcg

SEQ ID NO: 416931 - DNA, 763 bp, Homo Sapiens
ggactcaagtacatatttttattactaatactcataatgcagaagttaaattcgtaacaatttcatttattgtctgaaacaactatatgagatttggtaattctctactacaggtctgttactcattatgtactatatgattttacttatttgtgcttttctgctaaaatgaacattagcatttctatataacatgtatatttcacaagttacattaatattgttgtgcaccttcaaatttttttctgctaaaacaaggttaaccactgtagaattattttgaacaggtacacttaagaaaagctcatgtgtatgcttattaggcagttagatatttcacttggtttatgatcctactggcttaataatgtcaaatttttttagtaaacaaatcatggaaagagttaatattaaatagcaaaccttagaaattaagagtcttttggtggtaattacagtgaagtgttcccttttgtctgactagtatgttaggatggagtttcaagacatacctggtctatgagtttatgagctttccttgcggcttcataatccaaccaaaaataaattcatagtaagtttcttagtaatttggcaatacactggaatacaaaaaattccttttcaggtttttaagagaactgaatgaaatcagtgatttcaaatttagcaataataatttggaggaattttgaattgcctattataaaatgcattgtaccccactttgtatcaagacccaaaaagactggccttttaatga

SEQ ID NO: 416932 - DNA, 440 bp, Homo Sapiens
ggattcattggaaaggcaagtgagtggcagttgactgtagaatcttgggaatttttgaaggaatttaagagctgtacttattttaaataatgaggaaacaatcagagagacttaaccagggtggcaactatggaagagtgggggtagaatccaagtctacagttctacggcactgctttgtttattttttcaatcaagcacacatgagggattgcttaataaattcaagagttttctatatagtttgggattactacagacacaggtactctagccatgtgactatttcagattagtgttcccattgctctccatcctatttttcatatctaaatgtgtcatgattttagaatctctttgtaaagaaaacccaaaagagccatgcccaaaagaatgaacatgaaatgaaccaatttcaagtatttagaaattccttcctc

SEQ ID NO: 416933 - DNA, 477 bp, Homo Sapiens
cgaacaaccgaaaacaaagcctcccactccattctgtgaaacacagtgtctttttttagttctcaaatattattagtgttagttcaggccccatgtttaaaattctgagagtatggatatatgtcctttcctctgggtactgttatggctacaggtgaaatggctacaggtgcttgaaaaaagggtccagtgaaatatttcctgaatatttttggggtgaatcctcagggttggttacccaaggggatgtaacctttccttccaatcatttaaactctgcttctcctaaactgggctcattcccaaagaaacgggctaaaggttttttgattttccaatgtcaaaaggccgaaccccagggaatcacctttttgcaaacttttggtccccccccttgggtttataaattattttacccaagatttggaggccttctttcaacttattcggttccctctaaccccctttttaaatgga

SEQ ID NO: 416934 - DNA, 643 bp, Homo Sapiens
gggcccacattctttgccactcctcaagtttggacattctatctcctgcctgaaaactgatattgccagaatgagagaaacagcatatccttccaattatttattcaataaattttgctgtgagactgcacagttgatagcaagtgctattaaaacaatagacttgagaactgatttgtgtaggtattaaccatggcctatgctcaaatggaaaagattgcatgtggcatgtgtatctatacacaaatcaacattatttgctggggtgttgtaagttttaaacatttgtatttgttatggcactgtaagttttaaacatttgtatttgttatggcataatactctgtgaagaatggatgtaaaaatctttgaaaattcctacttaaatataataaaaatatcctctgatgatcctaggattatgtgactttaaacaaaatacataaaaatatgttaaatatacccataactaatcctgtgtatctcctgattaaaatcaagatctgtcatattgagagggactccttctagacgaaggtagacgtgttgtgatactaccttacattcacgctatcggttcgatacgctcgatatgttttgccgtctctctgtcatcacctacatcttgtagaattgcgaaaac

SEQ ID NO: 416935 - DNA, 882 bp, Homo Sapiens
tatctctcttcccgcgaacaacacagcgcagcgagtcattgcagcagagagaacagcgcgcctaactacttcaaatcatactttattctacgaatatatcactcgacagcccgctaatatgcgcggtaattcgggccctacggccgggagcagaagcgggtcggtctgtactcctcgctcctcgccacacacacaccgagaggatgaggctcaccgtgggtgccctgctggcctgcgctgccctggggctgtgtctggctgtccctgacaaaacggtcaaatggtgcgcagtgtcagagcacgagaataccaagtgcatcagcttccgtgaccacatgaagaccgtccttccgcctgatggcccccggcttgcctgtgtgaagaaaacctcctatccggattgcatcaaggccatttctgcaagtgaagccgatgctatgaccttggatgggggttgggtgtacgatgcccggcctgactccgaacaacctgaagcccggggcggcggagttttatggatcagtggaacatccacagacctactactacgctgtggctgtggtaaagaagggaacagacttccagctgaaccagctcgaaggcaagaagtcctgccacacaggcctggggaaggtctgcaggctgggtcatcccccattggcttgctcttctgtaagctgtcggagccccgcagtcctcttgagaaagctgtgtccagtttcttctcgggcagttgtgtcccctgtgccgatccagtggcccttccccaaactgtgtcaactgtgcccaggctgtggctgctcctccactcaaccaattctttgggctacgtaggcggcattcaaattgtctgaaaaaatggcgggtggggaatgtgggcct

SEQ ID NO: 416936 - DNA, 807 bp, Homo Sapiens
  misc_feature (285)..(318): n is a, c, g, or t
  misc_feature (729)..(729): n is a, c, g, or t
  misc_feature (785)..(785): n is a, c, g, or t
ggggaggatacaggtgactgacatggatccctcttacaaggagcttttaaaagggtgagatgtgaaatatacataaacaacacagaacagaaagtgagaaatatacagaatttaaaggaaacttaaaggagtccttccaaatggatgattttatatatcttttgaaggaggaggtggccttttagcttaacttggaaggatgattaatattgagatgtggaaattcatatttttgcccatgagaactttgtttaaagcatcagctttctttttcagagctgctcnnnnnnnnnnnnnnnnnnnnnnnnnnnnnnnnnnaggatcctttattgctgattgatctataacccagaaactccatgcttacagaggagagacttccctaaaacctctggtgagatcctggagaaccaggaaaaggcaaggtctgcttgtcttaaggcatgtaaaattctttgttttgtcatttttgtagcagaaactaataggaaagtgatggagggcattagcctaagtatttgactaaattctgcacactttctcttctctccctgcctcaagccttcttgttgggcttttagatcttcagagagatctggacatttccatctttcttcctttcctggaaataggaagcagaagaccctggaatactttttgtcttgggttttcaaagtctgataatcttctaaaaggtagcatagaccaaattttaagggagtcttcatnccccaaaatattacctaacattttaccattgggtcattttctggtgagttaacaanaattgacctgaagtattaaagg

SEQ ID NO: 416937 - DNA, 743 bp, Homo Sapiens
gggcacttttaatttccttgaataactttttctttgcatttacaattcggctagctaatacaagaggcccagctttcagcttgtctgggcttttgacatgttttctcactaagcttaatatccactttttgatttaaagtgagagatgtgtgatgtcctttcacttgaacactcggaggccatttagggttattagttggccttatttcaatattcttgtgttttagggaatagggaggtctgacgtgagggagagagatgggggaatggctcattgatggaacaatgagaacaaacatttatccattaagtttgctgtctcatatggtgcagtttgtagtgccccaaaacaattacagtagtaatatcaaagatcacatttcgcataacagatgtaatagtaatgaaaaagtttgaaatattgggagaattaccaaaatatggcagagacacaaagtgagcactttggaaaatggcacccccagatacgcttgatgcagggttgccacaaaccttcagtttgtaataaatacagtatctgggaagcacaatgaagtgaaatgcaataaaatgaggtatgcctgtatttgccttcgttacttttaagaagttgtataatccaccttttatctaaacttcaatttaaaaatcaaaagtgcgagaaatttaaaatactagattatgacaatagcaacatgtttaatttcccggtttattcataggttaaaactaagaaagaggcc

SEQ ID NO: 416938 - DNA, 464 bp, Homo Sapiens
gaaagaaatgctgaattcttgtaaatctctaaatgacctttactcccatgcctgaaccgttactattcgtctgcccaaaagcctcagttatctctctctgcataaccctacttactccccagccccaaggtcatgtggcatttattcatccttcagttttgagctcaggcaatactgagtgtccaaacaatttcttcaactcctcagccaatagattcttccctctgtgcccccagagcttattgcacatttctttattatagtcctcacgattgtctccattaaaattttgagggtatggggatcagcattttaaaaatagtttcccaggtattattgggaaaaacctttgacttcaagccaaggacatcccaaagaggggttttcccttggaggccaaaacacctgaaagcccacagcccaagaattcttccccccctttccgagaagttgccttaaaaaaa

SEQ ID NO: 416939 - DNA, 639 bp, Homo Sapiens
  misc_feature (178)..(495): n is a, c, g, or t
  misc_feature (515)..(560): n is a, c, g, or t
tagggcaggggaggccacagagaaccaagaatgcctggccccgcctcaaagaaatcaccccccaaacagggtccatgacacatgcttaggacacttctcctgaactgtcaccttacatgctgttggtaggagagaaaattggtaccatgcatttgggggatggtagctactaaaatcnnnnnnnnnnnnnnnnnnnnnnnnnnnnnnnnnnnnnnnnnnnnnnnnnnnnnnnnnnnnnnnnnnnnnnnnnnnnnnnnnnnnnnnnnnnnnnnnnnnnnnnnnnnnnnnnnnnnnnnnnnnnnnnnnnnnnnnnnnnnnnnnnnnnnnnnnnnnnnnnnnnnnnnnnnnnnnnnnnnnnnnnnnnnnnnnnnnnnnnnnnnnnnnnnnnnnnnnnnnnnnnnnnnnnnnnnnnnnnnnnnnnnnnnnnnnnnnnnnnnnnnnnnnnnnnnnnnnnnnnnnnnnnnnnnnnnnnnnnnnnnnnnnnnnnnnnnnnnnaaccaaaactctgtcctccnnnnnnnnnnnnnnnnnnnnnnnnnnnnnnnnnnnnnnnnnnnnnnatggccacccccacctagggtggaaatggggaataaaaccaaaacctgggtgggggtcccatattcacaaacccaatta

SEQ ID NO: 416940 - DNA, 126 bp, Homo Sapiens
ggattttttctggacctacaggtagactacatttcttagccttccttgcaattatgcatggccatgtgctgaatttcagccaatgaaaggaaaaaaacaaataagagttacttctgaaactgtgcc

SEQ ID NO: 416941 - DNA, 719 bp, Homo Sapiens
ggggtttttatgggggtttggcaggtggaagggaccagggagagatgatgagtgatgatggttatgtagtctttaggaggatgcaattataacattgctcttcctttcacgcaccacatgatttagcaagtacttcatattggctccaccattaacatggtcaatggcttctggatactcacagttcaggcacagtttctcctgaagattttttacctctcccatctttaagaaattgtctggatgtccatgaaagatgctgacacttgtattaattcattaaaaaacaccaccccctccctgaaataaactaaaaagtaatgaattcatagaaaaaaatttcaccaagattgaaactagagaatatacctagacttgcactttgagctttgagaaatgtgtacctattcaccattccaacgtgaagaagctctgcagtaggaaaaataattaacacacttatagtctactgcccatgtaaggatcagctccggctaagaggccaaagatgggtgacatcgttatgctctgcctttattttttctttcttacccacttagcttcctaattggaggaaggaggcgtggtaaaggtatattgaagactatggttttaattagaccagaaaaacacttgtcataaattctctgggggttcatcaaaaaatggtcccaggttttttggtcttttgggggccccaaaaattaaggggccaagtc

SEQ ID NO: 416942 - DNA, 920 bp, Homo Sapiens
ggcagtcccctgccatctcagtaaatgggacaacttcctattaagctgcttaggccagaagcctgagtgtcactctagattgtctccgtcatttcctggacccaatctatcttatcactcttaccatttgctaagactactgcaatctctctccaactggtcttccaacattctctctgagtgctgtggaatccatcccttaccttagaagactcttttagaagtatcatatttctattgtatttctgaaaaaacctaacctggggacccgcttttgccctcattctatcccaccttcctctcattcatgggttctgcccatgtcgccttctttccatctaacacacccaccctttcttaagccctttacatcaacctacactttcttctacctagatatggctttcctggccctccatggggctggcttttttcaggtctcagcttacaggtcacctcttccgaacgtcccttctgggtcgctttacctacgtgaataccattaaccctaatttagtcttccctaaggggaacccaggtttgtttcttcttgaaaaacaagtactcccttttaaaaaacccatttttttggcgtttatttgcctctaatttatccctaatgagggttagaacccttttcgcttcaaaattgcccggggtcctaaacccaggtaccataccttataactttgcggtggctttaaacaattgtgtggtttgcaattaggaaatttaaatggaaacaaatggccttttcccctggaagggcccaaccctccccctgtaaaaaccaacggggggcaaacaccagggcttttttggagaaaccaaaacctcacctctccctggggatttttgggttggggccccccactttcagggaaaacagttctaaacgttttttcctcctttaaacaaaa

SEQ ID NO: 416943 - DNA, 785 bp, Homo Sapiens
ggcacacacagctcattaattcctttaattaagagaaatggattttgtcttctattaagtacttgctttgttatactcaatatggcaccataatctttgatcttcctttaatatatttctttggaaatttcacaactaagttaatatcgagactgcttcttatggatattaaaataacttcctaaacctaggttctgatatacgtttttaaatgatcacaatacagtttgctgtaatgcatgtcagagcagtttggtctagaattgtcttgtgacagcaattatagcaagatctaattcaagctccacaaatcgagaattgtgataatttgtattaataatagaggtaagaatgaatttcactatttaaaagattagaatttaggtaaatttatagcatatgtaagattttatagaaatattttacctaaggggtagttattttaactgtctatgtacagcagtataaagtgaaggccactctgatgtgctggtttcatatgggaaaaaactattaattaaaccgaatgccataatatataagccagccaggacacgtttatattacagtggtcatttgggtccctaaaaagaaattcttttgaaaaaagatggaaatttcctccccccctccttataaagttatgaaaaacctgaaaatttcttaaatttcactttaaccccctccttaagggtcccctttaatttaaaccttgccctaaaggccaggaaatttttaaaaaaccgggcccttggaatcctggaattatcccccacgtcccccat

SEQ ID NO: 416944 - DNA, 444 bp, Homo Sapiens
ggggtgaaatttaatacctagagtgttagttttaaaataactgacttaattttttaaatgttttacattattcatcttttatgcaattttatattctaatatatatcatggtttataagcagataagatgatgtattgtcatatacttatgaaatgtacaggtacatattttgctattttacttaattttaatcctagttattttacatagagtatgtaaggttgtaccctctgttgtaatagagtatgtatttgcaatgtttaagaaacatccccctttttagatttttacacaggttgttatattttattttcccctccattttcctcttatatttattatatagaaagtggaccaccatgcataattctacaattgcctaggaacagtggttaccatggcatttgcagtttgctgtacagaatacagctgtctatacttcc

SEQ ID NO: 416945 - DNA, 599 bp, Homo Sapiens
ggtagggctgtctccacagtcctgtaggaggagctgcgggtttattatctaccaggattccttctgcttcctctaacagttttcttagttgttgaacaacacaaaccgagggactgatggggagagggaagaactgcatatttttaaggtagcattgcttataaaaagtcatcagctcagctacctgcatttgggagtctgggtgttgagggcggggatttatacagcacctggccttataagttgagtattcatgataggtgaagaggtgaagtttttttgttcatgagaatcactaatgaaaatcagttgtttagaatgtgaagggcacagcctacactgctaaaacactccccctagtgggagtttggtagaatacaaccaagccccctgtgtccaaagagggagttggcctttcattgtactccgggtgatctctctccattatccgcgcaaaggaagggcccgagagcaggaacaatttgatcttatatttctttgggtttttgttcaaaatttattttactttcttttaagctctatcctgttaaatatgttctggtgcagttaaaataatgcctggttcttttgcttaaaaa

SEQ ID NO: 416946 - DNA, 695 bp, Homo Sapiens
gggggccccatttatcaccacgtaccagaatattgagacttcatccaattctaatgatgtcattttagcccacaggggcagagaccaggagtccacatcctacatgtcttccaatctttctgcctcaaaaccctcaggaactgcttctagggcatttgatatcatctcactgacttctgagaaggaacatagacaagtacaagcatgttgtcttactcagcactcagccgcacacatcacgatgggcagaagtcactatcagtgagttctgttgcccttgtacaaagaggagttccacttcattataaagaaatggagcgagtatatttttaataggcccaactctttagctatgtttttctttttatcaggctttacttatttagtttttctagtgccttgaagtatattacttatatttctttttaatcttttcagcctcagtaataaaattaatataaatgagtcaaattcttatctccttattctttgaagttaggattatatagagagagtaatgttgaatgagctataaaattggcataaagttactttttagttgggttacagtagttcatgttaactaatgctaaaaatgccttgggtgatagaattctagttacatatagaattgggatatagattgtaaaagcatgtttaatcagtatgtttctacgtgaaaagtaaataaaagg

SEQ ID NO: 416947 - DNA, 673 bp, Homo Sapiens
  misc_feature (71)..(79): n is a, c, g, or t
  misc_feature (451)..(451): n is a, c, g, or t
ggtcttcttatccttcaattagaccccaaaagccatgcttttagaagattctgatttaaatcttattctgnnnnnnnnnactcatacatcagccagtgatttgataggatgttcttatatatacattgtgggtatatttggtacctgcaaatggttatgctaagtaataatgaacttatatataaccaggtagatgaacaaaacatttgcatttgtaactcgagtagttgtaagttttctgtggcacatagtcagttggcagtgactggtttttaactttccaatttacatggatgacttgaagatatattgtgggcatggtaatgacgtagaggcaaggaaacagtaaaaataatgcatcatgtaaaaactaaatttgtatcagtgcttacctggcaaatcatttgaagaggtcctgtttgaacttaattcaatattaaatatacctaanaatagattatagaagagtcaagatattggcatcaaggttttgtgaaattagaatagtctggggtgggtagaaattttttcggaacacagtggatgattacttttaaaattcatttcctttggtctagatccttttgaattaatattttcgggacaatttttaatggagacttttcccccccaaaagtggatggccatttacttaatttcctggaatttttcc

SEQ ID NO: 416948 - DNA, 701 bp, Homo Sapiens
  misc_feature (533)..(625): n is a, c, g, or t
gggcagtttcgataccagcagtttagtagcagagaagattattatagaactagcactgattttatcaatcatttagaaacagaatggaggttactatactggaacatagtaattaggggagaagtgatataagatcagagagaatgaagcagaggtctttatatttaagagttttataggccttggaaaagagctcaggttttattttaaactcatttgtcctgcatattttgatactgagtttatattataaatattttctaaaactgataaacacaagctatcacttcagaaacacagtcatgaaattttagagcaaaaaggaatcacagtggtctttgagtacaacccttagactttacagatgaggactcactcttatgagtttgaatctttctatttatcttgaggtgggatatcactgtcatccaggctggaatgcaggagtgcagtcgtggcacactgcggccccaaactcctgggctcgaattatcttcccacttcagcctcccaagtagctaaggaggctaatnnnnnnnnnnnnnnnnnnnnnnnnnnnnnnnnnnnnnnnnnnnnnnnnnnnnnnnnnnnnnnnnnnnnnnnnnnnnnnnnnnnnnnnnnnnnnacaggtagcatgcacatcagtgatgactctaagtgaccactctctgcgaaatcatgtacttatatagttagtgtgg

SEQ ID NO: 416949 - DNA, 805 bp, Homo Sapiens
  misc_feature (591)..(751): n is a, c, g, or t
ggcaaagttcgtaaagtaaatggtgagaagatttcactgaagaattgctttaaatagaaagctcttctgatgtacttaagtgtttgtaaagtcacttcctaccctgggctaaaagagacacaagaaaactcgaggcttaaaatgttggaaatcactgttgcttgaatagtaagcagaaatgagggtaaatcatttctgaaattttaagtataaactaatgaaaaattgctttgctatagaaattgcattttcatctaattgaatatattcattttattaagtgggttactactgtgtatttaatttcattatcttcaagattaatttatagagtctatatgaaaatactacgtggaataggagttatattttataaggagttgctgtgttttaaggagttatgttaaaatcacattatctggtgagtatcagttaaccacaagggtaaccacaactggccagtcagttatgtttcaaaatacctgttacttagtttgagaaaaagtgactttgggcacatattcctgcttcttattttgtaaaagggaatgctgtggtttgtaatactaggctattgtctagtttgattcnnnnnnnnnnnnnnnnnnnnnnnnnnnnnnnnnnnnnnnnnnnnnnnnnnnnnnnnnnnnnnnnnnnnnnnnnnnnnnnnnnnnnnnnnnnnnnnnnnnnnnnnnnnnnnnnnnnnnnnnnnnnnnnnnnnnnnnnnnnnnnnnnnnnnnnnnnnnnnnnnctgtggacatggcagttttaccttatcctgaacaaaacctggcccatggtaccc

SEQ ID NO: 416950 - DNA, 816 bp, Homo Sapiens
  misc_feature (462)..(483): n is a, c, g, or t
  misc_feature (672)..(672): n is a, c, g, or t
  misc_feature (700)..(700): n is a, c, g, or t
  misc_feature (703)..(703): n is a, c, g, or t
ggtactgccctttattgaattaatgaggaccagctttttgtgcatgacaagaaagaagacagtaggaagggcatgagtatcagagccatggagtctagacagatggagttcctgcttctcttccatcttgttcagaacttactttctatggagcctagctgatgacagctaaatagtataattaagaagctcttgtttatttgcatttttgaccaaaagtgtaagttggattagaactaggcattttataatccagtactggtgaatgtaccatttttatgatcaagtactggtgagttgttgattgcacaaaacaaaatatgtaaataattttaaatacctgcttcaaaactaccagccctttatatttaccaacagatgaattttacatcatcagattaagataatagctctatactttaccctttaatgacttaagcaagattgagggtcaaaggaacnnnnnnnnnnnnnnnnnnnnnnagccagtacatttatggagggtaagtgaaagtaaaatacgagagtatattaagagctccagagtcttgggttcagctctgtagtttctgtggctactgaagaggtggtcaggaacataggaaccccctgctgggctcctggtcacttctgtctgctccatgggcaggaaccttcagcacaggacatcanggcaagcttgaataagaaaaacatttcntcntcctaagccatatcatatcagttatacagaagtactacttttgggacacagtctttcaggagaagcttagatgagctcataaaaatctcagcagtttcactccacttggccct

SEQ ID NO: 416951 - DNA, 287 bp, Homo Sapiens
tatgttaaatttaaggactgttaacctacgttctactagtaaaaacaacattaagggtcattaaattttatttctgaattaatgaacatatctggacattttttgttcctaggttcacaagattgagcttcaaactcccgagtgttttcatttaattgatttagaggtagaatggaagagaatctgtggtacctaccattatacacatttagttgcccagtttacttaaactttaatgaaagtagaaagtagattaaacatttaaattttatttctttcctaaatag

SEQ ID NO: 416952 - DNA, 816 bp, Homo Sapiens
gggtcctcccacctgatcccgggtcctgattctgtgtcctcccacctgatcccgggtcctgattctgtgtcctcccacctgatcccgggtcctgattctgtgtcctcccacctgataccaggtcctgattctgtgtccatgcccccgatcctgggtcctgattctgtgtcctctcacctgatcccgggtcctgattctgtgttctctcacctgatcccaggtcctgattctgtgtcctcccacctgataccaggtcctgattctgtgtccatgcccccgatcctgggtcctgattctgtgtcctctcacctgatcccaggtcctgattctgtgtcctcccacctgatcccgggtcctgattctgtgtcctcccacctgatcccgggtcctgattctgtgtcctcccacctgatcccaggtcctgattctgtgtccatccccctgatcccaggtcctgattctgtgtccatccccccgatcccgggtcctgattctgtgtcctcccacctgatcccgggtcctgattctgtgttctctcacctgaacccgggtcctgattctgtgtcctcccacctgatcccaggtcctgattctgtgtccatccccccgatcccgggtcctgattctgtgtcctctcacctgatccccaggtcctgattctgtgtcctcccacctgatccccagtcctgattctgtgtcccatccccccgatccggggtcctgattccgttgttctctcacctgatcccaggtccttgattccgtgtccctcccccccgaatccgggggccctgatttccggggtcccatcccccc

SEQ ID NO: 416953 - DNA, 659 bp, Homo Sapiens
ggatttgaagctgttttaataaacaactaaaaatgctctgtagtgaattttcagaatttaggcatgtgcacacatcatttgtctttcaaaatattgcaagattttggctttttgttttaatataaaatattagaagaacattcaacttgcagatttggaagaaatatgagaactatttactgtgagtcaagtatgacatgtttagaaaggagtaaatccatagacatgatttcatgggaaagcaaactgtattccttatatggtaagctaacaaattgtttctttgcgatactatcccatttggggcattttttgtgtagtcaaattttacaatacaagctttatctaaacctttcatattataacacttctatgttgtctgctagagactaaaatgacccccaaagataccagaaataaagtaggaaggctcccgaatttttaatgtagctttatataaaggctgggcccaatgagagaacttgggaccaaagtttgtaggggaataactttaatatagaaaagccaccttagatagcttatgactgggtgtatctgcccaaatacttcccaaagtcgaaattaaatttgattaatcactccccttctcccccctcctatacctttccccaaaaacccctttcccccttttttaaagg

SEQ ID NO: 416954 - DNA, 748 bp, Homo Sapiens
  misc_feature (685)..(685): n is a, c, g, or t
ggggcctggaaattctcggacagaaattctattttctcataatttcatggcttttaaatatgtcgccattgcatagagttttcacagcagctggtagagatgtaatattaattttatttgcctagggaagggaaggaagtagctggccattgtgtgtatgtgatgtagtagggaagactaggttactctgaagtagtttcgagcattagtaccttaggtattgcattgaattatttaagaaggtggggaaagttcagaagaaaatgattggaatgatagtaccaaaatttcagtgaggtatggttagtggaattagaaatatttatcctggacaccataggagaatataaaactagtttcaaatatttggagagctgacaagtagaagataaattaaggaattgtttgtattgtcctatggccttgagaagaagctatatggagtcttttgcctcaaaatgagaaaagcacaaagatgtccaaagaggcaaagagaattctcattcaagatggcagacacagcacatatctcctttctactttaaatctcatagaaatgtcagcaaagaagaactaagggtaataaattaaagactactcggtacagaagaaagggcatcaggaactagggatatagacaagtttcttgaaagtgggaatacttggaattgtattaacagcttanatcacattcacagggagaaagctgcagtagaagctagaagctatttttccctgggcacagaac

SEQ ID NO: 416955 - DNA, 133 bp, Homo Sapiens
ggaggcaaagttcggtccaagccaggccccttcgaggactttgtgtagattggtacctaagtttaatgccttttgagtttctttttaaacagtattaatgtaataattaatgtaataaaaagaacaaaggacg

SEQ ID NO: 416956 - DNA, 741 bp, Homo Sapiens
ggggccccataaatgtgatggatggtgaattacaggacttttgagtatatagtgagtggactacaattgtgctgtatgtagcccactgctttgtgcgtgaggcgattttgggccattgaaggagttcagctgtcctccatatgagtcatttcctagacagtgtactctgcaaaagcccaaataacttcacaaatgtaacagtttaagctcttatcagccatgtataccacactgagatgagtatatcatatttcacataatataaaatagaagtaacatcatacatttcactcttatttctccttctggaagccaccatgccctaactcattctctttctaaatttcaaaacatccaaacatttcccagcttattttatttgcaacacaaactagcatttttctttttattcataagctaaaaactttatcactgaaatcattttatactgccacgtatcattcttcactctctcaatacagtgctcttctcattggttagtcaatagtttataagagttccatatttttatctttggttgagatgtattaattgattagagatacttttacaattgtaattaaaaagtttaatcattaaatttaatgagacaggtatacggaggttcagaagaaatgtaaggaagtgagacaagaagagaaaaggaggttacgaaaagtgagattaggaaaataaaccggagaaccacgttgatactgactggaaaaacgtggaaggttt

SEQ ID NO: 416957 - DNA, 762 bp, Homo Sapiens
  misc_feature (77)..(86): n is a, c, g, or t
ggattagaactcttgataatttcgtaggctataaaatttagtccaaggaattataattaatggtctttttttatacnnnnnnnnnngcctctcttcattcttcttatccagctacctaatttgaaatttaacacctttcttatatggacataaaattagaccttgcttttcaatgcgctgtttccattgatattgattgaggttccaggtaacattttcttgaccttcaatctgagtgtttcctcttctattcattcacattgaaaatgaacctcacctttctttgcttgagaaagttttcccttggaattaatagagtcagaagggcacttcagactcaagtttaacaaagttactgtagagagcataaaatctcagagaggaaactggatgtgccaactcatttcaaagcattagtgtaaaatccccagctgaagaacttcacagcagctacaatcaccagcagtaaaatcacctttcaaaacacaattatggcaagaggcatctaatctattaaattttaagatagttaactatgagtttttgaactttgccataaatggataatttaattcaatttaaatagcgtaataattttaacttttacgtatatttaacttgaaccctaaaccttttgtttctcgggtaaagatccttgaatttagaaggaagggatttatatttgccggcggttttccaaaatttacggtcctcctcaataagtctgtggcagaaaacctctctggtacggcaaatcccgtt

SEQ ID NO: 416958 - DNA, 548 bp, Homo Sapiens
ggtggggacacacaaatgaagagagagtcctgtcctcaaagaggtaaagttctagttgtgagtgagagacaggcaaacggtctagtcagtaatctggcagctgcagtggagatgccagcacagtacgctggagctcggataaagtgcacctgagtttcagtgggacagtcagggaaggctgcatggcagaggttgtatctgagccaagactaggtggatgaataagagtttttcagggtgatgagtcaggggaggacattcccggcacaaggaacattctacacattttttcattcaaccattgttggttgaatgcttcccatgtgccagctactgttatgggaactaaggatttaaacatcagaaaacaaaggtcctgcctccctcaaaagtttgtgtttccagtgggggagaaccgattgtcaacacccccaaaatgccgcttccccgttcagtagggacaaaatggtaccaaacgatgaaacaagcccaaaaaaccgggggaaaaaaattggttccagggcagaggtcctcctcttaaaagaggg

SEQ ID NO: 416959 - DNA, 591 bp, Homo Sapiens
  misc_feature (58)..(71): n is a, c, g, or t
  misc_feature (354)..(504): n is a, c, g, or t
ggatgcagagacaatatcactcagaaatgaataacaagatcagaaagagaggaatggnnnnnnnnnnnnnncaaatggcaaatgaagaacattcactggaaaaatgttgccacaaaattgtgccaagtagatgccacagttcaaaaagtgtaatgaagctgccacttgtatataactaaagcttaaagggcagataagagagaaggtgagggaagtttggccagaccacagaagaaggtaaaacatgggcaggtagaacaagaggaaataaaaccattgcagaactgaagtctcagttggaggagagtgtatattggtgtaacctcaagggaaggtaaaatttcaatattgacnnnnnnnnnnnnnnnnnnnnnnnnnnnnnnnnnnnnnnnnnnnnnnnnnnnnnnnnnnnnnnnnnnnnnnnnnnnnnnnnnnnnnnnnnnnnnnnnnnnnnnnnnnnnnnnnnnnnnnnnnnnnnnnnnnnnnnnnnnnnnnnnnnnnnnnaatcccttaaagagactcccttaaataaattttgggttacccctcccaagggaggtttttggccacccttaaaaccttaaaaaaacc

SEQ ID NO: 416960 - DNA, 738 bp, Homo Sapiens
ggccttcctccatatttgaagccagcagtgtgggacccagtctttctctagtatctctgaccttcccttctgattccctcttctactacaaaggacccttgtgattacattgaccccacccagataatccagggtaatgttcctattttcaggtcagctgatgagcaacttaaattccatctgtgaccttaattccctattcccatgtaacctaacatatttacaggtgttccaaggattggggtgtagacatcttttgggggattatcatctaccaacagcccttgacttactaattgtagtttattgtgggtgaattaatctgaaatctttatagaatagctaaggctatagtaaatacatgtgaaaaatttaagaacaattacaccagcaatagagaagaaaatggagtgaaaagtgaagccactccatgttaacgtgtgtgttaacataaaactacccgtcaacaggtaactttactctgttgttcctaagtttttaatagtagctgtgtttttaaagtttatgaaccaaacttaaatgcattatgagagcttgataatgaaccagatcttagtaaaacagtattttaacatttggatatactagttgtactatgcttatctcagatccctgtaacactggtcaggctacaacttactaatgactacaaagactatatacccaatccaggtttatttctgtccccttaaagcaaattgcaaaataaaattggtt

SEQ ID NO: 416961 - DNA, 716 bp, Homo Sapiens
tcaataaaataaaactaataacaataatctccaactctgtcacccagagaaaatcactgttaatattttggtgtatatccttcgggttttgttctgtacatgttttaataaaagtggcttatagtctacatattgctttgtaaattgatttttttcacttattagagcaagaatatatttctgtgtcaccaaatattcttttacaacatcccctttaattattgcagagtttcttttttggataacaaaattaggcttaatatatcttaaacttcttttttttgcatgaactttatgagttgcttcagctttcactgtcataaaaatgcaatcagtaagtaacattgccaactctttaattttggcctaaatggcgcatttgactgcacctggcttgtgggtgccaattggtgtttgctgggtggtgagaagctgggtaagatagttgtcaagataggtctccatgtgtttctgaaatgaaggccaatattaattgtctactgtcttgatttctgcttattttcagaaagccaggagctaaggggtgatgtttcactgacttacctttagggtagggattatgaattttctctttcccatctgccccaaaatcaaattgtgtctgctaggcattaagatcacaagattctaactctgaaagcacttctttttaaattttacgaaaaaattcaattctggttaactagcacctgtgg

SEQ ID NO: 416962 - DNA, 749 bp, Homo Sapiens
  misc_feature (649)..(649): n is a, c, g, or t
ggagacatcgaggctttagcgagttctactcttgtcatacattgcaccagccctttttgagattgaagaagagtgccatctcaagacaaatctagcttattctaagaaatatagactctaggcatcaagaatactactggctactaggaggcccaggagtgtacacttcagtcattatgttgggaaattggggtcccagagcatcaactggtgagttcctaaaagaagaagtgcccatgtgggattaagtaacattctactgtatggctgtgaggtgtgccctggagcctacctacctgtaactatagctctcagagtactcttagctcaattctcttttctgtgtgagttggagtacaaaagaagtcacttctgaggttagtttatctattcccttcacttcataaatgtataaatgagaaccagagtgggaaataaaatcaaggaactgattacccaagggaataaaccaaggcaagtctagtactgtgacttcaatattctgacctccagttcagacctttttcttgtacttcccgctgcctcccacacattacaccatccttgggcctgcacctagacctctgcccacagccaccccatactgcactcagtgtggccaatcatatgcctgcccatgttccagggncctgcctggagactcaaaaacacccccctcactcatcttttgagaggtgtgctttttgagagaaagcaatggggcaggccgagagtgagctattaagggt

SEQ ID NO: 416963 - DNA, 321 bp, Homo Sapiens
gggcactgtgcatgtgggtggcttaccctaagggaagaataaaaggaaaggggtgcaagatgctggaagcaggccagcatatataatcctaggtagaaggtcagacggggcacttgacctgcaagacaccaacttgggcctcttccaagtgtactttcctttctttcattcctgctctaaagctttttcataaactcccactcctgcacataggctaagagaagagattaaatagaattatataaactgttcaattaaacagagacagcagaaaagagaaaaaataataaatagaaaacaatatcaaacatagtagatatt

SEQ ID NO: 416964 - DNA, 492 bp, Homo Sapiens
ggatttttaaaagaattaatataaatatgtatttgtctattggttgaaaaagtcatgtcttagggaaaaatatttctgtgttaaagcatgtattaaagtaattcagcatataattatcttattaaaattacctaatttctactgagtactgaccataacactatatatgtgttaataaatttaattctcacagtagcttaataacataggtatcattattaccctcattttaccagaggaagaaacagagctactgagagaaatgacttgctcacaatagcagagccaatattaaaccacaggcaactttgtctgcacagaggtaacactcttgagtacaacaataaaaaaacttcaaacagaaaataattattttaaactcattttaaataaaaaaatttttagaaattgaataattggatacatttgcattgttatatctgtgcatgaatgtataaaatggtatattaaagagaaataatttaagccaaa

SEQ ID NO: 416965 - DNA, 1166 bp, Homo Sapiens
  misc_feature (1132)..(1132): n is a, c, g, or t
gggattccttccttaactagagcatttctgagtctgtttgtaatacataaaataagttccccgtaagacttactttgaaaaaagcattcggtaactttacccaagaaaaggctcaaaaacaattgatattgaaagcagagaattaagagttaaatatacttctaaatctatatggaaatattctgcagacttaactattgtttgtcttattggacttacaagttttcttggtgacattgattaggttggggtgaaaccatgtattttacaaaatctggggcttgggctttttgagacttctgttaaccttgaggacttgcaggtgtcaaataccaatctctccccagatttacacaacctgctgctggactgccagtcactgaatctctaaagccccactttaacatttgcccagacagattcttttcctgggcactaaatggcacaaaaagagacggttcgccttcccaaggccttcccctgtggggcaacatacggaaagaagggaaagaatttgggcctcaatggaaaattttgtgtgaaggttttgctcggaattttccacataatttgttttaaaagcaaatatttttatttgttttttaccaccgtctgtgggggcaagagaagaaatatttttctatgggagggatatattacggggctgtgccccatcttctttgggtgcttgttcttcccgccgcgcagcggaaataaaacaccccccgcttgtttttttctctttctctcaacgcacaacccagcatgaagtgttcttctctggagcctcttctctgcctctagatgtgtgtgggagctccactgcgcaatagtgcaatagtctcaacctcgtaaaaaatacactcctttcggggaacactcttcatattcttctcacgcttataatccggggtgttattaccacacctctcccccgacacaaacgattccttcctctctcgacatgaatatttaccacatcacacacatgcgggcgtcctcttataacaacagcaaacgtctgttggtgagtgctccaataatacttgttgttcaagaaactgcgggaaaatttctttccgtgatacaagcgtccacacaatcactgtcttcgcgtgggcgatgtcgcgtnttctgtagtatattatactcgcgatgctagatct

SEQ ID NO: 416966 - DNA, 1339 bp, Homo Sapiens
  misc_feature (596)..(596): n is a, c, g, or t
  misc_feature (744)..(744): n is a, c, g, or t
  misc_feature (754)..(754): n is a, c, g, or t
  misc_feature (758)..(759): n is a, c, g, or t
  misc_feature (799)..(799): n is a, c, g, or t
  misc_feature (809)..(809): n is a, c, g, or t
  misc_feature (1018)..(1018): n is a, c, g, or t
  misc_feature (1033)..(1033): n is a, c, g, or t
  misc_feature (1117)..(1117): n is a, c, g, or t
  misc_feature (1149)..(1150): n is a, c, g, or t
  misc_feature (1180)..(1180): n is a, c, g, or t
  misc_feature (1211)..(1211): n is a, c, g, or t
tgtaggattgaatgtgatcgtggatatcacatgttgacattcagtaaatattcagtggtctattaactggtcactggaaaaaaatattcagtggatgcccattcccgtagctggcaaagatgagaacaaccgtgaaggtgtaatgagtagagggtctctccagagagaaccttgcttcagtttttttaagtacccaccatctccccccccaaacccatttgaaggcacgattacgcgcccacaatgccccgcccaccacacgggtgcttgtcgccaaactattttatggaccccaggcccccaggatttcccttaaccgcaccatttggttttcaccagcgtgtataccagttccttaaatcaaacccctcactctgcgatctatttcacaccgctgcttgtcttatggaacgaacaaaataataatttacccatattccccctcgtacccgttgtgcggcattgcgcccacaaaccaatggatccgagtatggtgcggctcccacgtgagcgaaaactctctgacacacgcgcgggccgcttcacgcacaatttaccgccggcgccgactcgaccacgtatataatctacgccantgtctgcgagtgtcacaataataaggactccgccctcattacgccgacgcccatgctcatattaagaactagtacccccgcatcccccggagtgagtcggagacaattgttacttactcacattttataatatgccttgggttactanacacatcatncccnncgcgctgcatcaggcgcccgttagcatctttaaccccacncttttccttnggatctctttctgctcactacaccgctgtggccactcgctcgattctcatacatctcctgatctcctcacggcacgcttttattactccctccctcaagtttcgcctactcgtaatcttatcatccactgactatctctcaccccagaccagcagagaggcgcgtgggtagttatggatcgaccgtttcttcacgacgtcgtccggganggatgtaattccacnccaactaaaatatggtcagaaaatattccgcggaggtaaagtggtcacggcctaaacactccccgcgcgcccatagcggagaangacataacattacggtaggggagcactaattnntacatgtttgtggaccgacgccgctgcgtntcagatgcgacgcactataatgatacatctntgatgagatgtctactccacacgtccctgataacatcagagcacgtcgatatgtagatttcacatacaatatatactaagaagcggtgacgtgatgtcaccactgtgctagacacgtgacgtcaataa

SEQ ID NO: 416967 - DNA, 868 bp, Homo Sapiens
  misc_feature (418)..(418): n is a, c, g, or t
gggaatttaatttttttgaattcgatttacaccaagagaattttggttttacaccatacctttttgttggcgtatcaggtataagatataacgatatttactttagaccaagtacacctgtagaaggatttgagtcgacaagtgtagatttagtaaaaggaggtaagaaaaattcaatgactataccttttgcgggtgggttaaaattaagacttacgcctaagataaatctgaatgctgaagtagctgcacattatactttcactaataatttagatggaagtagtcctacagaagcaaataaaaagtcttatggttttggtaaaaacggaaatgattggtttttttactcaggtatatcgataagttatacttttggaaataacccatgttattgtgcagattaaatgaatttganagaacagattaacacagacaacttacctaatcacttagccatcattatggatggtaacggtagatgggcaaaacaaaaaggatttctaagaacgctaggccatgagaatggtgttaagtccgtgcgtactactattagcacatgcgttacgttaggaattaagcatttaactttatatgcgttttctactgagaattggaatcgtcccaaattggaagtagatatgttaatgaaattattagtggagtcactaaaaaaggacctccctacttttacgaaaaatattattaacttaatgctattggtgatttacctttatttacagaaaaagtacaagcttccattaagagaacgtattgggattaagactaaaggacaatactccaatggaccttttacattaagcgtttaaccctatgggttctagaacctggaccttaaaaaaacccc

SEQ ID NO: 416968 - DNA, 1258 bp, Homo Sapiens
  misc_feature (360)..(463): n is a, c, g, or t
  misc_feature (672)..(672): n is a, c, g, or t
  misc_feature (679)..(760): n is a, c, g, or t
  misc_feature (861)..(870): n is a, c, g, or t
  misc_feature (948)..(957): n is a, c, g, or t
ggcacctcccaagagccttacctcctaatgccaccccatcaggggttaggatttcaacataggaattgtgctgtacacaaacactcagtccattacacacttcatcaaaccccaggctcctcattcttctcatcacttccaagatgacctcagctggtctcagggctttaaatacaatgtacacactgacaactgctgacttcttaccttcaacccagatctctcccggctgggatgccaataggcacttcaaatcaggtgcgtcaaactgagcttgtgatttctttctaaacctgctcctctccagcattccccagataccaacccaaagccttatggcggtcatccttaaccatttannnnnnnnnnnnnnnnnnnnnnnnnnnnnnnnnnnnnnnnnnnnnnnnnnnnnnnnnnnnnnnnnnnnnnnnnnnnnnnnnnnnnnnnnnnnnnnnnnnnnnnntattattccagccagcccctagctagaactctcccctgagatcttaaccaacttttcttccacaccttttccttggatttaagttggcccagtggtcccaaagccgcaatcgtaccgattctgtactcaaaattttggggggttgggccttgacacttttgggttggtccccgaaaataaaaagggtttttctctccccacaattaatngcctcgnnnnnnnnnnnnnnnnnnnnnnnnnnnnnnnnnnnnnnnnnnnnnnnnnnnnnnnnnnnnnnnnnnnnnnnnnnnnnnnnnnacgatcgcccatttatgagaagaaaattcaccgggtgccccaggttccctcaaaaagatttgggatattttctccccccccttttacagtaaatacaacannnnnnnnnncacaaaaaaccctatttgtgcgtcaccctcttatcccaccttccatggccccctcccagaattaagaagggtggaggnnnnnnnnnntcgaaaattgggaaaattcctctggtggcccatttcattaaagccaccctttttatgaaaagtgtaagtgccgcattttttttccggtgctctaaaaactccccgcccaacctgggtggggtgtcgcagagtcacaagtggggggcccccactgggaactccgatcgccagcagaaaagcaagcaagatcctaactgatgtgtgcccgcgataaaaaattccaacttattcgtaccctcaccacatataattggggagtcttatttataacccccacgtgtcatatactcacaaataacaa

SEQ ID NO: 416969 - DNA, 1014 bp, Homo Sapiens
  misc_feature (242)..(250): n is a, c, g, or t
gggggggatgagtcttagcttcagaaaggggctcttgtgtcttcacttgcgaggttcattcgctagcctctacaaatcatcacttaagcccctaattattcccggccgaggtcctaggctaaggtcccgggccaagctttctaattagtcccaggccaaggtcccaggccaacctaaatcacgcattctccaaaacagccggcaaactaagcacattccttcccgtttccagtccataaaannnnnnnnnaagtggcctcatagtaagcaactcattcgggccccctctctgctggcaaaaagctcagatgtactggactgtgcatttgatttggaactgagttacatgggagagaagcagggattcagtttggctgggaatcaaactcttttgataatttcctaataaactgatagtccttagatgaattgtagtctccataagttgaaactttttcctaaacatgctgtttatgaaaactgagtttctttgtcaccgggttgaaactaaacagcaatttgttattcacgaaatttttccagccccttttaaaaatactggtcttgaaagggttttttaatggaatccccggtgtatcctttctaaggttataacccaaaaaggtcattgtgtactttggggaaaatggaacctttaacctatgaaattttaagattttgagaccccctaaaaccactttttctagggcctttgggtatgaaaaggcctcaacccccaagctgttggacaccaaaattaaacatggcgcaatgggggcctacctgggtaggttggcccctcccaccgggtggattggaaagaccctcacggcctcacggctctttggcttctccccatttataccccccccgggaacacaggacgaggaaattatggggatcatcgtttttaacgttcctttaaaaatgggggctttaatacaatatatcaaactctgtttgtttttctctcgctggtggttaaaacatgtttgggcctgtggtgagtgtgtt

SEQ ID NO: 416970 - DNA, 635 bp, Homo Sapiens
  misc_feature (203)..(306): n is a, c, g, or t
  misc_feature (583)..(592): n is a, c, g, or t
ggcttgcttttctctctataaacacagcccatttatgaggtctgctctatgttctagacacgtgggtacacgactgtcctttcctaacaccactcaaaggtaaggttctagagcactactacctaatagatagacctttcttcaatggggccaatgttatataaatatgtgcagcctgttacgaccgcaaccacacgttactnnnnnnnnnnnnnnnnnnnnnnnnnnnnnnnnnnnnnnnnnnnnnnnnnnnnnnnnnnnnnnnnnnnnnnnnnnnnnnnnnnnnnnnnnnnnnnnnnnnnnnnncttctagaaacagtgtggcatgaaagaaaagtctctggagtctgacagacctgtgtcaaaacttaactctgggcatttaccaagctatgcaacctaatagctaggtacttacttccctatgcccactttaaacctccccaaatggaatgaccccttttcctttaagaatttcgggccgaatgtttttatccctaaagttttaccgggttttcccaccggggaaacggggacccaaactttgcaaaaagggtccctataggggccctaaaaatccaannnnnnnnnnccccctctcccataaggggaaaatatggcaaaaaaacccgggg

SEQ ID NO: 416971 - DNA, 683 bp, Homo Sapiens
  misc_feature (500)..(552): n is a, c, g, or t
ggacaggcaatattcctaagtctgcatgattatccatcactattctctcaaattctttcagatgtttttttccccagcctccagtagttgtctcacactttgagctaatcagtactgtgctgaatatttgagaggccctgctgcagatttctgggttttgttctctgcgtagccaccctgctactttcccggggctagctacctttgtcttcatggactctaagctcttctgtttcatcaactcaagttagtttatccacgcacctagctccccttggatttctttctcttccctgggccttagcctgaaaagtctccaaaggttgtaagctgggacaattgaagggtattgcttgtttcctgtctctctagaatcgctgttctttgttgcttaatgtccagtttcttgaaaaatgttgttttctatattatgtccgtttttcttttaagtgagaggacaaacctggttgttactgcatcctgacctccatatatagcannnnnnnnnnnnnnnnnnnnnnnnnnnnnnnnnnnnnnnnnnnnnnnnnnnnnctgtagtaaaaataattctgggtttgaaaaattacaaatttcttttatgttttttagcactaacctaaatggcaagttatccttatttatattaccaaaatttgttatttgggcaaattttttcttttcct

SEQ ID NO: 416972 - DNA, 1175 bp, Homo Sapiens
  misc_feature (283)..(339): n is a, c, g, or t
  misc_feature (587)..(632): n is a, c, g, or t
  misc_feature (646)..(646): n is a, c, g, or t
  misc_feature (675)..(675): n is a, c, g, or t
  misc_feature (697)..(736): n is a, c, g, or t
ggtctaggggtgatgatgaactgggacttcatctgagtccaaaataatgatgctgctgatgcaacagcagaacttatgaaacacttactactgcatatgccactatgaggtagacttacagagaataagttactctcccataatcacacagccaggaaatgacggaaatgggatccaatccaaatatgtttcattctaaagcccatgctcttcacagaggaggggccgggttggtttgggttagccccggggcggcggggagcgcagtgtggagggcccttcnnnnnnnnnnnnnnnnnnnnnnnnnnnnnnnnnnnnnnnnnnnnnnnnnnnnnnnnnttggtggagggctggagctcaggggaggtaatccggcccgctgaaggggacccagtggttaaggagcggagggagggggcctgacacagggtctttcgggagcatggacgtggcatgtttctggtccaccaagggcctgattgcctgccctttcccccccagagggccccagaactgaagggaccggggaaccgaaggtagaattaaaagaaccggcccatgtggttgaagaagcgaaagggccagtnnnnnnnnnnnnnnnnnnnnnnnnnnnnnnnnnnnnnnnnnnnnnncctaggccccaggntcaatggggccttgggggctccccccccnatataatatataaaatctccannnnnnnnnnnnnnnnnnnnnnnnnnnnnnnnnnnnnnnntcccccctctttaacacacgtgaaaaggggaggttggggggccacaagaaacatacctcactctctggggtaaacattcccccacggacccagaggggacactaaaatccccccccaagaaaaaaagtagaaaattctcccccacgtaataagagagcatactcacaagtgggataagaaaaagggcgcaacaagtctcactttttataccacccgcgggtgcctcacacatcactccccaaagggggcgttgtttagagggggctaacactcccaaaaatagaggggttagccgcaggagggccctctctaccccctccaaaggtctttttttgttgtagaacccccacagggaagttgtgataaggcaaattttttttcctcgagaggctcaccagattggtgttacaattgtggggggggcggaaatggaaaaaaa

SEQ ID NO: 416973 - DNA, 848 bp, Homo Sapiens
ggtcctctggaaggggtaattcagccttatcctttattcattatcttggtttaaatgagtttcaggtaattttctgaaggtactaacctttggacaaaagaagagggggagaaacacaaggaattggatgtctaaatgtggctggagaggaaatgtacatagaaaggggaaagatgctgtgctgacttcttagtttggctcagggctggtagccagagtagcttctggcttaaaggaagtatcaagcctcgtgatttagggctttgtgactcataatgtagagggtgatattgcttataagttctgcgagacacactgcattttcagcaaaatcttgcctttcaagaaacctaattacatggccccaagtctgaattcagtggtgctggagagctgcatgtagaagcatttaaagacatagaatgctgtgtcacacagaagttgtgtttaaccgattagcagattagttaacaagggcacagacatggcttagacagttgatgaagtgactattttaagtccttaatccctaagtgttatatcttaattgctttgatgaggcctgagatatttttggttttggtagcttgttttgttttcactctttgtggggattttatttaattacacagttaaaatatagggccacattctgcctctactcttttgctttgtcagctcagaaacagctcagagacagcagcatcagaggatccataagcagatgttactctgccttaaaaatacctttccacaaatttcggtcttttggaagcccggaaaaacgggtttccttaacctggccacattataggactttgggccctccaaaaaagattgcccaaact

SEQ ID NO: 416974 - DNA, 837 bp, Homo Sapiens
gggggatactgcttgtcctaaagattcaggaggaatagaactttctccaggaacccagggacttatccagggatgacaatctaactttttagggtctgattgaaagatctgcatccttgtggacaagaacttaactctagagaggagattcctcctgccacaggattacacctggaaagattttaacattcttttcctttgtcaagtccccaaaggatacattcctgatagggaatcctagagtttattctcccttgaatgactaaggccctaggcaaagctgaagaggagtctggattctgtgagaatgaacaaggcagctgctcggagtcggctgctgagggggccatctgtttaagcaacgagaagtacggagctaaagaggcccacggtattcaaacatgtgataacataggatgtgactgtttaaattcacctggcttcggtcaacattgacagaaggtgtacatgactctacgggaatggggaaatggcagctccaggggctgactgagccccagtcctgactgtgactgctttggtaacaacaaggtgtttaggaagaacagtccccagtctttttccaaaggtcgccttcttggtgtttactaaaggaactctgagtctcagcaaaaagcaaaggtcctaccaattagcttgcaaaacccttcaggatgggaaagaagaattggggcttcattgactctaccctggaacctgggaacagggccgccagggattacgaaaggggggggttcttcttcttaacgggaagaaaaaaaggcatcccctccaggccccagaagaagggctcctgggggttcccccaaactcccc

SEQ ID NO: 416975 - DNA, 1215 bp, Homo Sapiens
  misc_feature (218)..(349): n is a, c, g, or t
  misc_feature (499)..(499): n is a, c, g, or t
  misc_feature (520)..(554): n is a, c, g, or t
  misc_feature (711)..(730): n is a, c, g, or t
  misc_feature (732)..(732): n is a, c, g, or t
  misc_feature (801)..(812): n is a, c, g, or t
  misc_feature (860)..(860): n is a, c, g, or t
  misc_feature (1094)..(1094): n is a, c, g, or t
  misc_feature (1159)..(1172): n is a, c, g, or t
ggctattaaaattgtcttatgctctttgggctaagaggggatcatctcgcttaagatgtactcctgatgtaaacatttcccccactttccaaataatggtaaagaaaacagtggcaagggctgttctgttttctggtacctgagtgaaactcagaagaaaagcacgcttagctaagagattttcactattaacctgtttttattagatcagcgaagannnnnnnnnnnnnnnnnnnnnnnnnnnnnnnnnnnnnnnnnnnnnnnnnnnnnnnnnnnnnnnnnnnnnnnnnnnnnnnnnnnnnnnnnnnnnnnnnnnnnnnnnnnnnnnnnnnnnnnnnnnnnnnnnnnnggggcttgtgttggcatgggcctaattccctccttagggctaacaaaccctggtaacagcattgtttaccggtaacttgaaaaacaaaagggggaaaaatttatttttggggttattccttaaacccttatggctttaaacccttatagnaaaaaaagggttttgtgggtnnnnnnnnnnnnnnnnnnnnnnnnnnnnnnnnnnntcccttaagagggggggagatataacccacctcccaaaatttattttgttaagaacaccgccgccccttttttgtgaacccaacaaagaagaccctatccccctctgagtatgttgtgtgtggggcccaccatagaacaaacgtgtggtccctcctnnnnnnnnnnnnnnnnnnnnanacgcacctcaaccaccaccaatttataagaggggcgggggcgcctaataataaagaaatatattttctnnnnnnnnnnnnctctctttcgaacaccgggtgtgataaaacaaaacacactcccggggntggggttaaatactctctctggtgtgtaatcaagggagtttttttataagaacacccacccccggtaaagagaacaactctctataagaagacaagggggtttgtttccccccaaaaggggtgtgataacctccccggcgtgggtgtatgtttaaaacacacacaccatgtgtttttttatcaagcccccctccttccttatcataaataagaacacacccctccggcgttgtntccatcacgaatgatattataggaacgaccctcctctcacataatatatacaggagggccattannnnnnnnnnnnnnctctggggcggagaggagaaaaaaataatctaaccccacctct

SEQ ID NO: 416976 - DNA, 601 bp, Homo Sapiens
ggtcataacttattgcagattgctattgatatttcagaaatgtatttgtcccttggacatattcatagagcatttgcaagtctatagacacatctatttaataactgtactgcataagtcttccatgctacgtatacatgagaacctgcaaacaccccctcaatccccacaacaaaggtaataagcttttgtctcgccttgttttctgctttaagcattccccttaatgagctctgcttctttgtaactcaagagatttagtattccgtccaacaaaacaatttattgcccaaaatgttcttactgcagataaaatcttagcttccccaatacttctggctccacagttaataccctaatgtttcatttacagctgaacaaagcggcttatctccactaaaaggggaattagtagtaagaaataatttcaatcatctgctgagtttctaagtaaagtgatgacttctgcattctcccttctatctgatgacaggtgtgttgggggctcccagtaaaaagagcaattctgtcacctaagctttgtaatttgaacaatgcatctacacagatcaggcaagagttaggtcttgggctgtcaggg

SEQ ID NO: 416977 - DNA, 643 bp, Homo Sapiens
  misc_feature (171)..(179): n is a, c, g, or t
gtataaccttcaagaacaaagaatattttagggcccccattgcataaggttcacccatcctagctaataaaggtttcagaaaagaaaagaacacttcaacattgggaacggggggaaggggaatcaacagaaaaaaagtcaaatggaaaagtatcctgaaatccccttccnnnnnnnnngggcctaacccaaagtaatcttgcccccccgaagaaaaccaaataacctttcctcccgcctctttcatgcttactttccattttggttcaaaccccttcccgtaactttataggggacacaaaagcttccaaaaactcccaatttcacgcgttcccctgcgaaaggaaatacaggcattaagcttccctgcgttcccatccctaatgaaaacctccgcgttgcctttccgatattgtggccctttccccattctactctcaaactggcccatgcctctctcgggataattcctctaataagcctacatctgtgtcgaagaaaaccacgcctcttttcttaaaaaattttctctgcgcacagccaacaatttgacacttggttccccatccccgcttggcccctaaattttttcacccatcaccatggcgccctaaaatagatttcaacccaccctgctgatagg

SEQ ID NO: 416978 - DNA, 835 bp, Homo Sapiens
  misc_feature (259)..(318): n is a, c, g, or t
  misc_feature (545)..(545): n is a, c, g, or t
gggtacacagcctggaacagggtgagggacagcacaaacctgtgctaggccctagactgcagtgttgaaatcacttaactctaatttatacatatactttctttatgttatatattctcaatagactgggaagtatgtttctcaaacttctaaatcctgctgacaaacataaacgaagattgtttttgatacgtgaaatttcaaaataaatactgcactgaaacaaaagacaaaatactgctttgcttttcaaagtatnnnnnnnnnnnnnnnnnnnnnnnnnnnnnnnnnnnnnnnnnnnnnnnnnnnnnnnnnnnngttttgttttgttcaaccaatgcacatttgaacatacaatattcgagggatgcaaaacctccttccatatatgggaagggccataaaactttcacctggtgggtttcccgacatagggcctaacctggcaaaaattctggggtaataccctccggggggtttctttggaaaacccctcatccccccttcgagtggttatatacctggtgcaatacaacaagaacacnctcgcttaatcttgttgggtgcgggaacaacatggaacccgcgaagggaaatattcgggggaaataaaataagtgttccgttcacccctataaaaaaacgtgttatatgcctttccctcttaaaccctcaattttcccactctttttcccacatatttattccccccccaccttctgtgccattttacgcacacaatacctctgggctttttttcttggatacacaaccttcttttaattcgctcgccccacgttacatcttcagactcgctttatccacgagccgggag

SEQ ID NO: 416979 - DNA, 874 bp, Homo Sapiens
  misc_feature (523)..(572): n is a, c, g, or t
  misc_feature (750)..(750): n is a, c, g, or t
  misc_feature (774)..(774): n is a, c, g, or t
cccactccccccacaaagaaaaaagaaaccgatgtggtggctcacaacttgcatttcagctctctaatgaggcacaagttgggagcatcgccttgagccgagagatttccaaaacttgcctttggtcaatatagacgaaaaccccccttctcccctcaaaataatgaaaacaacacagcctttgggaacaacacccttgaaatggtcccagtctcccaattttctaaacctatcatggtcacgtcaacatcctcaaggccataagggcaagatataaccattctctccctgcattcaccgggatccgcccatctcgcaacggaccattctcactccgaaaatacctcgtctcaatttccaaatcgcagattttaacctcactattattaaatcctaaggggacgccttaatcctcaggcgcccatttcctggtcgcccgacaatattttcgacattattttaccttatatcggccctttacgcatttcgccaccccgtacaaatatgcccccttacgcggttnnnnnnnnnnnnnnnnnnnnnnnnnnnnnnnnnnnnnnnnnnnnnnnnnncggctaaatattcgccaatactccccccactttttctaccccccattcttacgcccttacttgtgggagcgaatcatttcattcccttgtagtcatttccagcggggcggtacatatcacaacatctcgaccagtatacgcctaataactcttgtccgccaccacacgccctcgttgntgaaacacacccccgcggacacanacagatcctgggcgggtaactttaccacgtctttcggatagggattctagaacaactttccgcaccattggggaaaatctatctccactcgcctcgctcg

SEQ ID NO: 416980 - DNA, 947 bp, Homo Sapiens
  misc_feature (436)..(447): n is a, c, g, or t
  misc_feature (624)..(674): n is a, c, g, or t
ggagctaagcatcagcatccagcccctggctggactctcggaaagtactactgctatttggcgaatgcacttgcaccaacattcacctaaatctgcagcacacacagggacaaagctctgtctgggtttccaggacatcttctcagaggtcgtgatggataagaccaggagcgggatcttaaataacaaggagcacgtgcagaggcctgagcgaacatgccttgtgtccggaactgggtgcagcaacctgggagagagcacggagatgaggctggggaactaggtcaggcccatttgggaaagaaccttggcattgggactttgtgctgcaaaccagtttggagatttgtgaaccatcaagcctccaaaacaaaattgggaggcccaagcccttaacgattgtccacttctttatttttgttaattacggtccttnnnnnnnnnnnnctaattctttaattcaattcctaaaaaagcctttttaaatggaaccacctctacccggtgttggttaaagggacaatgcttttctcggggccaagggaattcctcgaaggtcctggccactttgcctctccacgtcacattggtatatataccccccgcctgaaaagggtccaatannnnnnnnnnnnnnnnnnnnnnnnnnnnnnnnnnnnnnnnnnnnnnnnnnntattgatactgggaaaaattggaacaaggtatccgtatgggcataaaacaataccaaggaggcctaaaggggttgttgacatatctgaattcctcgcctcccaagtggtttgaaagtttccccacaaccagcgggaattgaaaaaatttgacggggaatcggaatatatttcgggggcactcggacacaccgaaattgaataagttcgggaaataaagtgcgcctcatggttctcggaaccaaaaaccatatatctctggcctccccgtacaa

SEQ ID NO: 416981 - DNA, 502 bp, Homo Sapiens
gagtgagccaccctacccaggcaaaaactctggccctgcacagttttcataaagggtgctttaggggtgaaaatggctcaaagtgagaatataatagtggtattttcctccccaaatgcccgaaattgatgaaagtcctacgaataagagtctgctaagtgtggggcgaaaaccagtagcagcaggattaccatgtaaacccaaggcacaatcttctgcacccttctctataacctatggggtataactatggaggggctaagcccaaacttgttttaaacaagcatcctacatgtgttccggtttctatatcctaacatccataaaagccctctcttctttgggaaatacagggaattgcaaacgaatcccctccttttctaataaaaaacgatttacctcctcacatatgggataagatcgtaccaataggaaaaataggaaggtattttatataaaaagaatagagattttttcactgtagatcagcaccaatcgcgtg

SEQ ID NO: 416982 - DNA, 440 bp, Homo Sapiens
  misc_feature (43)..(122): n is a, c, g, or t
  misc_feature (148)..(316): n is a, c, g, or t
ggatagcaagtaagcatatgaagagactcaacaatatttgcannnnnnnnnnnnnnnnnnnnnnnnnnnnnnnnnnnnnnnnnnnnnnnnnnnnnnnnnnnnnnnnnnnnnnnnnnnnnnnncaatagcctacaagaatatagagttnnnnnnnnnnnnnnnnnnnnnnnnnnnnnnnnnnnnnnnnnnnnnnnnnnnnnnnnnnnnnnnnnnnnnnnnnnnnnnnnnnnnnnnnnnnnnnnnnnnnnnnnnnnnnnnnnnnnnnnnnnnnnnnnnnnnnnnnnnnnnnnnnnnnnnnnnnnnnnnnnnnnnnnnntggggcccccttttattcccagcctactctcggagcctgaagcaaggaaaaatggccatggacccccggggaggggggaccctggcaattggaccccaaaaaattgtggccccagtgaacctca

SEQ ID NO: 416983 - DNA, 863 bp, Homo Sapiens
  misc_feature (288)..(420): n is a, c, g, or t
ggatatctatgatgtttctgcctctcgtcctgggaggcttactctttctagacagcccatggaactttcaggtagcaccagcagttagggagaaatcagcctcactgcaacttctattgcaagtccaggatggcctccaagtccacatgggacaaagcaactcctttttgtatataaaattcctgcaaatatttgatgacagtgatccctctccccatcccctacccaagaccttgtcatcctctctgctcccttaatagatgtttttccataaaacaggaccaagannnnnnnnnnnnnnnnnnnnnnnnnnnnnnnnnnnnnnnnnnnnnnnnnnnnnnnnnnnnnnnnnnnnnnnnnnnnnnnnnnnnnnnnnnnnnnnnnnnnnnnnnnnnnnnnnnnnnnnnnnnnnnnnnnnnnttaccccaggcgtggtgggtggggcaaccctggtagtcccaagctaccccggaaggcctgaagaaaagagaaaatgggcattgaacccgggggaagggcggaacctttgccaatgaaccccaaaaatttgcaccaactggcaatttcaaaccctggagttggacagaagcaaagacttgcggtcttcggtatagaacaagcgctcacgaggtgacgcaaatgaggaactttttcggggccggcccttctgggccctcttggaaaaaatcgttttcgggcacacaatttacgattttaggatgacaacgcggagcccaatgttaacgctctattttgaaaccatgcggggccaacaaccatgagttttccttaaatggaaaatatccaggaggtaatagtagacataccagtgtctttgagacattctcccccgcccgtatctc

SEQ ID NO: 416984 - DNA, 763 bp, Homo Sapiens
ggtctaccacattattaatgtatccactcacactaaaagctgaagtgttttgcatgaatgttgttttatcagtaaaacaggaaagatcttaaatgcatagagaatattcatttattttataaacatttgctaaagcttgggacctactttctacctgaactctgttagtaacaaaagatgaatacaatattgcaaatgtgtcttaaatacattattccattacatcgttacaccaatcatgtgagaagaactgtacacacctcatctaacagatgaagaaattcaggcaacagctagaaagaggtgaagacattcacacgaaaaaggccatcaatcaaatcaaagaaaaataactaatcttcaaaataataaattatcatcatactgaagtagttctcttgtatcttaaaatcccttgagagcagggaatagatctattatacttatggacagagaacctatgcatgtgttaggctaataaatatttgaggctaactgccaatttgtggggctcccagtctattaatgctttggtcttactgaagtgttcaatgtactgtttaaaaataagtaatgattgagtaatacttagatttttaaatagtataaggtttcatggaacagagctcatacttgattttagcatgaaatgtgttatttccgaacattacttaaagttggctattcaatttgggttggcaggaaccctgcctttcattatttcccctaaattttaaagaataaggatgggccttactataat

SEQ ID NO: 416985 - DNA, 757 bp, Homo Sapiens
ggtaccagagcttgctgtattccataccgccatctattagaaaattattgtaggagctactgataggaatgataagaggcctgttaaatttttacagatatgctataagcatttggtttttatacaacatgtactcttgcattttttccagactttttcctaacattcatgtttgtatttgtgaaagcctgttctacactacatttactttcagaagaaattgctttaaaagtcatacaggagacttatgagtattaccttgggggccttttttcatatccatagcttgatgaattttgcccaaagtggacggtttagaattgcagaggtcagtacctgctcctgcaggtataagtaggagtcagctatttgtggtggggctttggggatgtcagctcttgggggttgtgtgttgtacatgctaatttcaaggacatttcagctactgctgggcctcacttgcggacacatgggggataccttgtggagctggctcctgtgctggatgtccccgggaatgaatgagcccgttgtgtccgggccctaaggcccccctccagtgaatggcgtattccgttataaccgcctatgtttggtatcggccatcacactacgttgtactcattctcatccaatggtgtcctctgaaatacgcggtcaacgcaaggctttttccccccctgggtctcaatggtttttcccttatggaccagctgggtttaaaaaaccttagtgccccgggaattctccccttttt

SEQ ID NO: 416986 - DNA, 916 bp, Homo Sapiens
  misc_feature (118)..(118): n is a, c, g, or t
  misc_feature (160)..(160): n is a, c, g, or t
  misc_feature (192)..(192): n is a, c, g, or t
  misc_feature (195)..(196): n is a, c, g, or t
  misc_feature (805)..(805): n is a, c, g, or t
taaaaatttgggggggcccgccccccaccaaaaacaaagcacggggcggccggggaggaacgaaccgccggccagccgcgcgcacagggacgcagcgggaaggcgaaggcggcccccnaagagcccgaccgaaaccgccgaacgcaaacgaacccggccngggagaaccgacccaaaaagctatagaaaaanatnnaaaccgccaaaccacccgcccccccaggccgcgcgcggtgttgccgccccctataccgcggcggtttgcttacgtccccacctccccgcgacgttacgtcatccacgtcgcattatacccggcccgccacccccaaatcaaaaatcaccacaccttatcgagccgctgcagcgagccgcgcgatgctcactatgccgcggggtttacgcctgttcccacattggccctataccgccgctatttggcccccttgttattatccgccacgcactctgttgttgtatgttgacctcacgtacacgtcgtgtgatcccgcatatagtaccactatgtcgtcgactaatgctggctaatagcgcaggcgccggtgcggactataatgaccgctgtgtatatatgatagccctgtccgcccgagaggcgtgatttccgcacgacgatatgatactgacagcgagtacggcccaacgcactataaagatgaccccattgtgtatgagagcgcgcgctgtttatttggcgtggtgcggagcagtctgtgtgcgtgtatgtctcggcgggatactgcgctgagacgttgcttttgtatatcgcgcgcgcgatcgcgancatacgccgcctgctggacagttgtgtccggtatcacgcccgccggagtctcgcgcatcacgtagcgcagcgtatgtatttatgacgggcgacgacataacgcgcggcaca

SEQ ID NO: 416987 - DNA, 788 bp, Homo Sapiens
ggattaatctgaaacttaagccttagaaattaatcgcaggtatgatagaatgaggcttggtggttccatagctttcttggtcctttgaaatgggaaataacctgaaccaaaaatcctagtttgaaagttacacttcagtgatttggcctataaacagtggtcctatgattatacattttttccttcactgatttgcataattttgttttcatggccacagcaaaacaatgtgaaatatatttttgctatacccactttttttatcaaattcagatgtctactctcaccattttatattcatttccccagaaaaatgtgctgttttcataatgtctttatttagcaggtctttcaaaccaaatggaagccttacctgtctttgtccttaatagtgtaaatatcttgcacagagtgttgaggcctatggttttggacttgcaccttacagctgcctttgttttatcctatctagcttttaactgtgagtgtacagatcagcccattacccttgatcaggaacccaagtctaaatgcttttgtagtttggctatggtatgtactcctttctccaacccttgacggatccgaaatgccgagtttctaaccactccactattcgcactgtcccgtctcttcccccttgccctgaacgggtaccacttactccaaccgcctttatactggtcacccgtcccttgttattctttccattcaccctatcaaagcctccgggcaagtcatgcatcaccgttcttcctccctcttaatccattgtcctctccagtgtc

SEQ ID NO: 416988 - DNA, 604 bp, Homo Sapiens
  misc_feature (104)..(125): n is a, c, g, or t
  misc_feature (302)..(313): n is a, c, g, or t
  misc_feature (360)..(360): n is a, c, g, or t
atggcatgtattgttctttcggtctttcttcctctttaatatttttctggctatattggcatatcgcgttgtattatttttatttgtcttctctcttccctccnnnnnnnnnnnnnnnnnnnnnncactcgttcgggtgtgttgtttctttgttgcgcgtttgttttctttccgccctctcctcttttgtttttgtgtctggtggtttttcttgtatgtgcgctgttttattccctcgccctttactcgccttcttttctactcacgctctagatttcgtttgtgtctaaacttacctctcnnnnnnnnnnnngatcattgtttgacccatttaaattctgtcttcgtattagtttaganctggccgcgtttttatctgttctgttgtctcttcgcgctccaacttttctgtgatatctcgcatccgatctcttcttagatactttgcgtgctccgcgctttccacatatcttatctactatttttctccgcgctctcgcctttgctatttttcgcgggcgcataattataaaacgctctccatctctcttattatgtctcgcgtgtgttgtatatccttattctactctttctgttttgtcgt

SEQ ID NO: 416989 - DNA, 755 bp, Homo Sapiens
ggtgaatatttcagtattgagttacttaaatacacatgtcttttcccatgattaaattgcctggtgtgtttcatgtgtttagttagtttagcgcacagtgtctgagcccttcctctaggctagcccctgaggtgtaggaagatgaataaggcactgaccctccaacttccctctcaaacagttttactgttagaagagacatcttcacatataattatgaatcactgcagaacatgttaagtgacatactgagctattcaaaattgacaaactgcaatatgttcaaatggagaagaaatcaaatccaactcaacattcatataggaagtggcactaggtataaatttttcctggagaagtgggtggaattttgataagcagaaacatcttttcgtagaggatatatcttatacatcttcctataaaaatgatcatttgagagggaggttaagagaattagaaattgcatcttctttaaatggtttttaaaaaggtaagagttatgccgcctaacatcttgtaaactgaattttctcacccttaactatgatggggaaggtcatttttaacagaagaggaaaaataattagaatgatgaagattaaaaggtgtgtctatatattttaacataaattttccacagaataatccaacattgtctttacgagtaagttctcataaaggttaacaaaatctcaaactaaatagctcatgtccttgaatgaattttaactcatatacagaactgtggtgta

SEQ ID NO: 416990 - DNA, 687 bp, Homo Sapiens
ggaaggattattaactttaaaataaattattatgtctttagtaggtaaaaaatttccaaacatcacagtagacgcaatgtctgaaatgggagatgatttaagaatcaacattttcgaagaagcaacaaagaacaataaaaaagtattattattctggtacccaaaagactttacattcgtatgtcctacagaattacacgctttccaagcagctttaccagagtttgaaaaaagaaacactatggtgattggagcttcatgtgatactaacgaagtacacttcgcttggttaaacacagcaaaagacaatggtggaatccaaggagttacttacccaattatcgcagatactcaaagaaacttatcatcagtattaggaatcttagatgtagaaaacgaagtatataatgaagaattagattcagttcaaatcgaaggatctaaccttacatatagaactacttacttaatccgaggagaacgggaaaaattttccccccaatccactaaaccgaatatgcccattagggaagaaaaccgtaaaatggagttaccattcaggatttaaaccgatgcctttaccccttcaccgttaccaaaactcccaggggtggaaaattattgttcccccgccttaacttgggggcaacaaaaagggaaaaagaaaggcccaatggaaatggcctg

SEQ ID NO: 416991 - DNA, 355 bp, Homo Sapiens
aaagggtttctatcacctcacctcgaaacataagttcttgacccaccttttttatctgttaacaacggcccaatcctccttaacccggaaattaaataattgtcccccttcaattagaacctaccccagtcaattgcgtaccctctgagaggtaaagtcccccccaacctcaatttcccacagaataccacctttctcccaacgggtgaaaagtctttataaatccggcctcatccccacttaccctccaaacccgtaaccagttacgcctatcatcacgctgacaaataacaccaactccgtattcacaacgaagcaaattccccacttcctgtgcaatcgtgtagaaagacgc

SEQ ID NO: 416992 - DNA, 247 bp, Homo Sapiens
aaagaacctcctatcaaacaataaaaaggaccaaccccactttaaacaaataggcccaagggactttggaaatgcgttttgatccttaagggagagataattccacgaaagggccaaataaatgccaccattgaacggggaattttccaaccattccatatccattcccatgggaccggggaaaaattggggaaaaatcacaaagaacccccctcccttggggagagattaaccaacccttttctct

SEQ ID NO: 416993 - DNA, 763 bp, Homo Sapiens
  misc_feature (690)..(698): n is a, c, g, or t
gggtgaagggagttgggcgaggagacaaagctcagttacggaatccgctgtgtgagagcaggaactctagtctcttcggggtcgagccgggggctgtggcttgggggctgggggtgctccgcagaggccattgagaagcacgccactctgggattcttagggaggcggtgggggtaatggccgtgggattctggaagtctttggaaatgtgtgtagaattttgcatttgtgaataattttctttggtaagggtccatatttgctgtgatgtccccttacccccatccccactccaaagggttaagaactgcttgagcagatagagagggaccattcaattagggtagacctgggaatttaccaaaggattttaaagtgggtggatcctgcagaaagaaaggctagagatgatcctttaaagatattttactgttaattgaaaacgttttttatttaatgtttgctttcacaattttggtgaacttttgctgagcattacttggcttctgatgcatcctgtgcatcacagagcatcgtgatacttgaactcgaatgtcatggacagcacggtatggtaacgtgacagagcaaggttgaatattcaccctttggtacgcagaaaaggattttcaacagttttcctccggggatattctcgggaaaacttttccttccccggtccctttggannnnnnnnnaagagagaatcccaggtcaccctgtgttgtgaaactggagctggccggcgggaaggaaaaaaatc

SEQ ID NO: 416994 - DNA, 677 bp, Homo Sapiens
ggatatgttttaagtaactgaatgtattaaaatttgactttggcaccagcaggctattgtgaataatgttgctttgagcatcgtgtgcaaaaatatcctggacccttgttctcagcacttttggatatatatgcaaaagtggaatggctgggtcacatgataattctgtctgatgttttgagaaaccactgtcctgttttccagagctgctgcaccattttgtattcccatgagcaggtgcacaaggttccaactttaccacatccagccaacagttacctcctatttaatggctaagagccatcaccaccggggtaatgtgatctcactgtggcttttgttttcatttccctaatgtttagttatgttgatcatcttttcatgttcttattggccatctgttatcttctttattataagtccttttctgaattaaattggttttgttgttattcttgagttataggagttcttaataaactgaatattaatcctaaaaaagaggaaatttcgtaataaaaataaacatggtcggcccgccctcggccctccgaaaagctttccaagaccctttccgtttgggcgccgcggggccccattagggtaatggaaacatgggtcaaagcctggtttccctaaggaaaaaccctgggccaatgaactaagggctttgggac

SEQ ID NO: 416995 - DNA, 586 bp, Homo Sapiens
gtatcctaaggttgggatcccaggttttgaagaccaaaaaaaatagcagtggcttataaaaataacagcaatgggtgattcgcctcagatgagcaggtaaggcatttcctaccagcaaatcagtagcaacgttgctcatatgaattgaatctgttttttacattgtcttaacagtcaactcacaattagagttttaagagattgctagaaacattaaatgaataaagtaattgggctgaccacttgtgcgctggttattttgatcattaagaatggcctacgttaaatgaatttgtttaactgcaaataacttcatccccaagcttcccagatctaaccagtctcaagggctgagcaaagaaatttccttggttacactgagtacttgtgtttgccaaggcatcttggatacccaagggacccaaaatagatctactcaaatggtttccaatcttatttgcttccttccccagtaagggtcagttcagaaggattctaaattaatgcaagtttctccagaaggtcagcttaaattaaaaaaacatcagccgtctacctttaactattggatagccctattaaaacc

SEQ ID NO: 416996 - DNA, 749 bp, Homo Sapiens
  misc_feature (675)..(685): n is a, c, g, or t
gggtgttttttaaaaatcttggggtgtttttaaaaattaagatatattttgcccaagaatttttttaacaagattgctaaaaacatcttatttagacacttcaatgtaccaatttataattggatattcagtttaaatagtacacagagttgtggcttttattttcaattaatttttttccttgtgggcagtgtgcatggtataataagcctgagcagaggcttaagttgtatgtgtgcagagtttgtaaaggaatcaattggaagatgcagaagaccgaggtttgctttcaaggtatttttcaggctgtgtgggtaaaatttgcctcaaatttctatcaaacaggaatgtaaaatagataaaatcctatgtatttgaattgtcagagctagggagtgcaaatgttttggcaatgtattcaaaatgctggcctgggcaccaaagagaaaatagccttttacagttacatagtaagaatgcgattagtacccacaaattactgttttctaaacatttgaagttttacgatttagctttaaaataatgatttttataattgggtggtcacaataatttttggtattactttcctccttttcccacttaccaatatagccaaatgtattcaaacttaaaaattcataggggtctgaaaattcatagctgggcccaaannnnnnnnnnnggcaccttaatttttaccataatgggtcatcctattaaacccctttccggtaaaaaaatattag

SEQ ID NO: 416997 - DNA, 423 bp, Homo Sapiens
  misc_feature (241)..(278): n is a, c, g, or t
gggtatatgctttatttgctttaggcagtacctattacaatgacctcccaatgtgcagtttaataagtgcctttgactacccatcagatctgtgtctctatgcctgccaaattcagagaattggcactcaaaatttagaggtttgggaacagtagcaattattatccgtttattcagaaactatgattatatgtgattgcaatgtgaattttactaactgatgttcaattaatgtttctannnnnnnnnnnnnnnnnnnnnnnnnnnnnnnnnnnnnngagacagggtctactctgtcaccccagcctataatggcaatgggccgtgaatcacaggcaaccctccaaattttcttggggtttcaaaaaggaattctccccatccaggggcaggttggccaaaccagggccccggggccaaaac

SEQ ID NO: 416998 - DNA, 383 bp, Homo Sapiens
ggctgctgctgtggtttcagatcatactgaaaagaatgtgtttggtattgtagcccattgggcagacttgactgtttttgattcccaactctgaatgtacccagagcatctgtgtttttgagggggcaaccaatttcaatccaaatgaggaaacctcttccagtagtcaccaagggctgtaggccaccaagggctgtaggcaagggtgcatgaccgtgtgtgtcttctgtgtccgcagttacggctagatgaagctcaagaaagcagaatgccaggcctttgaagctacagcctccgcagggaaatgaagctgctccaccgcctaccaggaacaaaatcaagaatgccaaaccgagggcccaacatggaaacgtgagcctccc

SEQ ID NO: 416999 - DNA, 690 bp, Homo Sapiens
  misc_feature (202)..(215): n is a, c, g, or t
gggtacacatctgccttcaccctttgtccatttgcaaccaaatcaagtaaattttgatgcataaacattgtaaaagatgagataaaacactcacacctccttttagaaaatgggatgatcctggctcttactgtgaaatattgcaagatgaagtccttcctgctgatggctctcccagtgagagtacatttcttgtttgtcnnnnnnnnnnnnnncttgtcaattcttgggtgggagaaaagccttctaatatttcctcatccaaaaactcatagtctgagatttttgcagttaattttatcatgattagtctagaatacgactgcctttcattttgcattcaccttcttcgtctaataatgattaatgccttctgtcagttttttctctttgccattatgaatggaaaatgaaaaattgtgaattcccatcggtgttcagtgaaagctaaaagtagacaacaggtatgatgtcttgaaagatgatgatgaaatactttggacaatacaatgagaaaactaatatcttaaaaactatttagttatttttagcatagttgagaataatgaattataaataatgaattataaataatgaactattaaaaactattaaaaaacaacagtttttacattttgtttccaaatgtagggaaaaaaatacggctcaactagggattcccatcataaa

SEQ ID NO: 417000 - DNA, 320 bp, Homo Sapiens
ggaagtagacaagtattacaaaacaaaaatacaagtgagctcacctacagcaggatgctccctcctccatccctctcgtacccatccctcttgtacccagcctgctttatttaaatagagactgagcatggcaagtcagtaccatcccgtctctccctatccccttcctcatctttgacagcagcccagtactccacataagccattaaaacagtacgcctacctagttagtagatgaacctatgtttgtgaaatgaggaataacaagaggcattgagcctcaagcttaacacttgcaaaaccccgaaaagctcctgaaa

SEQ ID NO: 417001 - DNA, 322 bp, Homo Sapiens
ggggaggaggaagcccttcagtcttgattctctgcagtacttagtgcccaggaagggtttctcatgcagtgcttggtaggaaatgggactggctttgcttaaactccaactcactcgcctgccccactcctatgtgaggatgagcagaatctatcttgtatgctttgatagctacagctttgagtttcaggcctggagaaactgcaagaagcttcatgagcccagatagtctctgcatgggctgagggagggggagatcaagagacttgtgttctgcatccttcagccatttgttcccaggtcgttaagaattagcctttca

SEQ ID NO: 417002 - DNA, 154 bp, Homo Sapiens
ggtcactaggttttatgttattcttaataccttcttaggagtagaaagatacccaagtcatcctaccaaggcagagtgaaaccagtgacatcttttttgtgggaaacctcacccagacctcgaaacctaatgtcagctcctttctctctctctc

SEQ ID NO: 417003 - DNA, 639 bp, Homo Sapiens
tgaaaataataaataggtggctctcatgacctaaggttaatttcatgcatactactaagtgatgctttaagtcataccattagtgcaggaatttttgctccttagttcagctaaaatctgggttcttgtctcatgaccaggaaaaattagtcacagggacacattgaaaagtgaggagggcagaatttattaagtgaaaaggaaaactctcaacaaaaagaggggtcctgcatgcaggttttccatctcactaaactgaataccaggccaccacacatgagctgaagagcctagtcttctccccctgcatgaattcctggtggctacaccccgttctcccagtgtgcaggcaggcccttagtctgagccactccacattatttcccttactgtgtatgtgttaaggaacggaatttttcatcatgggcatgtttaggcaatccccctgtgcacaatgacctgggcagcatttggctgtctcctgattctatcattcccccctctaaagaagtacatctaacttaagataaggataaaggtagtgatcgatcttaactggttcctgctgatgggggcactgttttgggaaaatagcagtgagatctccctcagaaggcctatctaaaggttccctggaaa

SEQ ID NO: 417004 - DNA, 169 bp, Homo Sapiens
gggcggtgtaagagagctaaatcctgaatccactatacaagaagtcattacattatgtctaaaattgattaatcaaaaattagcattagcagtgtattatttaggaaaagcagagatatataaatgccagaagaagcctctaaaatgtcacttccaagattaggctatt

SEQ ID NO: 417005 - DNA, 457 bp, Homo Sapiens
  misc_feature (210)..(258): n is a, c, g, or t
taatatctctccagaattcagtgcaaataattccatcatactcacttcagaaaagtgaagatagtcttgtacatgagtagattcaaattttattgtcgtggtttccaaggttttatttttctcaccaatggaacttttgattcaaataaaatatccaagggatttcagcttataaaacacacaaaattgataatgagttttccaaggtannnnnnnnnnnnnnnnnnnnnnnnnnnnnnnnnnnnnnnnnnnnnnnnnttttcccacctcttgtagaagctacgaagcacctttccatattattgaggtttcctgtacgtagactgaaatttacaaatcacatgcttacattttatagtaagacaaaatctgccaaagtgtatattgctgttgatataattctgtttgtgattctctctttaaaataaatccaaaggttttcatttcctgcaaaaaa

SEQ ID NO: 417006 - DNA, 437 bp, Homo Sapiens
ggcaatgtcatatgaggcttatcttgaagctgagtgtgaagtggcttcagggtcagagagctgggtcttgcagattcctggtgctttttccaggctctgttgggctctactgagcatggttttgcacagttcccctgcccttaccctggctgtgggaccctgggataggtgtttgaacggagttgtaatagtgtgtgtcagttatgttggatcattttcccaagtgtaattttgagcgttgtgcaaccctgtgaatatgtttctttatgaaaaaagccacatttttgccataattaaatggtaattcctggcaatttttttggaatttccctaaacccccccttttttaacctttttcccaattaaggggaaaactggggtgggcccccccctgtggaaaattttttttatatggcccttttaagggggttcctttg

SEQ ID NO: 417007 - DNA, 424 bp, Homo Sapiens
  misc_feature (197)..(197): n is a, c, g, or t
  misc_feature (228)..(228): n is a, c, g, or t
  misc_feature (254)..(255): n is a, c, g, or t
  misc_feature (277)..(277): n is a, c, g, or t
  misc_feature (297)..(297): n is a, c, g, or t
  misc_feature (315)..(315): n is a, c, g, or t
ggggattatggagttcaaccttatcttgtcaagcttatttcctttcatattcagagtgtttggtcttacttgtttattttttccatacaaacttaagaatcggctttcttcatcctacaagcagaaatcttgttggaattattattgtgaagacaataaatttatatgttaacttacttacatgttttgaatcttcncattcaaaaacatgatatgttcttttacttngtgaagtctactattagagcatttanngaatgtgtaaaagtctctcatngtgggttttgtacattttcntggtaaagtttaatttcnaagaaagtccttgcctcctttttttggttgggaattggaaaaaaggggttaaattctcccttaaaggaaaagggtttttccgggaattggccgggttttaaaatggggg

SEQ ID NO: 417008 - DNA, 759 bp, Homo Sapiens
ggataattgtcacttttaaaaagctgctctaaatagattccctttgagcattataatgagaaccaggaatttaggaagagctctaagaggtgctaaaaattaggatccactcatgctctactagaagagaaatgacagttgacttggagataagggcattaaaaggggcccgtgctccttttctctgagttcccatgtgcacgtcagcaccacttggttctttaccaagggcaagacttgccagacagggctagtacataaagtttctggtgtgattattagtgctgtcacatactttttctcttggctgtttgtctcaaagttaatagcacgtacagtgtattgaagactatagagtttaaatgcgtattgcctaggtaaagaccacacggtatgagaacttaggaagaaacactattcccggaaatcagaagtgtcaggcacactaatagaattatagtcagtgggaacaatggggtatcgcggtgaggtttttgaagagccagccttaagtggaccaggaaatccattaggggaaagcaaggggaagctgcaaagacagtggtgggagagctcctccatagctcctgtctggggtgaggaatgtctgcatttttaccacttctttgggcaaacattctaaaggtcatttttaaaatatttattaaaggggaaggggagtaaaaaattaccaaaaggaaaaattaaaggtagggatgaattaaagggaaaggtggaattggcctaaaagaagaacta

SEQ ID NO: 417009 - DNA, 934 bp, Homo Sapiens
  misc_feature (748)..(748): n is a, c, g, or t
  misc_feature (894)..(894): n is a, c, g, or t
ggaaggatacattctgtcttcaaaggaaaccaaaagatgaaccaagttatatggggtaataggctatgtgcagccacacaccaattcctaataaacacacagagaagggaacagaccactgaatccttggcaagtttctctctttctaggtcagagagctttctgcttctaaacgtggctgaatagcagtccccgtttggcctatcaatcagggacaggaaattttgggtgggacccgaggatatttatctcagccaaggaggtgcaaggaaacaaattaggtttaatctttgattcccccttaaaaacggaccaacaaagaaagagactgctgtttgggtggccggcgtggcccactgcatcccctccccaaaaaacctttttttatcagacacctttttccccctttcgggggatatacgcggggggacgagcggagaaaggacgttgaaaggaagtggaaaaccctatcgtagtcgggtaccccagcaggccgcagggcgcgttctcctcactcacattgtacaacgcacttcctcccgtcgggtgaatgataatgccgcggaaacctctaatttatggatgttaactgggagaagaaaaaatatacttgtctaatggtagaaattagaaagacacagtatttatgcagagcccaacgtatataacggcgctagaaacaaccaccctaatgagacctgtttctttctttatatgtagtacaatcttatcttacttatatatgagnacacaagacgcttctctctctaagacatatcgacgacaccacatccgacggaggaatgaggctatagtccaccaacatctatgtaaaaaacttctccctaccgcggtgaaagagcatgttgttgtctatcatcgttacacaaattncgatggtcttcatcctactcctatgacgtcctcgatcccg

SEQ ID NO: 417010 - DNA, 699 bp, Homo Sapiens
ggagacacatatcctcctaagtgaatttgaattagacactggaaaatttaaaaaggtcagttactatgaagaaggtgtaacaatatttatattaatcagacagcaaagtaacaaactgacttagaggaaggaaaatagtaaaatacaaaagactaagttagcagatcattttgatatccagatgtgctgaaatgatggacactgagaagaaagaatagacaaaacttggcaacagatcttggtatgaaataaatatcccatgagtagtacataaaagcctggagagagaggggaaggattgtaagtgtcatagttctgacagctgctctttcatcctatgcctttaaaacataagggaacaaagaagggaacaaagaaggtagaagcgggggtatggagggttgacttctggctgtccctccctgtttccctttgttaatatattgctagtagacatgtctacttctggttgctgatgacataaaattcacctctatttcttggaagcactattccatgttgtgagctaaaggggattgtactgatcttgaagataacaaatctgtctgcttcaaaggtttcaccgatttttattgctgtatttccaacaacatttccacatatgggtatgattatttaatttggcaaaaataaaatcccgtaaaaggcaggtaatttacctaacccttaaatttttga

SEQ ID NO: 417011 - DNA, 903 bp, Homo Sapiens
  misc_feature (663)..(663): n is a, c, g, or t
ggacagagagtgtcctggccacatccttttgggctatgtgatttggcttctgggtacttcttaggtttcttcccatacccctctccacctgctagatctgatctggacacaatggccttgattgttctcttagagctttccattcactgacccttccattagggacactctgtgcctggaccttgcacatttggcttcttcttaaacttaatggctcagccaaatgccacttcagggagaacttcgctgatcactgtgattgaaatttccactcactcctgctgacacatcaaatttctccatctgtacttcggcacaaaaccaacacacaatccattataatctgttggtgttaatattagtaattttacgaccatcaactagcacgcgttttgtgcctccccacccacctaattattatctgccccacaggatatcggatcaaataagaagaggcaatactatataaaaagtatagaaatcacaaccactctacccaccacctcccaaaccagcctccacaccttattcccaatattctcgcggcagcgtatccccgcaagtcctaccacacgatatctttatacacaatggcccgaacccgcgaataacctacttacccgtaccatcttgtcctttaacagtaaaataatagaaaatccnactgcagagcccccttgttctattcatgctttatcatcaacccaaccctattgacgccacaacttatatgagaatacgaaatctcaataacgatcaccaagccctcaccccatacaccaggcaatacaatctcaacaccgaaaatgattctacccagcacatgaagacaagaaacaaactacaaagaaatcttacccgaccctcacacttccgcaactccacaacccaccgcccgcgccc

SEQ ID NO: 417012 - DNA, 578 bp, Homo Sapiens
ggcagagaagggggaaaatatggactgattcatgagatatttaagaaataggatcagtagatcgtgaggtaaggatgaatgaatcaaggatgactttcagatttttggcttaagctaatgggtggaggccatttacttaaacagggaatactcaaggaggggaaggcttgggaaggagaatcgtgaatcatagttgatcatcacatgaatacacaataagccagtgagagtactaaagtctcagggtgcaaatcacatatatatgtgtgcaaacacaggttctcataaaaatcatacttacggcttactcactaaatcttgctttataagttctggatgattctttcctttcaatagtctcttccaatcctattcatgggcatatctgatcttttcacaaccagtcttgggtgttgtcataaagagagcgcctaccccccgctctagacggcattctcctccctagtttcaccatccttttaccatccccacacctatcactccctccccctttccccacggccactcccaccacactccactcatcccccagcccgaccgcattaccgaacccaccc

SEQ ID NO: 417013 - DNA, 409 bp, Homo Sapiens
gaaaataatgtgactttgcttgattctttctaagtttatttggccatgtttggctgtagaatgctgtcttacactagaatgtgccagaatcagatcctgaaataaagatttaagtggaaagagtttcatttgggaggtgaatttgtaggaagcactataaggggagacagaaagtgaaaattggaagggccggggaactgaccctagggtatatttaataagccaaattttccctctgggggaaagccggggaactccatccttgcctaggggaatgaatggaaaaagaaacccccccctcaaaaaggggtttttaccgggaaggaaattgaaggaatgccccaaattaaccctaaaaagccccctcatttaaaccccataaaacccccagggggttttgcctttccca

SEQ ID NO: 417014 - DNA, 751 bp, Homo Sapiens
  misc_feature (609)..(650): n is a, c, g, or t
  misc_feature (682)..(682): n is a, c, g, or t
ggggaagcctgagtaacgtgaaaatgagctttttcaaggggcatggtaaagtctttctttttagctggttgtaagaagcttttgattcttttcagccagctggtaggaatatagaattttataagcaaaccatcaggaatgatagtgttgtttctgataagcaacatccaaatattttgaccctgcttttagtggtttttttcaaatcttattttgagtcttacttttagtcatagaatagctactgatttgatgcggtctttaactgacttaatatttttacaatttcaatatattttgcattggaatctccagtaatgaatattaaaatatatgtacaatcatttgtagatgatatcaattatattaagacatttcagatgggctattgtagtatttaatgtgccgtattttatggtagaataattctcagtctctggacatcaagattgctttcagtgggaatgaagattaatttacttcagtcctgattttttaggcatcaatgcatgttttcatttttgtcagacttttaccctcttttaatgtaattctcaacttcttatggatttacttcccaatacataaaatccttcaaaacaagaatgnnnnnnnnnnnnnnnnnnnnnnnnnnnnnnnnnnnnnnnnnnaggtccatccagggtgtctggaagattttatngcctagggtatctcccatatcctaaccttggataaagggaaaaataggaataaaacaatggctgggttc

SEQ ID NO: 417015 - DNA, 745 bp, Homo Sapiens
ggcactagctgggccatatctcactctggctggccccctttgggggagtagcttgattctctgtaaagagcctatgcagggagggaaggcaggggcccctagtgtgaaggccctgggctcttaagggtgtgccccttagctgcctgtgcagggaggggaggcaggggcccccagtgtgaaggccctgggctcttaagggtgtgccccttagctgcctgtgcagggaggggaggcaggggcccccagtgtgaaggccctgggctcttaagggtgtgccccttagctgttgctctggaacaaaccaccccaaagcttgatactttgaacgacagacatttattgttgctcatgaatctataagacagcagggttgggggaggttcttgtccggctgcgctctcattttgtgctctgctagtctaggatggcctctgagatggtgtcctccacatggtgtctgatcccagcaggccaccctagtcatgctcacatggggcctggcgaaggttccaagagaacaagtgggagctcccaggccacctgaggcccagactcagaactggcacgtggtcacttctgttgcaccctattagccaaagaaagtcactaggccagaccagatgcaagggctggggggaatagactcccacctctcgatggggaagtgtaaaggtcccaacgcaaggggcagggaattacaccgacatttttgcccattacttctaatcacaccaatgccctacct

SEQ ID NO: 417016 - DNA, 585 bp, Homo Sapiens
  misc_feature (434)..(442): n is a, c, g, or t
ttacttctctagctcataagatggggagaatttaagaacctggggcttatcaacaaagggaagcccagtcatgttcagggtgacagtattgtctaatgataatcagatttagcaaatgtcagttctaccaaatggcccccgccaggaaaaaatgctgaacttttgcagtaagacaaggaactcgctccgggcctaagaaaaaacattttttggggtccggggtggccaattgggccttcccccaccctcgggttaaattcccccacatccacccctgtgggggaaagggcccctaaaaaaacaagggaagggaaaacgaacttttgtaagcccccccatagaaaatataccaattgaaccaatggctcttggggggctcaaaacattaagcgcccacaaaaacaccccaggttccttctcgaaaaccccaaaannnnnnnnnaaaaacccctccacggtatgtcggcaaaaatgtgaaagcggatcgaacatggaacccaaacactgtactccctttttcaaagtaaaatcccaacaaagtcataatagagaagatttaacctatttccttccccaggggaatcc

SEQ ID NO: 417017 - DNA, 765 bp, Homo Sapiens
gggtctcccagatttattttttctcttattcccatcaaaacatctgacttaaaagttggggaactgactttataaattaaaataacgtaaaggaaattacacttttcagttaagtttcctgaggttggtccaactttaaaacctcaaaatgcacaaaaaacagtatctgtagatatgtacaaatatacagtgtatttgtcaaccaatacacaatatatttactcaatctagcagagcctcaataatttttcctatttggcatacacagacagggtaaattactgaagaaagaaattttgttactatttattagttcctcagagcaactgctatgaaagtattttgaaatagaggtcctgccaggtctgtgttaatgactctgtagttcatgtttctagttggcagcatcatctccttataaagcctgctctcaaataggtaaaataggcccatttattttaaactgttaataaattcatgagggcttattaaatatgtaaatagtttatacttagctgttctccttctaagctctttaatagtctaaaaatgagataaacttctgtatttaagcctgataagcagcatagaagattaccaagttttcctgttttaatgttcgccaaccctgaaatttaaacgggtaattatctggtatgaactttggaacaaaaagaacctctaagtttcccccttctttaaaggaaagggaaccttgaatacctacctttgggaaagaaataaatttaaatcaggggatactat

SEQ ID NO: 417018 - DNA, 271 bp, Homo Sapiens
  misc_feature (154)..(154): n is a, c, g, or t
  misc_feature (157)..(157): n is a, c, g, or t
  misc_feature (160)..(160): n is a, c, g, or t
  misc_feature (162)..(162): n is a, c, g, or t
  misc_feature (164)..(165): n is a, c, g, or t
  misc_feature (168)..(168): n is a, c, g, or t
  misc_feature (174)..(174): n is a, c, g, or t
  misc_feature (176)..(177): n is a, c, g, or t
  misc_feature (191)..(191): n is a, c, g, or t
ggtatttatgggaggtggctgctgacccacttgaggtgagatctcagaagcttaactggcctgaaaatgtaacattctgccttttactaactccatcttagtttaatcaaagttcaatctattccttgtttcttctgtgtgcctcagagttatnttntgncnannttntaggtntnntaactcccacccgntggtattaaataatttttaataactggtgcaatgtttaaaaaaagaaacccggttaaaatttggaatgtggtgacataag

SEQ ID NO: 417019 - DNA, 976 bp, Homo Sapiens
  misc_feature (751)..(751): n is a, c, g, or t
  misc_feature (935)..(935): n is a, c, g, or t
ggaaacaatcaaatgaacaaatataattttaggtgccagtagaacaagggagaacaatgaaatagggcaagtgatagagaaagggcagggccagtgagagtttagggaagacttctgtaaaaggtgcattggagttggtatttaaattaagaagggagccagccatgtgataggccctgacatggaaatgggcttgtatgttggaggaacagtatttctcctgtgtggcttgaatccaataatatatggcgacacgggttttacctcttttacgcctaagatccactgtcaaatggtcgactgggttggacgttcattacttgcggtctcttgcggacctcaatcccccccacaccccgcgcctgcgtgccataccaccctcgaagcacggtctatattaagatttttatcttgttgatatttttatcttcacttcttcggcccccttcatggggatatccaatcggggtaatagtgttgttatattcgcccttatatcactcatttaacacattatttcttgtgttaatgtaggagtaacatcccccatgcatttgataggccatacacctgttaccttgaaaatataactcaaacaatcacatatttatcacacatcttggcggtattattatatattccctattactctctttaccttctcgtctacttatttccatcgtcgatctgcgctgccacttaatacgtcggggatctttgcgtccaccctacacttataatcgatacgtgntcttacacttcaacggccccagatgactagaaaggcgactatttattatcgctctacacaagtatggggggcctgagcgcgtagccgtgaaacggggttacaccgctcgtaaatcagaaatgttagtttgtccccttctatttacctcacagccctctcacattaattccttcacctcccatanctatcttcttgttacaattagtgcccactgtcacgctccta

SEQ ID NO: 417020 - DNA, 759 bp, Homo Sapiens
gggggcggcggcgggaggctgggctagtgctgtggcccagatattggccagaagtacagggaggatctcagccagggatggggaggctccaacaagactgaatctgggagccacgcagagcaagaagccaggggaggggccgaaggtaacccagccagtttaatgtctgctcctcaggagagatctgagtctttacctcattcccaacccttatctgagatggctggaaataagcttcagggtcctgaaggtgacagagttggagggatttgtctagaagagcaagcatggtttcccttgaagctgggtagaaacacaggagcagggacatcattcatcaacttgtcagagctcctcatgaggcaagggaagaaaaagggggccacaagtgtaggagattggtcagagtggtgggagaagctatagggaaaggagcaggcccttctgaaaggttggaaggctctgcatacctttggaggagaaaagctaaagacagctgttctataaccctgaagcaaaaggcaaggaagtaggtaccaagggaatgtggggggaattttatctttaaacagggcttggtttactttcctgtttgacccagggaacctgaaccttttgaatcatccttacgccccattgaacctttccccctggaaaagggggaaaacaaaataaaatgttttaatttaacctccccggttggttttggcttcccagggccttttttgggccatttttgtgcccttgcacccgggaaaa

SEQ ID NO: 417021 - DNA, 1072 bp, Homo Sapiens
  misc_feature (222)..(231): n is a, c, g, or t
  misc_feature (289)..(352): n is a, c, g, or t
  misc_feature (738)..(791): n is a, c, g, or t
  misc_feature (800)..(800): n is a, c, g, or t
  misc_feature (968)..(968): n is a, c, g, or t
ggacaagcctttacttaggtggtcttcctttagtcttaatcacatttgcaattaaaagcatagactagcttgtgtatatgtgtgtgagtagctgtgtgtagggggtggagctgggtctctttcactttagattagtagggatactagaagaaaggcagaaaaacgaatattcagttttctagctttagcaatgtgttaatttcaagttagaacagtttgtannnnnnnnnnctttctcttgagtaatcatgggcaatacagtatgaaatgtatcatagatgtttaatgnnnnnnnnnnnnnnnnnnnnnnnnnnnnnnnnnnnnnnnnnnnnnnnnnnnnnnnnnnnnnnnntgaggtgggttggattaaggaggtaaggagtatcgagaccgatccgagactaaaacggatgaagacctcatctcgtaaataagatactaaaactcattagccctgagtgtttggcccacgaagtagcgctcttgatagatcccaatattaaaatgatagtgaaagtctgctaagtgctatgggatcaaatcgtttcttttacaataactttggtatataagtatattgtactcctactggtgtgtttatatgatacgcatagaagtcaaacttaatattatttcgttctcttgagtaaaatatattccaatattatgtgcatgaggagagcgaaccaatacgaagctcaatcatggcaaaacatctatcggtcgtgattgtctatnnnnnnnnnnnnnnnnnnnnnnnnnnnnnnnnnnnnnnnnnnnnnnnnnnnnnncgtgatgangtttagtgatcacaatcttgatatatgcaaaagtgaagcttgatacacaaactaaccttcaatttgtcaacacactcgtatctgtgattcttttttatcgtgcccccaggtagacaatgtatcctagaatactaaactatattctccttcattaatacagaactcctncaacacgaccatcccacgagaaacatgatcctatgatatgcatggacacgctcgcagagtccgacgatttttatatttacgaggaaactagatatatcgttgaa

SEQ ID NO: 417022 - DNA, 547 bp, Homo Sapiens
  misc_feature (317)..(381): n is a, c, g, or t
  misc_feature (445)..(507): n is a, c, g, or t
gaaaaaatgttaattgcttgactcttggctcctctttttcttagcctcatgcttctctgccctggttcgctctgggccagcctcttgtcaagcttttgaacacatggttgatgtctctttagaaactccatgaccacactaagagcaggggttccagcctgccctctccatggggtaaatggagagaaaacatttcaactcatgaatcttgtttctccataccttaacccaaccccaaacccctccttttttgtgaaatgcccacaaaaacccattcctcacaggggtcaataaaagtttgagaaatccccataaannnnnnnnnnnnnnnnnnnnnnnnnnnnnnnnnnnnnnnnnnnnnnnnnnnnnnnnnnnnnnnnntttgttaaggggggggaaaagggaaatgggaaacccaagtttttaaaaccccccatttggcccnnnnnnnnnnnnnnnnnnnnnnnnnnnnnnnnnnnnnnnnnnnnnnnnnnnnnnnnnnnnnnnaaatttgggaaatttctcggggagggggcccaaaaagggg

SEQ ID NO: 417023 - DNA, 956 bp, Homo Sapiens
  misc_feature (781)..(781): n is a, c, g, or t
gggacacagcttctgcggtcttcgcttcttctctctctctgtcatctcttgggacagtggtttattcccatccagcacctgcaggaatttgtgaagctcctgctgcagtgtaaactgaccttcaaccccagcactgggctttatttattgaaactacttctcttggcgggggtgtagggagaggttcatgaggaggtcagtggggtgagaagagtgggatccatgccaccaactgcatcctcaagcatttgaaagaaaacaaatctacaccagatctgctaaaactcgaaacctgagtctctaaggtgggtgaggcttgatccaagttccgaccccctctcccccaccgcggtgactggggcaggggtaaggtgcagtttggagaagaggaccctgaaagcaggaaggttggggtgcagatatgcgtgcgtccccctatcctagcgctgaaaacaccggtcttcacttggcgccctcccgattctgtggcggcccccctgtgcgtaaacaatgtaccttctcattgcaccaactctacaccgtcaataaagtatttcaaccgtgtctccgtcgtcttgatacctcgttttagtgttccttatatcttaacaccctttattttatagctccacccactgctatttcactatttcctcgctctccccagaatcctactccaggcccatcaagcatcatatcctgacatatcaataccgatcgtctaacaccaccctcttctttccccgcaacaagcacgatttatattactaccacgtaccgnctctttacccagccgccaccatcatacgccctacgaatgtctccacagtgggtgatcgtaatattcccacgccgcataaatacaccgctatctgtgcgtctccttcgtttctacttccatatagatctgagcgtgaacataacttgcttttattatcgcctccccgttctacatt

SEQ ID NO: 417024 - DNA, 403 bp, Homo Sapiens
  misc_feature (47)..(154): n is a, c, g, or t
  misc_feature (289)..(341): n is a, c, g, or t
ggaagcagtggtatcaacgcagagggcccattacggccggggagagnnnnnnnnnnnnnnnnnnnnnnnnnnnnnnnnnnnnnnnnnnnnnnnnnnnnnnnnnnnnnnnnnnnnnnnnnnnnnnnnnnnnnnnnnnnnnnnnnnnnnnnnnnnnccttgtcggcccccccggcccccaaaaagctttcaaaacaattctttgggcgcgcgggcccaaaaggaaagtgaacatggccaaacctgtttccaaggaaatccgggccaaggacaagcgcttggattctccccnnnnnnnnnnnnnnnnnnnnnnnnnnnnnnnnnnnnnnnnnnnnnnnnnnnnntggaattttagagggccatttccggggaatttttccaaaaggggagttccaaggcggagctc

SEQ ID NO: 417025 - DNA, 430 bp, Homo Sapiens
  misc_feature (86)..(171): n is a, c, g, or t
accacatcaccaactaaaaacactttttcttctactatccaaatggcccctctgctgccgacccacccaccacgcctccacctttnnnnnnnnnnnnnnnnnnnnnnnnnnnnnnnnnnnnnnnnnnnnnnnnnnnnnnnnnnnnnnnnnnnnnnnnnnnnnnnnnnnnnngtccgcttccccggggcgggccccggcgggcctccccacgacgccgcccaccctcatccccttacgcgcgccatccctcccgcccgtacgcgctctccctcccgcttgcgcgctcgccggcgccaggtgtcgtagccgttcttcgcccgcagtcccagttccactccacccccccctactcaattaccgccaacctgtgagcgatctcccggtcgatcgtcgacctcttgtccctgtgtccccgatcgcctacctcaac

SEQ ID NO: 417026 - DNA, 123 bp, Homo Sapiens
gcctatagagctaaaagtcatgtagctaagcaatatttaactggacttccactagcttcctgctggataacatctctgacatataggtcatcatagtaatggttgtttaagttgtttttcaag

SEQ ID NO: 417027 - DNA, 509 bp, Homo Sapiens
atcagataaaaacattggaagaaaggaaaactacagaccaatacctctcatgaacgtagatcagcggtctccaacctttttggcaacaggtaccagttttatggaagataatttttccatgggacatggtgggtggggcagatggtttcgggatgaaactgttgcacctcagatcatcaggcattagttagattctcataaggagcttgcaacctagatccctcatatgtgctgttcacaatagggttcacactcctgagaatctaatgctgtcgctgatctgactagaggcagagctcaggtggcaatcctggctcacctgccactcacctcctgctatgtggcctgatactgttactagtcccaggcctgagggttagggatccctgatataaatgcaactattagcaaaatattagcaaattgaatttatgaataaatgtgaatctgtgaatacaccacaatttaacaggatttatttcatatgtgcaaaacaagtttaacatttt

SEQ ID NO: 417028 - DNA, 266 bp, Homo Sapiens
ggcattaagaaaaaaattgttttacaacaataattttgccccattgttttttaaattagattgtgtatagttacctaaattgtggtttcattttactcaccagaccatattaagctgtggaaccattagaaattggtgacagacaacactgataagtgggcattggcagcactaatagttatttgttgctgactatgcaacaaaaaagctaaaagctataaaacataatgcctgaatttttcatttgttctataagtagctatcct

SEQ ID NO: 417029 - DNA, 573 bp, Homo Sapiens
ggggtggtttcagagctcccagaactttgcacataactccctatgtcagagtgggcagaaaggatggaatgtcagctctggggagaatctaaagatccaaggaactgagctgtgaaaatcagctttgaggtcttcagttatttgctggacaattccctgatgatattaaagcacccagtagaagaatgtgccttatcaaaaacatatatcaatcatgatgaacctttaaaatatattagttgattgcttacggctgttttagactaaaagaccaacacaaaatggtaagaatagactagtagtccttatacatgctaaataacaatcaagagttcatattaatgcacgtaactttttgcagttattgtcagaagcatactttgtgcatacggcatccattcttaaacttttgaccttcacagctacagcatgtctattgtctttacaactccagttttctctcataaagacctaaatgaccttctgggtactatataagccccagactttgaaactggctttacttacatactataatagatatttttataaagaccagtaagatacataaaa

SEQ ID NO: 417030 - DNA, 231 bp, Homo Sapiens
  misc_feature (61)..(105): n is a, c, g, or t
ggcaagcataagcatatctatatttctgactggtgtctctttgagaaggatgggaagtagnnnnnnnnnnnnnnnnnnnnnnnnnnnnnnnnnnnnnnnnnnnnngcagggatctccactatgtatgttttcactttagaactgttgagcccatgcttaattttaatctagaagtctttaaatggtgagacagtgactggagcatgccaatcagagagcatttgtcttcag

SEQ ID NO: 417031 - DNA, 425 bp, Homo Sapiens
  misc_feature (155)..(155): n is a, c, g, or t
ggactgcattgtcattctgacaggaggcaggcctcagtagttgcagtgagtgcatttactaatataaggatccttctttgtagtgacaacaaaaatgagattgtaacttaatcaaatatgagtcagatatagtaattcctgatattgcagatganagagcagggtcttttcaagtgcttgctacaactgactaaatttgaagctttttatgtaaaagttcttctcccagatattttaaaccagtatgttaattatttcctagaatgaataattctcctttttttgatagatttttgaaattgtttacttactacttacatactttggacaaatatggttttctaatcccagccattaatttgaaacaaatatttaaaaataaaattggttgaaataaaaggttatagaaaagccccctggtggcc

SEQ ID NO: 417032 - DNA, 819 bp, Homo Sapiens
ggggagttttctaatataaacacatttgccgagacagaggcagtggaatacgcacaagacactaaacacaaagcaggcatatttaatgtagtatggaaaaacaaatgacaaccccatatttacaggatattgacctgtttttctaaccccttcctctcaaagaaaacccttttccttaaagaaaggatgaaaggtgtgcttgtttctaaacttgatttgaggtcctgcttaacataaaccctgaccttaaattcctgggtgaggcccatctcccatcccagatgtcaagtttagaaaccaaccttgaaagaatggagaatttttctgttgtgtgtttcaagtagccaattctttgatggagataggtgcgaccaaatgtggaggtttatggacactgtgggttattctgccagggaattcactgttgagaaaatgttggtttgtagctcgtcggcttcgttcaggggattggaaaggatcaagtggcctgtgccgagaattagtgacgtgggagaaagtggtttgagaaagaagtttggaagcgttctgagaattaaagtttgggtgcatgcaggataagttggtggtgaggagacataaaataccgttgcatttggtgtgggggttgttgccagggcccttggctcgggccataagggtgtgaaaacgggcagacccgcccagggatgtagccctagagaaaggtggcgcggaggcgtagctgagctgttgcgaaggaagagcgaagaaagaaggagtgtgcgtcgagaagaaggaattcgtggcacggatacgatgaaaaccggaaagcaaggaaac

SEQ ID NO: 417033 - DNA, 774 bp, Homo Sapiens
gggtttaaagtatgaaaagggagttgaataaaatagtgtgtcaattaattttactgtgtaaagtataaccaatccaaaaccagtgtgctaatgaatgaaacaataatagcgacggtagtgggcttcgtttcatcattagcgacatggtgggcggctagacgtaagagtaaagctgaggtacaaagctcagagctcgataatgtagagaaatctctaaaatactatagagatatagtagatgacttaggaattaaattaaaagaagctaccaacgagctttataaaacgtctaatctgcatcgcgaggctatcgatgagctaactgctgctaagaaggtaatcatcaatctagaacagaaattagagaaattggctctacagaataaggagttgattgatgaactaaggaaatataaacagctaaatggcaagagagaatgagaacacagttagttagacaagctcagagtcaactccatgtacaggaatggcctatcaagaataataaaggacctggagtaaaaaagtatctgaacagccgtaagactaggtgagggatatgcgtggtgtatggctttttgtgtactggtgtgtacaaaaagtgtgtactgattataaactgtccaatccctttaaagaaaaactgggaagagtttttagcctccaatggaaatgccgagtaaaagaagcttccctggttaattgaaaccccggaagggtaagggagaatatcctctcccaccaatgggaacactttgggggaaaaaagggaaa

SEQ ID NO: 417034 - DNA, 722 bp, Homo Sapiens
  misc_feature (262)..(270): n is a, c, g, or t
gggggagtaaagaacagattacccatgaacagaagtcttactgccttgtctgtattctttctaataagtaggagtgaaatgagggagaatctcatttgcctaaagagaatgggacattgtaagctttgtcataaaatctgagggtttaatgttgatgcacgtattcatatacctgccactcattagcctctactataaccttaacttgagggtatgtgcctagtagacattcaaactcctcaaagtattatagtttctgggnnnnnnnnnctgggcatcttataaaattgcacttctctcttcccttgcagttaggcatggctgtaggagttgctttgcccacccagttaaatgccaggctatctcttttgggaaaacaccttagaaccagttctcaatcactatgttgtcttctcctctgccacaacaatctgcagtgatttcgagtgggctgttctgccagcctgggcactgaagagagaaacagtacagtttccagctcatccataatgagaatttcatgacagtaagaaacacatatttcttgttttaacgtattgggggtttgggaaacttttgattgttactgctgcataatctagatcatcctgacaaaaagcacacacaaggaaaaaaacacttggctccccatttgttgaagataatcccctaaaatgggatgaatgacacccttgcccatgtggcccgagggacccttttag

SEQ ID NO: 417035 - DNA, 686 bp, Homo Sapiens
ggggaggtgtttatatatagtgttttgttttttcttcaaaagctagcctcatgtcagactcattgagtcaagctctccttctctatcctttctatccctcccgctcccagttgaagacaagtgttttcaacctcatacctggaggttacagtgagacatggattctagaagaggttgagaatatccctaggtctcacatcgtaagttcacttagctgaatgacaggatttggcaggaaaagaaacttaaagatgagaaatccattctctgaaaagtattttgtgcttttgtgtttcttttgttttctaggaaaattcatccctttgaaacattctcgccttgtttaagccaaactaatggaaattttggtcaggatagatccaagagtagttctctcttctaatggccaagtgtggtgacagtcaaatgatgggtagaaagggggaagtaaaacatgaggcaggatgagcttgggaacaccattaccagcgatttcctttccatctcagactgaatagtacatgtttaagcaaacagtgaactttctctttatcaaatgctcttttttctgaagtattagttttcagagagtattaattagtagttccatttacaagttaattgtttgcatttatgtgttaatcttgtctactccgatttcatagctgttgatagagtttgggggc

SEQ ID NO: 417036 - DNA, 202 bp, Homo Sapiens
ggcccccttcacttgtagccaaatcagacagaagtgtgggtcacctggggaccctctatttgcagttggcgtctgaagtggagcatcttgtgggatggaaccctttgcctgtggggtcggtgctaactccaggtagtcagcatcataactgaactgtaggacacccaactggtgtcgaaagttggagaattggttggtgtgg

SEQ ID NO: 417037 - DNA, 537 bp, Homo Sapiens
ggcagtggatgacaaagtctgtctcaatgcagtgttaagaagctagctgttgccacagacataagccatgttctctaatatcagtttcatcagtaatagtgatatatccatctgcctgaaggcctgcgcctatttctgagttagtagaaacaggagagaatggtgatgtttcttgtgcttcctcaaaccccagctcaacagtgcttgctcgttaaatagtatggacagtttataaaatagcagctctttggaattctaatcaaaaaggagggcaactctgaccattgtgaattaacctaaaacaacatgccttctctgaatgcagtctgtttttctgctatacagtgtaaacatttttaaacttaagatttgttttgcttttacacgtttttcttggatgtccgactggtcatttcatttttatttgacatcatgctaaaacaggtaacacagcatccttgtaggcttcctgtataaacaacagccagttataaaatattatagaaaaaaagatcctatttataataccataacttc

SEQ ID NO: 417038 - DNA, 487 bp, Homo Sapiens
ggatgaccggccagttccctaagtaataatggggaaaggcaggctcaggcagaagctgatgtctccccggggaaggagaatgaattctggattacgaatggagaccattttccagggctgctttgatctcttgccagatccagggctggagaccagcaagttgggactccaaggaaaaccggacttcgcagcagtctctagcagctgtcttcccaaacgggtgtgtgcctgcaaagccggggcggccctacggtccagcccagcttctgcccagcgcctgtgcccttgcgcttctgcccctgcgagtcctgcctcccgcttttcctccccacccaaaacagagctgagttggcggccgaaaatgagtaagtgtgaagtgagactgcacactagtctttgttgagggtttgtttttgccaagcagcttggtggagaagattgcattgcttggttatttttaaacctggatttctggaattttatttgg

SEQ ID NO: 417039 - DNA, 298 bp, Homo Sapiens
ggctgttaggtaacctaaatcatacccaggggcataaatgcacgccacaagagtaggcctaaactggactttccccagaatttagacagagaagtgacagatgttatattcacagagaatcacagtgagtctcagtgtgatgtgaacttctaaatctagtaagtttcaggtttagtaacggactcctttctttctctagaaactcatttccaaaaaaaggaatataaaagtggctataaaacagaataaaggacttctggttttaactctaatatgccaagagcttgcaagttgctcc

SEQ ID NO: 417040 - DNA, 941 bp, Homo Sapiens
  misc_feature (788)..(788): n is a, c, g, or t
ggtaaagatgctgaggaagaaagcacattcaaaattaactgcaaggagataagcagtgttctttaggagagatgcaggtgtccaggaatttgtatctagccagtaggtatacagtttatgggataacagtatgaaaacgctgactacacttgaactattataagcatagctccaaacctccacgtcaagctttcttttcagacataaagctaggtgaattctctatgtatggcctatataaatatatgccaaaggccaacttgtggccaaagtaatgcatagttctcattttcacagatacataataatgcatgccaaggtacaggtttacagttgccgtccaagagaaaacattgatttccagtcagtagtgagttccactccccgggacgaactcggagcctcattccaaggagaattttaaggagccttaagtaccctaataattggaaagttaaggaaagctttatcccgtaaggatgcccggtgagatacccccttatgacctgctggagctcaataccatctattggacggggtagacccccgcgtccgtatgcgctgtacaattgcacagaacctgctataagattgtgctgctaagattaaacggctagatctaagaacgtacgttcgtatgattatccatcccgtcggacgctatcattacagatggaggccctgacatggcgccccccccatgtggttgcacactcgccgctcaaactcgatgcttgatcgcgagagcaccgctgtgtcccgacggcgatcgctgaacatccctatcnattagaccaagccgcagtatctatgactttagtaacctcaactctccaaattataacgccgcacggttattatgtcttaccttctaagcaaatgcgtatatatagactatacgagctatgcttcgagttctttaatctgtctccgctgcatta

SEQ ID NO: 417041 - DNA, 731 bp, Homo Sapiens
ggactgtaaaactgatgaaaactttaagccaatcttaatgcactagcctctgtagtgtaaggaagtgtgagaaggagtttcttaatgagtttacgcgtttaaatcaagcatattataagttatatgccatgtgttgaaggcttttctatttatatatataaagatttttagtatttgtttttagtgtccttgtgttgcaataatttaactcctttgactcagttgctgaaaatatttcttctattaagaagtgctcttgacttcaacacccaaacactgaaaatcatgtcaatgttacccaaagataagtttttatacagatacacaccttataagttctgatttattttcttactcattatgctgtgttctaaataaatcatgaatgagaagagtgctttattgtgaaattatttaaaactgtcctttaaaagaaaaagaggaaacgatgaacaaaaactaatctaattgccaagttagaattcattatttaatttacctcctatgcaatgattaatgctgcaaaatgtatggttatgttaccgtatattcacaaaagaaatattattacaagggtttcagaggtagccaattgcattcttttggaaatttactgtactgtttcaatgtgttaagtgccttgttgtaaagtaaaattttaagtctagattcattattttcctgacatatatttttcattatgatatctactgtatgctatttgtgatagc

SEQ ID NO: 417042 - DNA, 289 bp, Homo Sapiens
ggcagtggtcttatccaagggaaaatgcacaacagagagatggaaacacaggtccagaccttggcaaagatagagaggtcaggattaaaggagtattttggatagcaattaaaaggctgataatgcaaaccatggaagtggaattaaattgcctaagcagggagtagagggaaaggagatgagagagaatgacaaaaattcaggcgatgctcagacacaaagatgcaaatgtaagaagaataaagcactaaagtatagtctgggggaataatgaaccctattacctaaa

SEQ ID NO: 417043 - DNA, 363 bp, Homo Sapiens
ggctagaattcgacagtgtcaccaagcagatgggattctgcaaaagacaggactatatgcccatgaccacatttgccatcatttgattttaaattgacagcagttagggcggaggggctccttcactgcagtccctcagggagcctcacccccctcccgggctctcaaaccctctggccagctccttgtgcttctcctgtggtgatgaagggcagtttcttgagtgccacatagttcctgagatctacagagacatcttgaccttggaaattcctatcgttcttagaaaatccctagttctggagctaaagtaggaaaaattatagagctgagtagttgaggagcagtttaattaaaaacgac

SEQ ID NO: 417044 - DNA, 349 bp, Homo Sapiens
ggagagataattcattaggcccgagagctgctccagagtgggattagaacccgtgtagtacatagtcacattaaactgagatcggctaattaatcgctcttctccgtgtaactgagcgatcgcgctccttccccgaggaattgcaatttcatggttcctaatgatggtgcgattacattatgtggatcacttaggctgtgggtgtcaggagcggtacttggagcctctctcggtggggatgggagaagtcacttctaaaaccggggagatggaggaaagcagttagaatgtctgttactaatttttgttaacgtgctgctgtttcctacatctcattcagttattcccg

SEQ ID NO: 417045 - DNA, 800 bp, Homo Sapiens
ggattgtaccttctctatgtttagatatatttagatacagaaatactactgggttgcaactgcctacagtattcagtaccgtcacatactgtaaaggtttgtagcccaggaacaatcagctataccatatagaccaggtgtggagtaggctataccatctaggtttgtataagcacaccccgtaatgcttgcccaatgatgaaattgcctagtgacacatttccaacgttaaggctattcacaatgttaactgatgcatgactctacatacctgatgagagagattttttgttttcattaggtatctgcttttgcttttacatgtctgatgatctggtcgggtgggtggttctcctgttctgagtcagctcagctgatttcagtttcccatgtgtggccacctggaggggtgactggccacaggatgatctgggatggcctcaccgtcatgactggcggttggctggcttatcagctgagctgaggtaacagggatgattaggccacatgtctgtcatcttccaggaagctcgtatgggcttcttcagagggcagtcataattctaaagcctaagacacaagtatttttcaaagtctcagtttgctccatatatggtaccgcaagagattttcaaaaccccctgtcctgccccagccctgggagcttgctctcccctgaatccctaaaccctgaatcctgacaagccttatccccagtgatatttaggagaaaggggatggccaatattttaaggggatcctcctaaatggaatggccacccttgcaatttttctgaaat

SEQ ID NO: 417046 - DNA, 406 bp, Homo Sapiens
ggatgggttttgtgttacataatcaattctaccatatagctgcttcgatgtaacttactggcaagagtgagtgcttggcctgtatttcagaaatttctagagtcctgagaaaccactgggggtgtggctgtgccatctggcaacttcctgagagccccctaatctgggagaatttatgaagatgctcagggatagatgtacttcacatttcggctgttgaacggccctgtatgcaaataggaattgtattagaatgaagaatgagttttgatatatggggtgcatgcgtgtttacaattcttaatcttgatgagtcatgaagagtatttccacatttcaataagtgaacattctggttattgtttacagtatttctctgtccacagcttttgaaacaccttttatt

SEQ ID NO: 417047 - DNA, 753 bp, Homo Sapiens
  misc_feature (68)..(77): n is a, c, g, or t
  misc_feature (396)..(454): n is a, c, g, or t
ggggttttgctcaataaaactgttacttaaaaagaaacttattttaaaagaagagataaggtgatctnnnnnnnnnngtgataaagaagatcagcaaaagtacatctacaatggcaggtcctgaagaagaaaaccaaagcagtaatacagaacaaataccaaaaacaactcaaaagaactctcctaaaatgaaagacagcttgaaactacatattgaaaggatatcctgtgtatctaggaacactgaccctctaaagaaaagggaaaaaatcatttgatcacccacattttttaaaaagaccaaatcgcaagtaggaaaaagaaaatcagattgtgatcagattttgtgacagcaatgcttttttccagaagtccacagagtaactaaggtatgcnnnnnnnnnnnnnnnnnnnnnnnnnnnnnnnnnnnnnnnnnnnnnnnnnnnnnnnnnnngtacttttgtggaatatgggaataatgcacctgtgggcaccttctgcatcacgtactatagaatgagcttcagatgaccaaaaagactgaagagacgttaacgtaaggtctggtggataacccaatcatttttgagggtaaacgtctcattattgaaccctaaactatctgcaacccccaccctttaatattgaattgaccccccaggcaatgccaaaatccaaaactgaagaaaaccctacaggggacccaactttggaacagaacacccaacccctgggtttcctttcccttccaag

SEQ ID NO: 417048 - DNA, 545 bp, Homo Sapiens
gggtgctatttaattattattgtcgttgtttgcaaaatgtatttttggaatgttaacctcttttcatacctgcatacttgaacttgtcttttgtgtgggggccttaaaattcataataggaagtggaggcagtgaaaggaagtaagaaaaggaaattatgctaaaagatggtttgcaaatttaaattctttaaatgaacatatcacaaaatgttgttaagacccaggatgtccgttaagaatgtgtcttggcaaccttaatttgcatgttagtatatattttcttagttacacagttttattttggtatttgcttaaaaaatgtaataccattgtagaaattaccctatgtactgatatatttactacctcttctctagagaagacaatctgtctttaaagggaaaaacactggtcaataagtagtgatcaaaattatcactattctggctaaccttgctgcaaagctaaatacatagattattaaattgccttcctttaatttaactgttccaatgcgtgcacttctctattctgtatgaatta

SEQ ID NO: 417049 - DNA, 727 bp, Homo Sapiens
  misc_feature (710)..(710): n is a, c, g, or t
gggacctctagtggttaacagcctccctgactcccaggacagccccctacagacccctgtccttcatggagaaaattccaggactccttgccccgtttgttgggtgtccctgtggagttttacaggacagaggtgctagggaaagatagattcctgcagggtatgcagtgttccctgcttttctcctctgcaagaatggtttcatctgaaatgaaggaaatttcatttaaagcctcagctgattaccaccaccaactgagcaatgttagctgcatggcctgggctcagagaaggcgggggttacccatgcccaccagccacctgccagtacctgaggcccttctcccagtgctgcaccatccaaggaatggaaaggatacttgctcttcgattttctgcaggagactcttgtgaatgccgagctgcatcgaaggaaccagggggcctgatatttgaaccagcctctgtcctcatactcagttgaggctgtgctcccagggctgctaggtcacacaactccaagagacaaattcacaccatcagttcatgtgaacaggatcccctgaaagtgtgcagtgcacaacctgtgcagccctatgtgacaggcttgtggccccctttttctctcatgaggggctctgacaagctgatgaatgatgcccctgctccctgtgtttctaccccagcttcaaagggaaaccatgcttggntcttcttggacaaatcc

SEQ ID NO: 417050 - DNA, 720 bp, Homo Sapiens
  misc_feature (72)..(93): n is a, c, g, or t
  misc_feature (413)..(590): n is a, c, g, or t
gggccattcctccttttccagatgagagatctgaggccagagttcccaaactatactctaaagattcttaannnnnnnnnnnnnnnnnnnnnnttctttaaaagagacaaaagcaagttacatgttctatatggaaatgtttttgtaaatgatatttgaattgattattgatcagattatgagaaataaactcaagctggagcttgtggaccccccgagggagagccaccgaatctaggaagattcttctttgcgacataagagaaagaacgggaaaggcagtgaaacagacaccactgagctgggcagactctggcttgccctgaagcaggtttgtaggaatgggtgtctttaaaacaagattttagttactgaattgaaaatgcctagatatagaaataagtgacttcttnnnnnnnnnnnnnnnnnnnnnnnnnnnnnnnnnnnnnnnnnnnnnnnnnnnnnnnnnnnnnnnnnnnnnnnnnnnnnnnnnnnnnnnnnnnnnnnnnnnnnnnnnnnnnnnnnnnnnnnnnnnnnnnnnnnnnnnnnnnnnnnnnnnnnnnnnnnnnnnnnnnnnnnnnnnnnnnnnnggaaaacgggggcaggaaaaatttccttggacccccaaaaagcaaaagggtggccattgaacccaaaattggtcccccctgcgcccctcaggccgggggggaaacaaaacaaaacccctcgtttggggag

SEQ ID NO: 417051 - DNA, 345 bp, Homo Sapiens
ggatgtccagggtccctctgagtcacggagctcatggtgatgtcgtcaagattctggtcaacgtggtagatacatctttacatccaaacacctctctctctcctctgccttctttctttcctggactcctgatacccccagctcagggctgaaaaggaagcattttctcaatggaaaggacaaagaggcagtcttctctcagaagagacatctccatctatagcctggtgggccacaccagttctgtctagaaggacacaaacttctgtcttcttttgtctacccaattagcctcctggctcatcttagaaggggaagggcacaggggagcatgttttaagaagg

SEQ ID NO: 417052 - DNA, 1009 bp, Homo Sapiens
  misc_feature (634)..(634): n is a, c, g, or t
  misc_feature (820)..(820): n is a, c, g, or t
  misc_feature (880)..(880): n is a, c, g, or t
  misc_feature (942)..(942): n is a, c, g, or t
ggatagtagccatagttggtagaccaaacgtagggaagtcaactttttttaatcgattgattcaaagaagagatgccatcgtagattcggttagtggagtgacacgtgatagaaactacggcaagtcagagtggaatggaagagagttctcagtgattgacactggaggatatataaaaggatctgacgatgtttttgaaggtgagattagacgtcaagtatctttagctattgaagagtgtgatgtagtaatatttgtagtagatgtagaagagggtattacacctatggatgccgaagtacctcgcgttattgcgcagggagactgaaacctgtatttcgtgagctgtcgcacaaagtggctacagctgcgcacctgtactggactgatcaccttgcgaggttcctataattctaagggcttacggaaaggcagattacccctacccgcctggggaaccgaattgcggatgcggaggctaccttgcgaagaacggtgcattagctgcgggttgggtggctgatacttgtaatattagtcgtccctggccgtcgtgtcacctctcctaccgcccgtctgtgcggtcgctgcgcagggatgacacgcgacatactgggcattctgtgtcgccgnttggtgcgttgcagttattgtatatagcgcggtcacttgcttcggaggccgagcgtgctcgtatgtaacccaccttgcctcctcgtcggccaaccaccaccattagcaccaacccgcgacacacaagaccagagaaatatgcacgagctaagtgcggcgcacttaattgtctacagctcgcggccnttacactcgtgtctcgcatctgtagcagcctagatatatgtgtatcttcactccgcttantattgacagttgacctttggaatctgatcatcttacattgttctacgttatacatcaccatnagccggtcgttctcgtcgtatacatgcataatagtgtttgagtatgtggagaatattgagtaggaga

SEQ ID NO: 417053 - DNA, 666 bp, Homo Sapiens
  misc_feature (136)..(209): n is a, c, g, or t
gaaaacagtttgttgcttttagacttgcttttaatctttgtaagtaggatcagagcagcttttaatctaaggcaagacttactgtaattattggtaatttttataaaccaatgttgtctagtttggtaactgttannnnnnnnnnnnnnnnnnnnnnnnnnnnnnnnnnnnnnnnnnnnnnnnnnnnnnnnnnnnnnnnnnnnnnnnnntgtacctcattagaatagaattaaggtaccaggtttgaaaatgcagttctaaatcccatttgaccccactattaaggctctgtccttatgagtactctgttacgaattcactagatgtctaagagcacaaagcattttattccctgaaaccctggggttgcttgccctgctacttttccatagtacctttcctggccttcagtggtttgctcacataagttcgtcagtacttgtttgaatcctgaagaccctgtatagaatctctggagattcaaggaatctccagaatctctagatgccaatcctggattagaagcccaataatcctccttcctggaaatctcccggttctttaaaatccctcagagtctcagggccgaaccaacccacgggtttttggccataaaaattcggggcccctttacagaaatttcttttttctcccgaatacgctctc

SEQ ID NO: 417054 - DNA, 464 bp, Homo Sapiens
gggaggtctcgtgtagggcactggtgatgaggagggagctgtgtacgaggggcgagccagccctgcctgttttactcttgtcttgagctggctttatgcccaggaagtgggtggcaacatctcctcttactccccagattgtggggagaactctaagagctgtagttccactggatgatgagttaaatcactctggaggccttagctggctggtgagctctttttctgtggggaaaatgccacttgtgaattgaacagccatcctttaagtgaatattcggcagtcagtcttcattataggcagtggccaaccagattggtgcttttcagcctttgttccctggagtcccaggacccgcgagagaagttcctggctcctctacttgcagtcaccctccacagcttcatctttctttttatttgaggttttctcctgaattgtgtttgaaaaatatattgctgct

SEQ ID NO: 417055 - DNA, 672 bp, Homo Sapiens
gggcagcttgcctctcagtggttgctagggccactcagggaagaggaactccaaaacctgacatgttggcaaaaaggttttcaaaagtactgcttcccttctcatccatctcttctggaattggcaaatgccctcaggggtcaagcaaccaccaataacgggtttacttttctgggagctgaacttctgatgtgtggatgggaggggagatggcatatggcctggtgaaataggtaagtagcttttttggcgggggttcatgcaggcttctggcttacattaagagctataaaaatattgcctggttttctggcaccagtgcctactcaaaatgtatcatcggaacttatcttcagaacttatttagaatattatcctggggataaatgctagtattaccctcaaatattctgttcttcaataattacctggtaggaccccatggccctctcctgtcttcagctccccagcccatgtctgtatccttctcacaatttctatggttggctgggaaaacgacctcaattggaagttccctcttgtcagttgtgtgtagtcatgggtttttagtcattggatttgcccattaatttattctcatttgttatatattttcccagaattcttcattgtttttttctagcattcattttggttacttcccagtgtttt

SEQ ID NO: 417056 - DNA, 723 bp, Homo Sapiens
gggcctcattggctaaaggtagtcatgggtacaaccacagtgtaggagtggggaatacccaaaggaatgagtacaggcagatcaataattcttgtcattttttgcaaaaaaatctgccacgagcatcctttttttctctattttacttgcccctttgccttctgctagccccagtggtttgcaactgtgtatgtatgagtgtatgttcctgtcttcctatagaagagagtattgaaaggaagaaggatttgggatcaggggttgcaatgaagatgacttgagagaggattttgagatatcatttgtctctctgctttaatttgcagactagcgtggatgattttgagtcggtttgaacaaaagccaccaccagtaccatcacacgcaaagccttttatctttttctaatgcatttacatatactatctcattggctcttccttgttcttaaaacaagagaaaaaatacgttactgtactttatatagtatgcagttgttaatttgtcaacctctcattaaagttagactctggctgctaatttctgtcaaactgtgttcttccttttctaaagttctgctcttgcaactgtattttaagatgaaaggcaaagtaataaagaaagttcattggttctctgccactgggacttgataattaacaggggggagatggactgtcagtggctattggcactttggggaggggtcagaagcttgagcct

SEQ ID NO: 417057 - DNA, 681 bp, Homo Sapiens
ctggcaaatgaaaattcttacaactactggatcttctggtctgtgtatttatatatgttgtgtgtgtgagatataaaagagctttgattaataggttaaaaaataataagagcttaaatcaaatattttattagaaaaataaaaactgtgatgccttttagtttatatgcctttagtaatctttgggaaataacatcagttttacatgcaaggtgtgtaaggaaagtgaaatgtgtttttggtaaaagattataagaagtcatgggaatgtggatttttctgcctagattaaagggttaaaggattgttttagatgagataaagctgaaggcttgaacaaattgtgggaggtttgtgaaaaattaatgtcataaaagaaattctgtgtgaacatgttggctaaagttaaaggggtattcattttttctataaatcaaacattggaataaaagcacaacaggtttttcttagagcattaatctgctcgttcacaaaaattgtaaagggttataaaaggtttaggatccacttttctggggaggtgaggaaacaaaagtttataagaatcttactttatggtcaaactgattaagatttaataaattttgtcctaaaggtttttatttaaagaattggggttttaacatttaataggtacccctaacgttaaaaggtgaaaat

SEQ ID NO: 417058 - DNA, 760 bp, Homo Sapiens
  misc_feature (456)..(498): n is a, c, g, or t
ggtctaatggtgattttaatttgaatttctcagattattagtggagttgaacatcttttcataggtatgttgtcattttcctttctgtgaaatgtcttttcaagtttttgcccacttttctttttagtaatttgtcttttcatagtgatttgtaaaagttcttcgtatagtctagatgttaaacctttgttggttatgtgtgttacagccatctttgaccagtttatagtttctttgctgtctttatgctgcttttgataaatggaatttttaatttaatggtagttgaatttacctatcttttatggtttgtgctttttgggtccttttctcctccaaggcataaaatattcttgtacatcgtcttctaaatggtttatagttctatcttttacatgtaggtttctaattcatttgcaattaattctgggaattgatgcgaggcaaaggtccaannnnnnnnnnnnnnnnnnnnnnnnnnnnnnnnnnnnnnnnnnngctatatgtggcctttctttatacgatacttttggtttagttttgcgtatcttaaatgttgcctgttcctctttcctgggtccttttttattttgctggaacacagccctgcagcagttctgggaaagaagctacttaagaaggaaaatccattatgggaatttgagccatttttacacccataaatgtgggttcaaaacagctcccaaaattctttctttggggagggaagaaaaacacgttttggagccctggaaaacca

SEQ ID NO: 417059 - DNA, 579 bp, Homo Sapiens
gggggcaggatctctcttgatctagaatttactaaggcataataggggcaagaaaatcttatgaaataatggggggtagggaagagatgggaatggagcatgagatccagcttcgttattctctacttgagaaaaataaggccccaaagattaaacaacttgcccaaggatattgcttgttagtgtcagaactgaaaccagaaaccaaatgatcatatccctagacttttagtctgctttctctcgcataaaatgaaacttataatgtttctaatccattgctcagacaggtagacatgaatattaattgataatgactattaattgatctggaaaatacttgtttggggatcaataatatgtttgggctattatctaatgctgtgtagaaatattaaaaccccctcttattttgaaataaaaaagatacccacttttctaacatcaaaaacaccttcctaatatattgaaacacatcattaagggacgctgtaaattgatgatgttaccggctccccccacctctaaagatgttctcccccaatcccttgttcctatacccaatcaatcacataaaca

SEQ ID NO: 417060 - DNA, 727 bp, Homo Sapiens
ggtcctcagagcaccaagtttcccaaggggtcagctttcagagctatgatagttccgtgatgtctcctcaggcggaggaggaatcaaacttttctgtgaggttccagaaagactaactaggaccaatgagctctacactgctggaaggctaattctgatttggaattgggggacggtgaggagatgcacacatcagagaggtctgaaagtggaccaaacagccttgagaagtaatgagatccccatactgcacttgttcaagcaggcacagatgcggtggaagggatttgccctttgggaaaagggcaagcttgaactaagtgctgtcaacagcctttttctgagatgagagtacctttctacatgttctttgctgattctctctacacctgtgcatggcccaagtgccaaccttaccactgccacaaccttccccatcctgttaacagaggcaccttttgaccttgccaagcatggtaggtaaataaagcggattttaaacattttatttaggggggtcacttttatgccccctccaatttggcctagttaaggccacctatttttttaaaggtggcctttgaaacaatcctttccaaagaaaaaattttgaaatcctttcaataaaccttaccctaatggaagaatttccaatctggtaacccgagttaatttcccccattttagtctttaagaatggggggaaagaaagatatgttccccccac

SEQ ID NO: 417061 - DNA, 1025 bp, Homo Sapiens
  misc_feature (149)..(162): n is a, c, g, or t
  misc_feature (289)..(386): n is a, c, g, or t
  misc_feature (1005)..(1005): n is a, c, g, or t
gggtatgctaaataataaactaggaatagctctgtcatttcctagtacagcataaattttatggttgctactgtaggtttataatttgtttataatttggcctaatttccatcagccatactaatattggattttaaaaggaggcaacnnnnnnnnnnnnnngaaccaaaggaatgagttagctttgaaaacataatttgggatattatagtatggattcttctacctttgtttcaactccttactaatcttgattctagcaaactacaatgagatttcagagataccnnnnnnnnnnnnnnnnnnnnnnnnnnnnnnnnnnnnnnnnnnnnnnnnnnnnnnnnnnnnnnnnnnnnnnnnnnnnnnnnnnnnnnnnnnnnnnnnnnccggacaaaatgggcaaacccctagtccccacctagaaaataacaaaattaaccccccaaaaccttgtccacggcaatgggttggccaacaactccctgttgggatcccctccgaatggtcctcccgagtaagggttgcgcaatgctcacgggaatgaaaatcctacccctgcgtaaaacaccactacggcccacgtgttggggaaaacgggcttcacgccataaacttcgaaggtacctgcaaaaatgaaatttcttttgcccctccaacctcgggcccaacttatacccataatcctctctttgcagctctgaaaaccacaatgtcttttaataaccacctctggatggtctctccatgcactccaaccgatgcaaccctccatttcaactaaaatacaacatctctacccctcaaatgttctattctaaagagcaccatcttcatactgtgtccaaagctatctggggcggccggagggttaattgcccgcatcacatcttcattgcaagagggaccgagattatacggaggtgctgtctaaaacactaccacctgtctcttcttgccatctttaacctattctccaccaacaaaacatcggctccttcttctccngcggcggttaaatccaattt

SEQ ID NO: 417062 - DNA, 748 bp, Homo Sapiens
  misc_feature (467)..(561): n is a, c, g, or t
ggtagttaagatgaacttactttctgtgcttcttttctcagaagaaaattttatagtttgatcctcagctttctctggcccaaccatgtgaagtttggttatcagacactattaatttgcctatataagtggaagatttggtgtctgtttgtcaaatacttggtcctgtgttcctagcatgccaaacagcactgataggaattaatatttattttacaccaaaaatgaccagatatagcaccaaaccaccctgtgggatgtcctagctcactggtctcatagtctaaagcaggaaagcaatatattggaccctctaataggacaaagccctgacccccaaatattctatttctatggactcatcactagagtacacaaagcctttggactcttgcttcctagtatgggactgttgttaccacagaggtacctatgaaaatccattttaattctcctctagatggagnnnnnnnnnnnnnnnnnnnnnnnnnnnnnnnnnnnnnnnnnnnnnnnnnnnnnnnnnnnnnnnnnnnnnnnnnnnnnnnnnnnnnnnnnnnnnnngctgaggaggcctgtctgaagatctgtgtggaactggagcagtgtgttctgtctggagctcccttgatcaagcatgaggaatgactttccttttgagacatcctctcactttgagctacccaggggcccttgccccttttcttctgggagcaatttaaaagttccctagggtccattgaagatgggg

SEQ ID NO: 417063 - DNA, 752 bp, Homo Sapiens
  misc_feature (68)..(122): n is a, c, g, or t
ggaacacttcgttgaataatttcttaatcctttccacctactcctctgctttttgcctatttagagcnnnnnnnnnnnnnnnnnnnnnnnnnnnnnnnnnnnnnnnnnnnnnnnnnnnnnnncttcctggctcagtgattatttaccacttccctaccttatgttgaggtattgaaatcataatgttcaaatgatcagataaaattcattggttaatttttttcatcaacgatttcctatttttaaggcatatgatattttctttaaagagatttggaaaatacactatacatacaaaggagtacgtgaaatgcatacatgtactgtaaaattacaacaaataaaattaacatccatgtgtccactatctagcttaagaaataaaacatgatcgtgatagcagtgtatccctctgagatcacattcctttccctttctatattttatgtccaaccacatgtatataacctaagagtaggattaatttattgatattgaattttatgaaaatcaaataataacacatgatatatgtattctatgccttgcatatgttgcttaatattgagattcatttttattgatttataaagtactatgtcatttcttttcatcactttagatgatttcagtatattaatatacagtaagttattttctcacttctcatatcacacataactgtatgaaaacaatagtacaacacacttttgtttgagcatttgtttttggtaaacatttttgtgattgtt

SEQ ID NO: 417064 - DNA, 773 bp, Homo Sapiens
  misc_feature (665)..(665): n is a, c, g, or t
  misc_feature (681)..(681): n is a, c, g, or t
  misc_feature (684)..(704): n is a, c, g, or t
ggctcaataattagcaaaacatttgaacctttaattctcacctggctactgagactataatcttagggttaattcaaattcctgtaattaccaggcttaaacctaaatactgcttacagcctatacattagtaaaatttaaaaatgtacagatacttcttttaataaactggaggacctaaaccaagtatgacgatatgttagtgaagattttgctggttgaggcatagtacattttaacttatatttcaggaattgttctcaagcaggaacactcttttacatatttatttcaggcttgtcactctcataaacgaggcagcaaacccaaaatattggctcttcttataaataggcgcctttatataaagaacataaaactcttaagactaatttcacaccaacacaggcagcttcataatagtaaccacctctccctccccactaaaaaagataaaaacaaagtataattagtctttcttattagatctttgtctttgatgatattacgtatttatgtgtagggtagtaatcacaatttatccttcatcttcattgtagttgaatcaaataaaagtattccttattcacaacgaaaagattgcactcccgccgtccctcgagtgggacgaaggccctcgacggcacaaaccgacgcccctaaanatctatcccctgttcnggnnnnnnnnnnnnnnnnnnnnngcgaaacaaccttttcttaaagacaccaagtttcgttttttggcgcccgcgcggtcgccccccccacga

SEQ ID NO: 417065 - DNA, 677 bp, Homo Sapiens
  misc_feature (97)..(376): n is a, c, g, or t
  misc_feature (417)..(478): n is a, c, g, or t
gggtatattatttacccataacatcagtaaacatcttgttttgactgtaacagtttgagatttgacaatttaactactttgcttctattgttctatnnnnnnnnnnnnnnnnnnnnnnnnnnnnnnnnnnnnnnnnnnnnnnnnnnnnnnnnnnnnnnnnnnnnnnnnnnnnnnnnnnnnnnnnnnnnnnnnnnnnnnnnnnnnnnnnnnnnnnnnnnnnnnnnnnnnnnnnnnnnnnnnnnnnnnnnnnnnnnnnnnnnnnnnnnnnnnnnnnnnnnnnnnnnnnnnnnnnnnnnnnnnnnnnnnnnnnnnnnnnnnnnnnnnnnnnnnnnnnnnnnnnnnnnnnnnnnnnnnnnnnnnnnnnnnnnnnnnnnnnaacaaaaacgaaagcattgtataaaaattttatgggggggnnnnnnnnnnnnnnnnnnnnnnnnnnnnnnnnnnnnnnnnnnnnnnnnnnnnnnnnnnnnnnacccttaaatacagaaatactattattttaataggtggataggtgtatttctcagtgtttttttccaatcatgtcaggaactattgttgaatgaatggcatagaagaagaaatgggatgtaaccccaggataaataaagagtgtcagaagggcatggaaaaattatgccacaggagatgtaaagggccgaagggatttg

SEQ ID NO: 417066 - DNA, 131 bp, Homo Sapiens
gccttcaaggggcaaataacagggcatggaagttgcccatcctccctatgaaaagccaaccaccctttccttggtggcaaattaccctttcttgggaaaggacccgttgccctggaaagggctggtttcct

SEQ ID NO: 417067 - DNA, 432 bp, Homo Sapiens
ggcttgaaaatgttattagtttagcatgttgactgttaagcatgaatcgatttttgcatgaatgaaaatattttagaaaactaagaaaaattatatttaaaatgttgattaaatgagtactctgatgcagctatatttttctaaaacaaactgttttagtagccctataatataataaagttttagttaatgttgaaaagttgctgtgcagcatctaattaccagatgaacttttaattatctgtgacaatggatattagttaaggctaaattgttatacaacaataagactgtatgaataagatgttgggcatatggtttgttaagtgtggattctcttgattttctggtaaatatggaataaattctttatataccttaagaattataaaatacataacacctagtaacaagagagtttaaataggcatg

SEQ ID NO: 417068 - DNA, 894 bp, Homo Sapiens
ggattcctgtgtgatctaaagtatggaagaccttgctagtgtttgaattggtatcagacctcagtaaatacttgtgaagtgaagaaatgaattatttacaagacaagaagctgttcttcacattaattaaattggctgtaagaatgacccagcaatgaagaatgctgagcactaacttccccattttcatgattaaaacaaatgccctaggcacgcatttctttttctatgccatcataacaaataaagaccctgtcaccccagcaactcattattgtttgttttctatttggtgaaatccgaagagatcttctgtggttatagttgggaatttatcaaagcttgcaaatccctgttgttccataaagctgaaaataaaccatatgctagcccataccacactgtccaggggtctctttttggaattacatttgaagaggctgagaaaaatgtaaacacaggagattttttaaccaaaagcctttaccataaattctttcccgtttccttttaacacctgtgggggccttttttgttttcctggaagccatttttcctcccaaaatggtaaaccaatatccccccaccaattatttttgggggccaggagtttttaaggaaatccaatttttttcccccacctaagaggtggaaagaaaaatgggattttcctaaaatttgtaaacctttttaatcacaaaacatattttgggcccttccttgaaaaattggggaaaaaaactttgtggggtgctgtgttacctaaattggaataatggaaaatttattttttataatagataatggccggaataaatttcccgcttttgtcccccttcttttagaatcacaaagtggtcgccctgggaaaaaatttccttttcgccctaaaac

SEQ ID NO: 417069 - DNA, 746 bp, Homo Sapiens
  misc_feature (572)..(572): n is a, c, g, or t
  misc_feature (588)..(588): n is a, c, g, or t
ggccaccctcctccaactctggtgaggctgtctgggtggcagcagctctccatgccttcagcccggccagctttgcttcctcagctcctagtctcccagagtgacactaaaaacccacccagctcagttccttggtgggctgtacacttgaccacaccccagcatcacccaaaggactggagagggaggggaccgtgctggttttattcaccattgtcggaacataatagacactcagttaagtgaatgaataattcagtgaatgaataaactaagtaacgattacttgctgttaggctcctctccctctctcctggtgaaaaagcataattatcccaccgccatccacgagatttccgacaggctggctgtgaaaacaccaactagaccctatgccctcagctgttacagctcagagccaagaccctgacccactgtgtctcagtgatggctgcatgtgcctcatgtctggtcgggagcagctgctctgtggaagggggtgacatgttggtcttccaagcctctgccatgtgtaaacaacccagctcaggtggctacaaaccctgaaccangactggaaccaggggnatgggggtttttatctggatctcaaaagccctcctttggggtagggtgtgcagtggctcacaatctgtaaaatcccaagcactttttaggaagcccaaaggcaggaatttgcctttgagcccccagaaagtttcaaagaacccaacccctgggaaaat

SEQ ID NO: 417070 - DNA, 192 bp, Homo Sapiens
gggtttatttcttttagattgtccaatttgttgatgtgtaatcattcacattagtctcttttgattctttgtatttctgtagcattgattttaatgtctcctttttacttctgatattacttatttgaatcttctctttttttctgattttaggtagattatcaattttatcttttaaaaaaccaactcaat

SEQ ID NO: 417071 - DNA, 404 bp, Homo Sapiens
ggcatgctggttatagggccatcaccttcccagtcacccagcctaaatttcatgacacacattttgtgtattaatttcatggtatacattttgtctgtgtcatcatcaataactctcgcatctgccccttccctccaccatcctagtttggcctcacgtggttcattacctcttgtttgctctttgtgttttctgatcacagaagtaatgcacagatacacaaacccaaaagattgcagaaatacaaaatgtagaaagcagagccatccccatactgactcccccagaaatagctatcatcaacaatttagtgccttctcttctgaaacttttatacatattctaacatattatctctgttttaaaacaaaaatagaactgtgtatactgttcatccttgtgtt

SEQ ID NO: 417072 - DNA, 493 bp, Homo Sapiens
ggaaagtgaaagtcatgcaattaaaggcaagctcttatcagcttaaagaattctgttacaaggatattttatgtaagcctcattgtaaccacaaagcaaaaatgtatagtagttgtaccaaatataaaaaggattcaaagcataccaccacagaaaatcatcaagccacataagaagatagcaagagagcaagaaacaaaggacctacaaaacaatcagaaaaatagttacaaaatggaagttgcaagttctcacctatcaataattactttgagggtaaatggattaaattctagaataaaaagatatagagtggctgaataaaaaaataccacaaaatctaaccatgttctgtgtacaagagattgactttactggtaagaacatacatagactgaaagtgaatgatggaaaaagatattctgtgaaataacctgaaaagggcagttgatgctatatatgttggacaaaatagacattaagccaagtagag

SEQ ID NO: 417073 - DNA, 108 bp, Homo Sapiens
gaggaggctgatgctttaaatgagaggatggtgggggttttggggaggtaaaacccctgcttcttctctcccagtctgtgcaataaaaggtcgtgaaagaatctctca

SEQ ID NO: 417074 - DNA, 1096 bp, Homo Sapiens
  misc_feature (496)..(515): n is a, c, g, or t
  misc_feature (792)..(792): n is a, c, g, or t
ggggtgggggcgtcggcatgtaggttgtgaaacaatatgagaaacctccagagccagcaaagaaagttttatttttggaatttggaattcaaagtttttcacactcaacatttctgtgactagcaggtcctgcctcaagatgtagccaccgagtctcagaaaaagaaaaatgaccttgagacttgagacggcataacctggtgaaaaagagagaagaaattgaaaattatgccagtgggtttggagtttctcctgtaagtgattgggagccattgaaggattacaagtagttgaataaatcaaaatagtttttgagaaggaagtttccctggaagaatgatgcatgagtgtaagtgaatgagaataacatttacaggaaatcttagactgagaggacataattttctccttccaatatcccccttctggctgacctagtataaaatggttaaaatggggctgcgagactgcaaaacctgggaattacgaaaacgcnnnnnnnnnnnnnnnnnnnncattgccaaacaatctaaaacttcgttaccaaagaaggttgttgaacaacgggctgtgaacaaggtttgccctcggttacccgagcaaaacagcgccccccctttttgattcaggggtaatcaggatagcccaccagcattctcgggcctcgaaatggagcccctggaaaaattctcggagatgtctccccttttggactacaaataagcgctttgtgcgaaagatacccgaggattctccgtgcccccatctttggtcgggaggtgatggggcccncaactgggggaagactctcaccccgccctccgggcgtgatgacacgacccgcaaaaaacagctattgcggtggaactctctcgtaatggaaaaattcctctccaagacccggcgaaacagattgtatccccgcgtgtccttctgggggaccaagattataaaagggggtctccacaaaaaagcccatagttaggggtgggtaacagactatctcgcgaaagggggggcctaccaagagggggttggtacgggggacacacgtggggccccccttttgttgacaccatggcggctacctcccccg

SEQ ID NO: 417075 - DNA, 458 bp, Homo Sapiens
  misc_feature (237)..(283): n is a, c, g, or t
ggagcctttgtaattatgttatctagctatgttgaaaagataagtgcttactatataagcactcttagaaaaataattaactgattactctttcagaaaatagcaggtgtctcaatgctttttttccataattataaagaccattgtcaaaatctttggtttactaaatatttcactgagcatatatagagatacgttgcttgtgggcataaaagtcttgtagataacttactcacnnnnnnnnnnnnnnnnnnnnnnnnnnnnnnnnnnnnnnnnnnnnnnngaaaattatgaaagttaaaaatttaattctaaaggtagtattttttcatggattaaaaactaaataatggaatttaagccatacgggtttgaaataaaattttttaataaaatggggccaattccctttaaacccccggaaaatacccaaggtttaatttggaaaaataaggggg

SEQ ID NO: 417076 - DNA, 468 bp, Homo Sapiens
  misc_feature (381)..(381): n is a, c, g, or t
  misc_feature (397)..(397): n is a, c, g, or t
gggagcagtggggggactagggagaaggataagaaatagaattattgaaaagcccccaccagggaccttcctggccagaatatgcagagtaattcctgctggcttcacctttgaaagtccctcgaaactatgcagatgaaactgagtctgtttttgatattgtcagatgtattctaccttggaagtcccaacacctaaactggaattcttgtatttacatctcctccactgtcccccacaccacccctcaattcctgctgcccctgctaatgttaagcatttttctcttgttatcatcaggttcacattaaaaacagatacttacaaactgacttgaagcacagatacttttacgaatgtgataaaatattttcttaaganaaggaaagaggatgtngggtcaaataaacaccgcatggatgttgattggtgaatactggtgtaagaaaagggagctcaggaattttt

SEQ ID NO: 417077 - DNA, 776 bp, Homo Sapiens
gggataatgctactttatctcttgcgttagttttctatgctgggtaacaaattaccacaggtttactggtttataacagcataattttattatctcacaatttcttggggttaagagtttcagcatggcttaactgggtctcacaaggctgcagtgaagtcagctgaactgcattgtcatctggagctcacagttctcttctaaattaatcagattgttgataaaacttagttccttgaagctgtagaactgaggtcctcagctacttagggctgctcttttatataagcagtgtaacgtgacatgcctttttaaggtcagcagaacttctgactagaatctgtttcagagaaggccagaaagagttcacttggttaggtcagagtcacctgggatagtctcccttttgattaagtcagagtcaactaaataggcaccttaattgcatctgcaaaatcctttcacttttgccatattctcttactaaatgtaacaggcgttgtccacacaaaggtatggatatggggcttggaaaggatttcaggaaccatcttagaattctgcctactactaactccattctacaagtctcaatatctagcattttagttattcactaactgcaaagttttttatttcattatcattactactttgatccatagatactgttttggactataatttcccaacatgaatatttaagtttttcctttatggttgatttttaacataattgaattgtgaatcagatgaatatatcctccatatagaat

SEQ ID NO: 417078 - DNA, 401 bp, Homo Sapiens
  misc_feature (262)..(272): n is a, c, g, or t
gcttgtcggccgcctgggccctcgaaaaactttctaaaacattcgtttggcccgcgggccccggaggtaagtgaaaatgggcaaaaccggttcccaaggagaatcctggtcatgaactagtggcttggaattcctccccaataaaaaacccccgggggcaaccgaagcgttcttgaaccaaatccagaagggagttcctgaagggccattacggggatctatccaacgggaattccaagcgagacctcgaattcaaaataannnnnnnnnnntgcccggtcactcgcaaaaccgggtggaaattcggttaaaccatttcctgccccaatgtggaagcctactacaaaccggctttaatgaaaacctgaaatcccccagggggaaatcaaaaacattttgag

SEQ ID NO: 417079 - DNA, 483 bp, Homo Sapiens
  misc_feature (197)..(400): n is a, c, g, or t
ggaagaaatgaaattattcatcaacaatgactttggcactgcaaaacactgagtcaaaggttaaatcagtcacacagatatccaaggccaagttgaagatcacaagtatatcccatttagagatttgcatacttagagattaagcccatgttcattaattatttagttaattcaaaagccattaataaatccatgcnnnnnnnnnnnnnnnnnnnnnnnnnnnnnnnnnnnnnnnnnnnnnnnnnnnnnnnnnnnnnnnnnnnnnnnnnnnnnnnnnnnnnnnnnnnnnnnnnnnnnnnnnnnnnnnnnnnnnnnnnnnnnnnnnnnnnnnnnnnnnnnnnnnnnnnnnnnnnnnnnnnnnnnnnnnnnnnnnnnnnnnnnnnnnnnnnnnnnnnnnnnntaaaaccccaagttactttcgatgactagatacctggaggtctgaaaggagaagcttgtaaaaatacagattggattgccttc

SEQ ID NO: 417080 - DNA, 459 bp, Homo Sapiens
ggggagacagggaagcccctttggccttttggggtctttccagcacagccgcagaaatcacactcagacaggtgtaggtgaagggctcaattacactcacgggccccagagaggaaggccagcccccatgtagggggctggatgggaggagcccacagggagcaggcccacctagcaggtgcggggccaagagagcttgagggcctgaggacccacaggcaagtgcctttcctggggggtcagggcggggggcactagccagagacgtgagcagatctcactggtgtgtttcaaagtgactgggtgaccctcaggggaaggctggaagggaacctggagcagggaccaggcttattccacggggctgcctggctgccagggtggggtgctctcaacctgtgtgtgggcatgttgaggtgtcagggcaataagaagggttaaaaatgggctaatctcttg

SEQ ID NO: 417081 - DNA, 705 bp, Homo Sapiens
ggaagataataaccctatatatagacaacacaacaatgagacaatacttagacttagtacaacaagtacttgataaaggaacacaaaaaggagatcgaacaggtacaggaaccaagagtatattcggacaccagatgcgatttgacttagcagaaggtttccctttagtgacgactaagaaagtacatttaaagtctatcatctatgagttgttgtggttcttaaacggagatacgaatattaagtatcttagtgagcatggagtgcgtatatgggatgagtgggctgatgagaacggtgatctaggacctgtgtatggatatcaatggagaaactggaatggagaagggatagaccagataaaagaggtgatagataccctgaagaacaaccctaacagtagacgtataatggtgtctgcatggaaccctagtgtgatgccagacacttctatctcttttgcagataacgtagcgaatggaaaggcggcattgcctccatgtcattcattctttcagttctatgtagcagatgggaagctgtcttgtcagttatatcagcgcagtgcagatgtattcttgggagtaccttttaatattgcttcttatgccttgttaacgatgatggtcgctcaagtatgtgatctagaagtaggagattttatccatacatttcggggatgtgccttatctataataaatcata

SEQ ID NO: 417082 - DNA, 517 bp, Homo Sapiens
  misc_feature (190)..(190): n is a, c, g, or t
  misc_feature (204)..(204): n is a, c, g, or t
ggggataaactatctttttttagtcactcaaagtcataaccctttggaaacaaaacccaccagtaccccagattttgaccacagatgaatcagtactacaaggactggttagagggttgaatgaatctgtatactcagcacttaacacagcactctgggtaaaagaaaaaagatcctcaaagatattagnttggttacatcaangaaaggacaaaacttaggtttaatctataaacttcatctcaagaggaaacaggaaaactttgggagataaacaggggctcctgccacttgcaaagttgccaccatcccctgggtttcccccttctggtaaattggaattaaaacccctggcctttcctaaaagaattaaataagtttaaaaaacctttccggttaaaatggccaacctgaaaaaacaaattggggtcaagggtaaaattgtgggggccttggaaggcctttttttccctttccccaaaattcccaagggggatttattgggccccttttttta

SEQ ID NO: 417083 - DNA, 848 bp, Homo Sapiens
  misc_feature (806)..(806): n is a, c, g, or t
  misc_feature (816)..(816): n is a, c, g, or t
gggaattgttgattttctccagtacttgtctcccacacatatgtgatcagaaactaactttttgaaatttactttctgatattttcacttgaatggtcttcaagattgcttgaagaagaaaattatctgaaatatgttgaagaaaatatattacctagctgagatagattctgaaggcagtcactagtgaaattgtaatttgttaaattattttgcaagaagccccctttttttaagcaatcttaaaaaatggtaaacgtaataacattccaagagtttttgactaattggtgaaggagtatagaaaattgcaagtacactgagtaggataatggtcttagattcttaggaagattggctgaatgggagatacgaaggtaggctgtacttttatgttgcataacagggctgtgaaactttttgaaagttatttgccccgtacttccgaacgcagaactgtatggtttgtaaccccttgaaccgtatttaacgaattttgtggtatcggaaagtaagcccttgcccttaacttttttaatttgtccaggggcttccctcacatttgagccaatccccgcgcgtcgaatcctggaataattaggtttccccatgggaaccatgtaacagcggagaaccctctttgtgctggccttttttccgcggaaaattaaaaccccaagtttccttgacacacaaccgaggtttttttcggtaaagcgtatcctcgcgtaaagggcctggcctcgcgcttaaaacaaccataaaccggggataaccaaacactcgccaacaatgggcaaagaaanggggcgaacncacaatcgggggacaggggaacaacaaaaaca

SEQ ID NO: 417084 - DNA, 773 bp, Homo Sapiens
ggagtcttcaaagagtttcatagactttattccatttatattgagagcctactttgtgttaagcattttgctgaacattgtcctcactcttatgttacttaccatctattgggaagagaaagaagtaaacaaataattacatgtagagtagtagtgtcaatggtagaggcatgaacacaacacagatttaacactagagaaagagtgatcacaaaagaaatgatgtttcagttgagttttaaatggcagctggagttcatctgaatgattaggtgtctaggacaggtttaaaggttagggagtaaggaagataatattcaaaataaaaagaacctgaggatattcacagaggacatttgcagaggcctgaaatagcattggtacattcctagaaccataaatagtttgatggtaatgtaaattacagtatcgttttgaaaaatcatggaagatttataccaccgataaggaaacttcaacttttatttctaaaagtttgatgaagcaattttgacaagatttttttaagcccaagaaaaccaccattatttcaaaattttcaattatctcttaagcaaaagaaaaaattcccttcagaattaaccaataacaagaaaaggccccccttttcgatttacataaatctcccacagggttaatctcccaatcttcccatgggaaataaaacctcccttccagacccttaaactctgtaggaaaaacagaaaaaaaggtggaaaacccttttccccttttaagttcccttaaacggg

SEQ ID NO: 417085 - DNA, 185 bp, Homo Sapiens
gggtagtggctcgtaattgtcttttctttccatatttagtgcttccttcaggagctcttgtaaggcaggtctggtggtaacaaattcctacagcatttgctggtctgaaaaaggttttatttctccttcacttatgaagcttagtttggcctgatatgaaattttgagttggaatttcttttctt

SEQ ID NO: 417086 - DNA, 507 bp, Homo Sapiens
gtgtgaccaccacgccctgccttaagaattgttccaagagaatctggtgccacttgcaggtgcccattgaagtgcaatgggcactgttgatcactgaggaggtagtgggtgctgacccggtgctggggcctgtcccctagtctctgctttgcccttggctagctaggtggtgtgccaagtggggagagaaacttcctttttaaggggcatggatcagcttccctgaaagagggcctgcctctgtaaaatatgggaagtcgcctgagaatgttacagaaacgcccctatagatggggccacaaaacgggccccccttttttgaaaaattgattttgggaaggcttgtttttggggcccttttatatttttgggaaggcctgttggggtaaattaaccatgaaattttggggggtccccacccggcgaaaaattccagggtttttactctgttctcccttctgggtgaccctctcacccttctcgttatatgttgttaataataggaac

SEQ ID NO: 417087 - DNA, 1072 bp, Homo Sapiens
  misc_feature (263)..(275): n is a, c, g, or t
  misc_feature (285)..(285): n is a, c, g, or t
  misc_feature (504)..(512): n is a, c, g, or t
  misc_feature (514)..(523): n is a, c, g, or t
  misc_feature (763)..(763): n is a, c, g, or t
  misc_feature (771)..(771): n is a, c, g, or t
ggagccctcatagaacaacgacatgaacaggcctcatatggtagttgttctagctggcagcgatcatcagccagcagagagatgagtgaagacagccccacatgattccagctgctagccttcaagtcttctcacctaggctagagatgaggctgcagatattatggagcagaaacaaaccatctccacagtgtccttcctggagtcctgaccgaccgacaaaatgtgtgagcccataataaaatggttgttttgcacccctnnnnnnnnnnnnncgggaagaanaaaacacaaagaagccaagaagaaaaaaagaatggcagcagagagaaaaggccctggcaggccgccccggcccctcgaaaaggcttgcgtagacccatttttttaggcgcccccggggccccagagggggaagattcaaacaaggggcgcaatagctggtttgtcccgtaggggaaaatcccttgcctccagtgaaactaagagggccttggcgaatgnnnnnnnnngnnnnnnnnnngaagcgcccgccaggggaggcacagacccgaagggggttttctcgggaaaacgacaaccccgccgaagggggaaaggcttatatctgagagagggcgcctatctacagcgcgacacaatgcacgcctccccgcgacgcggaggtgaagtttcccgaaaggggccgcagatccttccgcagatagtgttcgaggatgtgttaagaacccacggcacgacccgctaggaaccgaaccttcanatttcgancacaaatagacgcgagcggggacaaaagctcgccatgatccaaaccattttctcctgagccaacggagactggcggaaagacacccctcctcacagaagcaccggccggtgtggaaaaaacaccctacaaatctcccccgccagcgaggggaatacaaacaacctttggacacccccctggggcgaaaaaagataatgacggcaccaagagaatcttatgggagtgggcgcgaaaggaaatttagctcccgaagatggcgccacggtttgtaaaacccaaagcatgggaacaaaacccgcg

SEQ ID NO: 417088 - DNA, 782 bp, Homo Sapiens
gggggtttgttgtacagatcattttgtcacctaggtaccaagtactcaacaattatttttcctgctcctctgtctcctgtcaccctccactctcaagtagactccagtgtctgctgttcccttctttgtgtccatgtgttctcataatttagttccccacttgtaagtgagaacatgcagtattttctagtatttggttttttgttcctgtgttaatttgcccagtataatagcctccagctccatccatgttactgcaaagaacgtgatctcattcttttttatagctccatggtgtctatataccacattttctttatctaaactcttattgatgagcattgaggttgattctatgtctttgccattgtgcatattgctgcaatgaacatttgtgtgcatgtgtctttatggtacaatgatatattttcttctgggtatatatgcagtaatgcgattgctggttggaatggtagttctgcttttatctctttgaggaattgcatgctgctttccacaatagttgaactaacttaccctcccactaacagtgggtgtttcccttttctccacaacctggccagcaatctgttatttttttgaaatttttataagtaacccatttttaacctgggtaatgaaaattatatttttcattggtggggtttttaaattttgacaattttcctcctaaaggggatccggggggaatatttcgcaagttggactttgtcaatttgaaatcacaaaatggcccttgttttttgggcccaacccacggc

SEQ ID NO: 417089 - DNA, 574 bp, Homo Sapiens
ggtactaggattctactttttgtgtttgagcaatatgaactgtagtactcatagttggggataccatacctttcaggatgtagactcctgacattgaaatcagagattactttgcctgataatggtcaaccgaagtgtcagactgcagagaaatgttgtctagcctgtcacttgtcaatcagtgagcaagtacttcacccataaaaaaagtcagtgtgaaaaaggcatccaaatgcgtttgtgttccaaaatggtgctcctcgttcatccaaattttattacggatttttatgtttattttggcatcttcattccagagataatcatctgtatttaccatttttagatactttaggacaaaaagcagagctttctggtagcagaaagccttcaagttttttagtcatctgttactaacttttgggaagttatcaatggggaaaataccaagagactgttcacgtttttgtgtgtcagtggaatttgtattggatattgtgaagaataaatgagcaatggcttgggagctggagaatagataatacatttctaataaaaaatttgacttttcaaa

SEQ ID NO: 417090 - DNA, 133 bp, Homo Sapiens
gatggcagctatataaatgataaaattaattacattctctttcacatgcatgaggtgcaaactctgtcacaaagtattttaattaccttttaccttgtttcatagatctttatgtgacataaaaacagtttct

SEQ ID NO: 417091 - DNA, 1100 bp, Homo Sapiens
  misc_feature (294)..(309): n is a, c, g, or t
  misc_feature (702)..(702): n is a, c, g, or t
  misc_feature (727)..(727): n is a, c, g, or t
  misc_feature (845)..(845): n is a, c, g, or t
  misc_feature (863)..(863): n is a, c, g, or t
  misc_feature (946)..(946): n is a, c, g, or t
  misc_feature (1036)..(1036): n is a, c, g, or t
  misc_feature (1065)..(1065): n is a, c, g, or t
gggaataagtctctttaggggtggcagtttgtttctgcggtaagcagaacatctttttgaataggggaaatgcaacagtcttatacagtagtttgtgtcattggtgaatcctttcctaggtggtaattaaaacattattcctactgagcaaagccatatgtcatcccgacacccgctcccatgctgaaaaaagtcagacttgaaactgggttgagaattacagcatacaatcataactgatacttaagtgcttcactttcccacaggtctctacacttgtaaaatgcaaatacnnnnnnnnnnnnnnnnattttacactgagaccataagcttactcctctctcctttccttctttaagggcctcattgcgggcttttactttttgatccacccagaaggccccctggtactaaccttattatacccttaatattctttactacataaccctcctgggaaattcccctaaaagtggatggtttccgtcctccaacggtttccaagcgaaactcatttttttacattaaaccccgcggttgcaagtcgtttctctacagcttgcgaagcattggacaatcacttgctcgggcgccttctcacacctacttgccatgggagcgcaacaccgcggtgtgcttatcgccaccctcgcgtccctttagttcgacccgagcggcggtttattatgacacaccatgttntctgtctacgtgatcactctcttanagtcgcacacagcactcggtcgttcgcgcctaatggtggcggcccagtaaaaatacaatacctttctacctaatatcaacacattctgtctgtctcctattccgctccgtgtccttcnctctctcatatagacaanaagagtgcagcagatccgttgtattgggggcctcctccgtctcatccgcctggcaggggccatacacaccgccgtcggttgtngttaagacaagacggcagccatctcgttctctagcttgctcgctcctcgtcacgacggagattcaactgcgccgcggggcgttattcatnttgagacatatcaacacttctcgtcggcncttctcgtgtagtgataggtgcatataacacacat

SEQ ID NO: 417092 - DNA, 345 bp, Homo Sapiens
gggggacaggacctactcgtatgccctcccaggctgtgggctcaccaggagtcctggcataagcaggttgagactgagttacttcctgggcccacctgcttgacactggcttggcaccttggcaggcattactttattttctcccaaggctcccgtggtcctgaggggtctcccagtcctcttggagcaccttaaagctgcgtgaaccaggcactggccagaaggttacctgtgggactctggctttgttctgcctcccactgcatgctcagccatgcccacctctctcgccagttatccctcccacttccaaggaggcagggctggaagtgcccaggtgtcctc

SEQ ID NO: 417093 - DNA, 547 bp, Homo Sapiens
  misc_feature (454)..(486): n is a, c, g, or t
gggaatttttcagtgttctagtttttaaacagtgatgttttttattaacctatttcatccattcaaagacaggcctttctccacaccacattttcctctaaaatcatgataacacttttaaattgatggtgtcttccagtgtgtatcagccagatggcagtgtgttacagttccaggaaaactcgttcacatcttccgtaagatcaagaaggctctggcatcagataagatcaaatgttgtctttctgttttaaatatgtgccgcaaagagatttgcttacaatctattgagaaagctaaaacagagcagacattgtcctgttgcggggtagatgaatagcctaagaatagtttagacaaattctgaaaacgaatttaccttagaagatgttcatgttagatctggtaaaagtaacatgttatttttctgtcaagccctttttgtacttgccgnnnnnnnnnnnnnnnnnnnnnnnnnnnnnnnnncgaaacatccaaaaaggaatgctaattagtgaaatggaagaatttccatttcaacacctta

SEQ ID NO: 417094 - DNA, 134 bp, Homo Sapiens
gggtagtattagtggggaacagtagtattagtgtgctttctccatgatacaaaactacctcggaagtcccaaagagttccatccaacatttgtggagtatctgctctgtgcttagtactgggggattcaatggc

SEQ ID NO: 417095 - DNA, 1071 bp, Homo Sapiens
  misc_feature (61)..(125): n is a, c, g, or t
ggtcatcttcacaactgttgctgcttgtattcactcttgccccagttcattctagcaccannnnnnnnnnnnnnnnnnnnnnnnnnnnnnnnnnnnnnnnnnnnnnnnnnnnnnnnnnnnnnnnntttaaaaccatcactgcaaaacgaaaagtgaacgcattaagaaaaattagttatcacatgcgtccccgtaggacgggcgtgagtcgccagcatcacccgctcccgccttctccactgctaacatccctccaaactattagtccccgaattgtcattcactaccctatttcacccaggtataaatatctgattacctcttcgcacggctacccgacaagaacataacaaacacaaaaacaccacacggcaatccaccacaacccctagctacaagaaccccggtaaactaccaagcctgacacgcaaaagtcaagggcagacgcacatcgaacgcacagaaaacccgtacactcttcctttccacccccaagagaaaactctaacaaattaagaaccactcttccatcaaatataccgcaataaattggacgccccacactcaacagcccacacgaaaaaacagtaatctacaataaccaagtcaacacaatcgatactgttctcaatgctacgcaagagacggtcaataccggagcgtatcacttatcatccatcatagcagatataatcatataggtttgttaaatcacgacctccatgatatgcaatggagatagtggcgtcggagcgtgtccaccgacttctattcccgctgcgctccatcagaaaagctccactacgaccctgccgcagcacacccacaaagtagtatacagcagcacaacacactcacaatcgcgccctactcatccttcgacatatctacatatagacgcgcacatcctctctcataactcgcgctagtaaagagcgtcccgcagatcacattgccgtatctgcatcccaacatccgtacccctccaaccacttacttagcacatgccccgtcctacatatcatcaacaatctgaagtgacaacaatgatacccgaaccaattcaataca

SEQ ID NO: 417096 - DNA, 422 bp, Homo Sapiens
ggcaactggaagagaaaaattttgaagactccattgtaccagttgtgctttccgcagatccaggtacgtggccccgaattttgaatattaaacaacgggacactcttgttgaaaatgttccgcctcaagtaagaaattttaactttccaaaagataatacagggaggaagttttcagaaacttattatacacggattcttccaaatggtgaaaaaaccactagatcctggttactttattcaacctcaaaagattctgtgttttgtctatattgcaaactctttggggaaggaaaaaatcaactgaaaaatgaaaatgggtgcaaagattggcaacatttatcacatattcttagtaaacatgaagaaagtgaaatgcacatcaacaatagtgttaagtactcaaaattaaaatctgatctg

SEQ ID NO: 417097 - DNA, 753 bp, Homo Sapiens
  misc_feature (737)..(737): n is a, c, g, or t
gggctttaattaactcagaagagtacctttatgtcagttaataaaaataaataatcttaaatgataaatcagaaatattaggaaagcaagactgttttgtacttgggtgtgttgaaagaacatgtatgatgagatgggttacaaattgtaagatgaaatatttttccagactctcattgcttatactttgaaggttaccatttaatactgaacacaagatgcacttcatttctatgaaagcagacattatgatgtcatttcatctattcaccatgttccacaggaacctgctatgaattatgaggccaccacttagaattgaaactgtagaagattgtaagcattctaagccgacatgcacatgcttcctattttagacctcactgatcttcagataacatatggtggtacaagtaattggaaaattggcacacctgtcaagaaagtatactagatggggcaaaaaaatgccatgctggagcacatgaagtgtcttagcaattaaatttattgttttttgtcaagcagtgaagtaaaaatatctagctcatcccctgcaaagaacacttttcagtggcaggtgtttccaaagtaatttttagggcattgttaaaattggttgcttttaaaaacatacagaaaattttaatggtgttctataaaacagcacctattgcaaatatttaaatgttacataatttttacccatttgtgtttagggattattagaaatcacnagtagtttcatagttt

SEQ ID NO: 417098 - DNA, 837 bp, Homo Sapiens
  misc_feature (442)..(450): n is a, c, g, or t
gggcaggtggttctgaggccccacctgggagtttcgaatcgtgttggaagcgggcaggaaaagagctgagttaaatatgaaaggttacacctccaagggagcttcccactctggtagactttggttttggtggtgcctgagatagacaaaggctagaaattctgggaaaatctggtagtggttgggccagccagggaaacaactggaagagatactaaagtgacatggcaggacctgtttctttgtttgaaaaaaatacatagtttaggaagtatttataaagacttgtggcaaaaagctgcattataggatgaataatgttcatttaggtgctttcttttgcatgtgaaccatgtgaccaagtgcctgttagtattctgacactatatgcgaatattttgcactaactgcctaggtcaaatgctggaatagcatatcccannnnnnnnncagtaagtaactctaagagaacataaacagagaatcatcattttcaataacctcagtgacatctctgtgctattctttccagggaaaaataagttgaatataatggaataactatatggaagttatacctatattttgagtttgcttttaagaataactcaatggggaagaaaatttaagttccggttttttcccttttggaaaaaatttgttttaatataagatgtgtttcccttcccggaaatttaatgtgggaaacttctccctccttaaattccactctaaaaaaatcgtgtctaaacaccacaaattaaaaccctatatctgcgaaaccacacttttggggtaaataataaaccaccctttattattttccacaccgtcttc

SEQ ID NO: 417099 - DNA, 769 bp, Homo Sapiens
  misc_feature (289)..(300): n is a, c, g, or t
gggaatggatttcttcctctaccacattaaagtattgcaggtgagtctaaaattatctttcaccatcatcacccagcatataccttgcactccctgaagtaatcaacactgtcaacttggtgtgtatactttcatagctttttctgtgtacgtacatccatgtgtatgcttgtaatgcaaatgtgtgggacagtggtaagtgtgagcacattttaaataaataataccagactgtatgcattattttgcaacttgctaggaagggatgcacatttgggcccattctaannnnnnnnnnnnaatgcagatacatctaaaatccacctgtccactatctgaatactagtccgctcttctttccagaggtaagccctgtcatcattttggagggcatcccaggcaatggctatattttatacctcatccgtctctccactaattctttgacatctatctgcagtcatagattcttagaaccaaaaggatttttatagattatctgctctagcccccttattgtatacatgcagaaatagatcaaatgcctggtctcgggtcacacttattaccttggtcttggtttttgtgacccttagctaggtgtgttcctccctttcccaatctgtgtttctcctagcaactttccactcaaacgggtttaaattgaaagcatccctttgttaacaacttcctttcccaaaaaaggtctgtggaaaaattcttctcctttttaccaaagaatgtaagggccttttggggggagggaaaa

SEQ ID NO: 417100 - DNA, 1079 bp, Homo Sapiens
  misc_feature (883)..(883): n is a, c, g, or t
  misc_feature (1038)..(1038): n is a, c, g, or t
ggaacagtggatcaacgcagagtgcccattacggccgggattctggaagcgtgttttggttcacagataatataccatcaatctatccattgtttttaagagattcagaaggaaattatgttaaagatatttatggtgggaatcagtacgactatggtgctggtagaggatttggtgcattaaccaactctcttggagatgttcattatggcttaaatagaagtattcgtgatgagataaatgcaaacgcatcatttgttgttgatttatatgatggtttaacctttgagacaactattggaggtcagtattacaataatacgaataatcaaagaagtgaccgctttttatggatccagctgtctgcgatgaaaggggtctaattttataaagcgaaaaaaagggagggtcttttttcctgcatagactggggacctagagatggttcaaaggctattacaaaaattggttttttctgggacgaaaccaccgcggacctttggaaggggctttttagcccttgcccaccgactgggagtgaaattttaattttccactcatgggaaggttactgaggcaagtgattaaactttctcgcgcgaatcgggaaaaattataacgtgagtcgtgcgtgagcccacttccccccctatggtgatattccccgcgtgaaagagtggggtgctcagcacggaaagacctttaagaaaagctcgaagatcgggcgcgcgaaaaggtaaccttgtaacgcgcacatatgcacaactggcgccgctcacccacatggggggccggcattacacttgtacacgttcgcagaatgtcaaaggaggcctgtgtcctaggagcagagaaggcgtcatatatttgatgtgtgcaaccnaaactatataaccatctctatcttggaatactcagtggcgacatgagttgaaaggtcagatcatcgcgctgtacacaccggagcgggctgcgaatttgtaaaaggtgagaaggaagtggggcgcccctatctttatgatagttgcaatagggagngaaaataagatggcgggagggggcgagctcattgctacttt

SEQ ID NO: 417101 - DNA, 900 bp, Homo Sapiens
  misc_feature (777)..(777): n is a, c, g, or t
attaccaaacttcttctacttctacctctaccctgtcctttctcaacctgccccggccccagcaccacctcagactcctctgcctggcgctgtatgaatcaactgcatggggcattcacttaactaatctggtcaggcaacccaaccaaccaagagactgctgttttcatctcctcgtcagcaaagttagaggccaaatggaattcatcatacactgaatctgaagactgaaatttacccacaatgtcagttagcaatgccgagaccataacaagcacccctagaaatacaacgcagttcgtagaattcccgtgcagtcgtcctgtctctcttgcactcatcccgagagggttcaataacgaacgaagacctcgttcccggggggtactgaaacccacgaagagtcctacgccccccccgaaatttgaaagagcaaagtttaataagttttccctggcctggcggctcatgttcatgggggaatgaaatataagaaggctggaaatcttcagatccatcttgccacgcagaggaaatgtcgcctggagcaaataggactcattcacaagaaacatccccaggcgcagctcacacacaacgtggtgtgatttgtgggaagtgttccagacaactgggaggctggctttgttatcacagcccgcggataaacagccacgaatacctctatgcgcaaagttgtgacagggaagatgtgtctccgttgggaattgttcttcataagtattatcactcatactcttccctccgggtatagancccaacttaaacggtgtcgtgctcagttattcacacttttttcatggtcgcggtcttttacttctctagacgcttattcaaaaaccccctgttttcgccctcgcttctttgtcccacagaggg

SEQ ID NO: 417102 - DNA, 608 bp, Homo Sapiens
  misc_feature (362)..(510): n is a, c, g, or t
cttggcatgtcctactcattccctggatgggagccatcggctttgcagaaggctctgggtcagagagctaggtacaccagactgttcatctctgtggtcctagggctgggtccagagttgtacaggtgctagatgctctgaatggcatggcgtagttgactgatgcttacagtatatagggttactgtctttctctttgtctttaccctgtgtttacctggggtgtgactgtttctgtgctcttattttgttgaattgagttgatataacagacccccctaaggatggtggcagattgtgactctggaatgacctcataaaataaaagatgggggaaagagacttaagaacagctcatggannnnnnnnnnnnnnnnnnnnnnnnnnnnnnnnnnnnnnnnnnnnnnnnnnnnnnnnnnnnnnnnnnnnnnnnnnnnnnnnnnnnnnnnnnnnnnnnnnnnnnnnnnnnnnnnnnnnnnnnnnnnnnnnnnnnnnnnnnnnnnnnnnnnncggtgggccaggggaacatgggggatccccagccttacctggggggaggccctgaagggcaagggaaaaaatttgcctttgaaaaccccccgggaaga

SEQ ID NO: 417103 - DNA, 712 bp, Homo Sapiens
  misc_feature (129)..(464): n is a, c, g, or t
  misc_feature (470)..(505): n is a, c, g, or t
  misc_feature (655)..(655): n is a, c, g, or t
ggagtctctggtcttgtttcatctgatctctcgtggctaggatggtttatttctagatgtgtaggttgcaatagctcatttttagcaggttgtataaagtctcatgtcctgtgaagagaaaatagtggnnnnnnnnnnnnnnnnnnnnnnnnnnnnnnnnnnnnnnnnnnnnnnnnnnnnnnnnnnnnnnnnnnnnnnnnnnnnnnnnnnnnnnnnnnnnnnnnnnnnnnnnnnnnnnnnnnnnnnnnnnnnnnnnnnnnnnnnnnnnnnnnnnnnnnnnnnnnnnnnnnnnnnnnnnnnnnnnnnnnnnnnnnnnnnnnnnnnnnnnnnnnnnnnnnnnnnnnnnnnnnnnnnnnnnnnnnnnnnnnnnnnnnnnnnnnnnnnnnnnnnnnnnnnnnnnnnnnnnnnnnnnnnnnnnnnnnnnnnnnnnnnnnnnnnnnnnnnnnnnnnnnnnnnnnnnnnnngaagcnnnnnnnnnnnnnnnnnnnnnnnnnnnnnnnnnnnncaagttttcctgtacttggctaactcactcccagggcagcaataggcagaagccctagtggggcctttgataatactatctgaaaaagcccagagcccaaaaggaaatgagcctccaagaagatttcttcccaaacaccttttccccccnccccgggagccagggaattaagggaaaaacccaggtttccttccctttaatccaggc

SEQ ID NO: 417104 - DNA, 747 bp, Homo Sapiens
  misc_feature (581)..(581): n is a, c, g, or t
ggatcacgtcaggaccctgtaactgaggcaatgccacctctgtttggcagatgagggaccaaggctcagaaagcttaagtacttaagcagcttgttcaagctaccaggctagaatgctgcctggctcccaaagccagagctattccttcattcaaccagcacttatttctgctctcacaggtgttgtacattttgttatgcttcttattcttcaggagcgaattcacagcctgtaaagcttggctgtaaagagagcacggtgtccatctttaccggcacaggggccagtctggctacacccacgtacaactaccaccacgtctatacaacaccagctaccccttgggggaatcccgaataaatgccctggctacttgcctaaggaaacacgtgtgggctaggcacccattacacccttccagaggttgggccacggcccagagccttccaaccctggacctcatgggtggggaggaccaggaagctctgggtggccttttcatgtgcagtaccatcggcaaagtaaaagtcaagccatgcaaaccacaacagtttctccaaccctgggtttgaacaaccangcttcaagaaatgactagtaaagaaggaatggtggcaaagccacaaaaagttataaatttatattaattaattaaaaccagcccctctccggctaaaggaaaaattttaccctattttcatggttcccaaagaatttattaaccaacctggccttttcaatttaaa

SEQ ID NO: 417105 - DNA, 549 bp, Homo Sapiens
  misc_feature (128)..(128): n is a, c, g, or t
  misc_feature (467)..(477): n is a, c, g, or t
taacattttgctatgatattagacaccactggatatattaaaagggtgataaggcacttttatttttacatgttgttatttataatattctgaaaattgcatcctaattataaaaaattttggctgtncacttagaaattcgtgaagcagtatgccttcctttcatgattctttttaacaatttttgtaatgctagcccaaaaaggttttgagggaccacttgcctatatggacattttttttcccctcatggccctcaaaaaggaaaaaagcaggggccaaaaaacccctggttgttgtccttcccaaacttttaacccttaaaaaaacccccatatccccgccttgtgttagggggatttttagggggaacccccccgagaacaacccgggttttctttgtggctttgcacaagggcccccaatgggccctccaaatatttccccatttcttggggcctctctcnnnnnnnnnnncccccgggggcaaatcccctcccccttttggggggggcgccaacatttcccccgtgggttctttggggccag

SEQ ID NO: 417106 - DNA, 733 bp, Homo Sapiens
  misc_feature (699)..(699): n is a, c, g, or t
ggaatggtagataaccaatcagttagcttaattaatctaagctatttgaattcagggaaatattagtcaaatctgctgtttgactaaatacaattcaaagcagtgtatttgtgacttggaatatagaacacaaacaaatgtgtaacccatctgcagtatgcattcttccattttaccaccactaaccattgaggctcatacaattttcaagcaacaagcattgcttcccaaaggtaaaataatcaggaatatttctatagtaaatggagtttttaattggcaatactgtttatttttttctagcaaagacaatttatctcagtaaccttaaataggaaaagtactcaaaaattaaagttgacttttggctttttgtagtctctctggaggacttccagaaaattaccactgttggattttaatctgcttccattaaccaatcttacagagatgataaatgaattaactaatattgaccaaatataaattgactgcaaataataagcccgcataaaagttgaagtaggaaaactactccaagtttatatattaggcaccttggggaattctcttagtctttccagctaaacaaggattttcagcataataagtagatttaatgatggcataaaaatccccagatactttccatatacatttttttgccaaaagtgtaaaatccttcctcctttttgcagnccttttttgggttaataatccccaaacattctaa

SEQ ID NO: 417107 - DNA, 955 bp, Homo Sapiens
  misc_feature (318)..(318): n is a, c, g, or t
  misc_feature (379)..(379): n is a, c, g, or t
  misc_feature (502)..(502): n is a, c, g, or t
  misc_feature (525)..(525): n is a, c, g, or t
  misc_feature (539)..(539): n is a, c, g, or t
  misc_feature (652)..(652): n is a, c, g, or t
  misc_feature (704)..(704): n is a, c, g, or t
  misc_feature (758)..(758): n is a, c, g, or t
  misc_feature (870)..(870): n is a, c, g, or t
attcttccccccacatctccgccctgtggtaaaaagaccaacacctctgttccccgttcgctcactctcgacaataatagaaaatacatggacccaccgctccccgcccccctcaacaagcctttactcaaaactcgtctttcggggcgccccgcggcgcctggtaccgtctattgccacacctgtgaccctgctgccgggtttactgacaagaaacactctgggtgtcgactgcattcaacgggcttggggtgtttcgcccccatacgaacgcgcaaaatacacctcaccgggaggcggtccaaacccacaagcctnccgtcgctccgacccaccaccttccccaacaccgcgcaacgccgtcctaacaacctccccnctcacatcacactgggatacgacacattgtctgaactagcctctcgcctacagccacaccacctggtatctatcaccaatacttcaaactgattataggagactaaggccgcgacggctcgcnatgcggctatgtgagctcgcacnaccaacagcgatgngcgcgccgacggactcgcacactcctccgaccgactcgagtctgtactaggaaactattgacggtgctgcctgtctgcgacgacgactgagtccacgccccctctactttganccctccaaacggtcgataaattatcgtacgacaaaacatatctatcacgacnctctcacacgaacactacaggaccacacgggcgcagcgccaaacaccctacaantgtgtccacgtcccacacgttgccactacctgtctaattcttattgttctcacatccctacaaacattgtggagacatcacacttagcacgctgacgctaaatacacgcctnacaccaacgatcacaccgcgcattgaggggaccacagagatagattagatcgtctcatccactaacgagactgggcacagcacca

SEQ ID NO: 417108 - DNA, 610 bp, Homo Sapiens
  misc_feature (532)..(532): n is a, c, g, or t
ggatggcatctcctcatctgtcagctctttctcaaggtactttcccatgagagagaaggaaggaaatctccatgtcaaagcatttttcttcctactgatttaattttatggtttttatccttgtcgtctttaaggagcatggctacctcaatgctctgtggagggaaacaccaaacagaggctcatccctcccagtgtttagcccctgtgatgaggaggatgcagatactcctcttctactttgtattcttcggtcatcattctaaaatcaccacatcagcccacatccttctggtgcaaccttcagatgggagagaaatcctttcttgttacttcctgactgcagccaggccatccactgtcccatccttctgaaagtatgtgctttgtggccagatatgaacattttcccaggggtagctgctctgctaggttcttgatacgcaaaacttgagcccttgagaggttctggaccattgagtcccaactgcaacctacttaatatttcatagtaaggctatgcaaggccttngtatgaattttaatcattcttgacattatctccaaaatggttgggaacttttgctagtgcttgtctaaatatggacta

SEQ ID NO: 417109 - DNA, 964 bp, Homo Sapiens
  misc_feature (747)..(747): n is a, c, g, or t
  misc_feature (791)..(791): n is a, c, g, or t
ggtcaagtgataggaaaatggcattaggttttgaaattttattttgataatttaacacatatggagggtttgctatatgtatgagatattctgttagatgttgtgggagctagagagatatgactctctttcaatgaaagagagtaaaatctcgtgtgtgagaccctacataactattctcggtgaagcgagaacctcacttggttatctctgacctcgtctgaaattgattatgaacctagtttagtgcgtgatcaatctccttacatgtccagttacgattttatttggcccgcaaaaataaatatttctaccccctgctatttttagcagcgccaaatgcgcgcagaaattggagattggacttttcctaggggacgagataatcgcttcccctttgcaaaggactttagcttctcccctgggatcctcaagtacatctgagcctcaacgtttatatatgaacccgctatgcgactttgtagacgcgcgtgcgattccaacttactgaacgccgtgatcctcactagggccctacacatcgctagcggaggatccccttctatactttaatccctttcccccgtttttacaagatgcgcttgggtcttcctggacctgatgacggcccccccataccgcacacttgtaagccacccctatttccgctacccccgcctatgtctcgcctagaagctcacacactacggcccatacctgaacggttgacagcagacggcgaccaanactgtcctgcatactgatcctgatgcgggaccgtgcgcatttanggagaaacgatccgcctggaactactgaactccgggaagataaatgatcgcctcctataaattcccaattaagaaaggcgctgcgtatacacgcctaaaaataaacacataatatgccgctactccccctaatgtaacgcacggcataaagatatttcaccccgtgctagacc

SEQ ID NO: 417110 - DNA, 425 bp, Homo Sapiens
  misc_feature (68)..(92): n is a, c, g, or t
  misc_feature (290)..(321): n is a, c, g, or t
gtcagtgtaaaaagtataaaagccaacctaatacttagacaatagaaaagggaaaaaccaaacttccnnnnnnnnnnnnnnnnnnnnnnnnnctctttgattttgagggcgtcaccaatgtgatagccttaccttcatgagtactaacctttccattaagctaatcccaaagttgtctcccaagtacactgtccaggtggttgtggcaaatttatacttttccaaaggagtgtccattgagcaagtggaatatagatcctggagttttagatcagcactcctccaaatannnnnnnnnnnnnnnnnnnnnnnnnnnnnnnngggagaaagaattttccactctggttgtcccaggcctggaattgccaatgggtgcccttctttgggctccactgggaaaccctcccgccttcccctggggttct

SEQ ID NO: 417111 - DNA, 975 bp, Homo Sapiens
  misc_feature (412)..(482): n is a, c, g, or t
  misc_feature (546)..(562): n is a, c, g, or t
  misc_feature (673)..(673): n is a, c, g, or t
  misc_feature (858)..(858): n is a, c, g, or t
  misc_feature (921)..(921): n is a, c, g, or t
  misc_feature (954)..(954): n is a, c, g, or t
ggttaataatttcatgaaagaaagttagattggaggaatctagaattcaggagctagtccagtatacaagtagataatgagaactcaaaaacaatgcacagggctgcagtctaataacagatgtactatagctttttttagaaacaaaattttctctttacagtgatcacataggaataacagatttaaaaaccatttaaggctaggaagcaaaaccaaggcagactttagattttacttaacagtcttaaggttcctgggcctgccaggaagtgacagattttactcattcactgtaaggctgggaatctttgaaggcaggctttctatgtacattctcaagtatgatattctagttaaagccctggtaatataagcaatatttgttgtattctgttataagagagaacannnnnnnnnnnnnnnnnnnnnnnnnnnnnnnnnnnnnnnnnnnnnnnnnnnnnnnnnnnnnnnnnnnnnnngcgacgagttcgaaggaaccgcctgggcccaacatgggtgaaaaacgcctggtcctcctacctnnnnnnnnnnnnnnnnnttaaggtcaagaaacattgagttaggttgcctcccgcccctggtggaatgcccgaggtttaaggtgggggagaaaaggcttgaagggcccccaaaagaaattccactttgnaaaccctcggcgcaaggctggcaaagcttcgccccaaagatcctggaagaatctcgtggcccgccttggcccaccttccaacgccctggaggccaaacagagagagtggaggaaccttcctagtgcctccgagaaatttgaggacacaaataaccgaagacacacgcagcgaaaaactccctctnaccccgggcgccgggtttttgcccaaaactatccgcaccattttctggcccccgagaaaaaantcaacccccccagtgaaaacaaaaacaccaacncggtggagatggaccctcccg

SEQ ID NO: 417112 - DNA, 715 bp, Homo Sapiens
  misc_feature (309)..(488): n is a, c, g, or t
gggctaaggaatcggagagtggccaacctggagattcactccttatctatgacagacatccgaacccctagctcgttccttggaatgcaggccacctaggggatggaggccctttgctttgggttaaatggaggttgctaggtgggagggtgctaagtgaaaaacacaatataaactgcatgcttagtacaaacagcagtggttctcctgtccagcctgctgcccctggaatgccccttatgtaagtcctcaataaaccctgtctccctcactagctccgggtctctctctcttttttaatggagtctnnnnnnnnnnnnnnnnnnnnnnnnnnnnnnnnnnnnnnnnnnnnnnnnnnnnnnnnnnnnnnnnnnnnnnnnnnnnnnnnnnnnnnnnnnnnnnnnnnnnnnnnnnnnnnnnnnnnnnnnnnnnnnnnnnnnnnnnnnnnnnnnnnnnnnnnnnnnnnnnnnnnnnnnnnnnnnnnnnnnctgagccaccacgcccatcctgggtctcttttttggtgcctcggacatggtgccatccctgcttggagtcagcagaggtcttacgcgacagtccttggaatggtggaagcctgttttgttgtctttgatactatgaagggacaaacccctgctttgaaagtgtttatttcctgaaatttttacctgggatcccagctatctcctttctttctttcttttctctctca

SEQ ID NO: 417113 - DNA, 296 bp, Homo Sapiens
  misc_feature (150)..(159): n is a, c, g, or t
ggggctttttccacgggcgtcatctatagtccggaggacagccccagggcagaggcctctgttcatctagtttttccatgtccgaagactcaaagattctcattagtcatccattttttccctccgttctgctgaatatcaacctgaacnnnnnnnnnngcatcactgggcattatcatttcacactttgagttcctggagctggaagtacagaatccaaaaatatgtttatattttcaaatttctcttccactccaatgtaaaaataaactgacaaatgtttatatgttcatcat

SEQ ID NO: 417114 - DNA, 520 bp, Homo Sapiens
  misc_feature (70)..(126): n is a, c, g, or t
taaagggacgcagaaagccataccatgtcaacactaatcaaaagcaaacaggagtagctatattaatttnnnnnnnnnnnnnnnnnnnnnnnnnnnnnnnnnnnnnnnnnnnnnnnnnnnnnnnnnaatggggttactactccaagaaggcataatgattcttaatgttatgtgcctagcaacagatcatcaaaatatgaggcaaaaactgatagaactgcaaggaaaaatagatgagtttactatcatagttggagacatcaaaacccctctatcagtaattcacaggatcccagtagacaagaaaatcagttaagaacataccttgaaaccccaaaagcacccatcagttcaaactgggatggtaatttgccaccttacataacttccctttcatcccacccaacagccagggcccaacatatttcctttccccaagcctccacatgttaaacatttttacccaaagaattagaattcaccatttccctgggggtcattaaaaaccctttcccctttt

SEQ ID NO: 417115 - DNA, 678 bp, Homo Sapiens
agttctggggtacatgtgcaggatgtgcaggtttgttgcatacgtaaacatgtgccatggtggtttgctgcacctatcagcccatcacctaagtattaagccctgcatgcattaacctatttatcctgatgctctccctccctccaacctaccccacaggccccagtgtgtgttgttccccctccctgagtcctaaagggccaccttctgacgcaattactcctaatgccccgacctgcccatcatgccggctggcccgttacacggacggcgattgtggataagcatgaattgccggtgcggagcagtgccgataaaacggtgcgcccagtatgtatccccacctcgattaccctggtggttacccccaccccgggctgagcaggccccaaagccatgcgagagctcgaagcccacacgcacggcggctccgcgcctcccctaaatacttccccactcctcatagtggcacgccgcccaccccaaaaactccgcatagcctaagccaaaggtacagtagccacccctgtgcggccttatcttactcctgcacatggacctgcagttatcgtggataaaccattgataatcaccctcacccaacaatgttctcggcgaatcacgggcgacgcaataacaccgccattccgaaagctcgctggtagcttaacactgctc

SEQ ID NO: 417116 - DNA, 360 bp, Homo Sapiens
ccttcttactctgtggcgtgtccctgcgcgcgctcacctggcccgcccacgccttccccccggataacattatctgcaccgtttcctatttgggccccccgcgcgcccacaatgtaatttagacctgggcccaaaaactggacgtatccgatttctccccgggccattatcgcacaggtgtggaaatttcgcgcgcaataggaatacgcccccccgcgagcgaaacgcttatacgactttgtgcgcagatgtccgaggaagcgagtgccgcgcgaaaagcccgcacccgagaccaacactggcgcacggggttggagtaataatatgacaccgccatctaaatactgctcaatgccgccg

SEQ ID NO: 417117 - DNA, 1354 bp, Homo Sapiens
  misc_feature (101)..(111): n is a, c, g, or t
  misc_feature (116)..(124): n is a, c, g, or t
  misc_feature (777)..(777): n is a, c, g, or t
  misc_feature (848)..(861): n is a, c, g, or t
  misc_feature (886)..(886): n is a, c, g, or t
  misc_feature (932)..(932): n is a, c, g, or t
  misc_feature (984)..(984): n is a, c, g, or t
  misc_feature (1013)..(1013): n is a, c, g, or t
  misc_feature (1133)..(1133): n is a, c, g, or t
  misc_feature (1157)..(1157): n is a, c, g, or t
ggtcacaattacttcttcaagggccaaattggtacagcttcccctatgaataattactccagcccctattcatcaagtgcttatgaaaagccaggaacacnnnnnnnnnnnggggnnnnnnnnnttacagcttcatcctgtggagaacttttcttctgaattcccataacagtagttgttactaaaatccatcatgtatgtttagttatttttcagccatatatatatttttaacttacatttttggttcgggagtatatgcaaaggtttgtctaactatcttaacctgtcgccaccgttatattcgtggatcaaacaacttccacccaccccgtcgtaaccatctaacccccccatcaatctacctctctgcgctccctcctccctgatccagcccgaacccatcacccccctataagtcgcaaccctctccaggatatcgagcggttcccaccctaccgttgaagacctccaaccattttttccggtaaattccagaagttcacactcactttgtaacactctgcgagcgtcttactattacacagcccttctgttctctatcgtcgatgactgcgaagcgcccttatcactcccctctcgctgacactcacctgctcttataaatcagagacgacggtcccctttgtgatcctgcatgcacatgtcgctgccctttagacgcaagacctggagatcgtgctaagccaactgtattcataatacggggtttagtaggcccgcgtcttggacccgtaatctattaaagaaaccgtncaactcgcgaaaacacttccgtttcgctcgtacacctacccccgccctcctaaccccttattacctgattnnnnnnnnnnnnnnaaccacaatcattcttttttaattnttcgtcctcatctcattaacccccccctttcttttttaccctctcntggtattttacgcttgacactaagcagctatgcatctcattttttcacaccnctgcgactcgcgcgatttcccccctctcnagaaaccccccctcccaccaacccatttatccgccttttttccccgccacaccattcaccacgcaaaccccgccaccccccccaagctatcccctccctccgcccaatataatgtactcncgctgtttaaattagtaactaggntgaattcggcgacaccacgtaccatctttaataccaacgtctacatatactcttcccccctcctgttacggttattgtgctcaccacgctatgtactcttaatccccacccctaattaatcatctaccgtccttcccccatccataaatcctcattatctcactgcagcattgtccatcgtattctcgtcttcctcc

SEQ ID NO: 417118 - DNA, 752 bp, Homo Sapiens
gggatgtcattagcaccactccccaccctacttccagttgtgacaacccaaaaatgtctccagacatagccaactgtccctgggtgttgcgagtataggaggcaaaattgcaccctgttgaaaaccaccaccttagatcatctaggttttacttttaggataagacacttgagggaaaggctgtgaaactgaacctctgttagaagcaacacacagtatcactgcaaaaagactaaaagaaataggtgatttggaaagaggaggcccaggattaaaatatgtttccaagaaagtcaaatcttacaggagactcttgacttcacatctgctgatccctttacccgataggacctagagcagccattataaatctctgtacctgcttgctgcttttctacctcattgttagccacacccagtttgaaacagatgaggtatgctatttcataactagtacatcttttaataagcattttttattgtgattaaatatgcatatcgtaaaattcaccactttaaccagttttaagtgttcaattctgtggcattaagtatattcatactattgtgcaaccaccaccaccatccgtctacagaactcttcatcttcccaaactgaaaatatgtattcattaaacaataaccaccccttacctccctctctccttcagcctctggtaaccagcatttcagtctctatgaattgaccactctgggatatcttaaatgggattcaattcttaatttcattt

SEQ ID NO: 417119 - DNA, 762 bp, Homo Sapiens
  misc_feature (136)..(144): n is a, c, g, or t
  misc_feature (297)..(567): n is a, c, g, or t
  misc_feature (586)..(586): n is a, c, g, or t
  misc_feature (593)..(593): n is a, c, g, or t
  misc_feature (611)..(611): n is a, c, g, or t
gggtggtttatttgttgaaaaaccaaccttggaatttaagcaactcaagtcacattttaaaatttgttctatgcacagtgatacaaaagacacctatttgaaaaatttcatttattctcattttcagcagagattnnnnnnnnnctatcaaaatttttatgttttggtagtgatgatcttttgtgaagtttatctgatttgatcataggttttgtttatagttaatataacatgctacagccagtaaccatgtttggttttaaatctgtcttgttacagtgtgaatagtcactgtannnnnnnnnnnnnnnnnnnnnnnnnnnnnnnnnnnnnnnnnnnnnnnnnnnnnnnnnnnnnnnnnnnnnnnnnnnnnnnnnnnnnnnnnnnnnnnnnnnnnnnnnnnnnnnnnnnnnnnnnnnnnnnnnnnnnnnnnnnnnnnnnnnnnnnnnnnnnnnnnnnnnnnnnnnnnnnnnnnnnnnnnnnnnnnnnnnnnnnnnnnnnnnnnnnnnnnnnnnnnnnnnnnnnnnnnnnnnnnnnnnnnnnnnnnnnnnnnnnnnnnnnnnnnnnaggctccatctccaggaanatgcaanccaacaaattatttatanttccttgttgggcccgcctccggcccttccaaaaaaccttttctagaaccatttccttttggcgccgccgggccccagtaaggtaaattgaaaccatgggtccaaaacccggttttccctaaggaaaatcccggggccatgaacaaggggg

SEQ ID NO: 417120 - DNA, 822 bp, Homo Sapiens
  misc_feature (507)..(515): n is a, c, g, or t
ggctttaaccaccgcaggttttgggttcatctaggcagctacactcaaaagacacccatggcgcttggctgatcctagttttttattcagctttttcagtggatataggatatgtagcccagtgtgttggcaggacagcttcgagtgtctctctcagcaggagttctcacagagtccggggctattcccccacttaccacctcccaggatgggctcagggtttaagggcaaatgaagccacaccagggtgggagccaggaacctactggcctttaacagaacttgctgtcctataatacgtaaactggttctggggaaccctttttcaccccataaaaccccatgaaagtcctggggtcccctatggtaactttccgggggaaaaccagcaacccacaaggggaaaaattacccttacccctgtgaagttaacgggagaaaaacgggttgtttggcaaaacccttttttcctccccaaaacctttggtgatcccttaacttaccctnnnnnnnnnctccctttcggtcggcctgaaacccttgttgtttaaactccgcttttgttttaaaacaaacatccttcgtctggttttcaaaattatccgcccgctttctttccccttcttttcctctaccccccgggcccttttgcgcccaaattgggggccccccacaaaccaattttccccaccaaccccccgaaaaccctcgtcctatagggcaacaccttcccgatatttttgcgcgctaaataggggcccatctttgccccagggacaacaactttgggggccgcccccctctcaagtgggtatacacttc

SEQ ID NO: 417121 - DNA, 337 bp, Homo Sapiens
gggagaatgagagaatcagtgaagacatatgtagcgattgggcaacaggtgatagcaatcaataggagatgcttggagagaatagtaaaggcaactgaatcaatgatcagaaaaatgtcacagctggtaataaaaactttcaagtcagagtgtgagcctcctggagacatctgaggactacactctgccaataaggtgcttgataatagtctttcagatttctgaggagaaggcaaaccagggtcagctgtggtggcaaattgaaaggaaacttctggctgttcataaaaatgtataaataaagctccaaagcagcaaacggaaaaaaacacccaat

SEQ ID NO: 417122 - DNA, 390 bp, Homo Sapiens
  misc_feature (333)..(343): n is a, c, g, or t
cctaactctgcttccaaaaggtataaaaaccttcctttgaaactcttaaggaaaaaccttttgaagaaccccaccctacctcttttaataaccttccacgacccccgaaaatgtccctttcctcagggacccttcggcaacccactttttttaaaaaagggtaaaccccccccagggagggggagcaaccccccatctgtccaatttttttcgtggcgagagggggggaaaaccctccccttttggggggggacaccccttgtccccccaattccgcgcaaaacgattttccccctcggcggacaaaacaatttgcctacacgccttgttttnnnnnnnnnnnacggagaaacccccgtgtaatgctcctccccagcgctattggggata

SEQ ID NO: 417123 - DNA, 1012 bp, Homo Sapiens
  misc_feature (313)..(324): n is a, c, g, or t
  misc_feature (501)..(510): n is a, c, g, or t
  misc_feature (713)..(721): n is a, c, g, or t
ggcttctggacgtctgtgtccatgagaaacaggagggagagtggggctctacaatctggggttttagggaaaggtggggagaaggggctttgtagtgaaggggagaaagaaatgggtcaagactcctcaaatttgttgagccagagaatcctgaggaatcactactagtgttctcagatttactggggagagagaaaagggcccagggagagacaagtagacattgatagaccaggaagagagaggcaggtcaccactgtcactaagcaaggaaaaccagggggagcccctttattacctaaacaacccaacnnnnnnnnnnnntcctgtctggccgcactcggtccctcggaaaaagctttctaagaccaattcgttttaggcgccgcggtgccccagtaaggttaaagttgaacattgggtcataagcctgttttccctagggaagattccggggttcaattgactaaggttgctttggaattctccccccccaaattnnnnnnnnnncgcccccggggcgggcccaaacccgtaagccgttctctttgaaaaccatattttccccaccaaatggggtattttttctcccgaaagggttcccaattttaacgctgggggatatttcattatttccacatacaggggggaggattccccaaaagacccggaaaaggcccccgataattaatttacaaagaattttaaggcgnnnnnnnnnagatctcccttgtgccccaatcttttaaatttagaaaaaggttcacactgggcttggggtaaaaaattttccaatttataaaagaacatacttcccgtgcccccctaaaaatacggtggaaaaaagccctcatttcccacataataaacagggggtcaaatttacattgtgacaccacctgggtgataatatcccgccgacatagcgggggagttatttctgagccgcccacccttttttgtgtccgcaccttttgtgacccgccatataaaaataatatttttgtgcccc

SEQ ID NO: 417124 - DNA, 938 bp, Homo Sapiens
  misc_feature (94)..(170): n is a, c, g, or t
  misc_feature (293)..(412): n is a, c, g, or t
  misc_feature (625)..(633): n is a, c, g, or t
cctgagacggagtttcactccgtctcccaggctggagtagtgcaggggcccgatctccactcgctgcttcctccgcctcctgggtttaggcatnnnnnnnnnnnnnnnnnnnnnnnnnnnnnnnnnnnnnnnnnnnnnnnnnnnnnnnnnnnnnnnnnnnnnnnnnnnnntactatacatgacgtttcacctttttcgtctggcctatcttgacgcctgacctcgtgtttcaccctctcgttttggtttccccaacggctggcattttcttttgtgagctaccttgtcccgtnnnnnnnnnnnnnnnnnnnnnnnnnnnnnnnnnnnnnnnnnnnnnnnnnnnnnnnnnnnnnnnnnnnnnnnnnnnnnnnnnnnnnnnnnnnnnnnnnnnnnnnnnnnnnnnnnnnnnnnnatatcccctccccatttatgttccccttattcacctgattttttcctcaaacgcgttctctctgcccgcacattgaaccattttttccccccccgcatttatatattctctgccgccccctttcattcttttcgcaccgcccctccgcagaatttctctctttgatgtttgttgctttcctacggctggcggcccctgatacggtgatggtannnnnnnnnatttctcctgtccgggcacccccctcttttcctattttattttccccgtgttggtttcttatatattttctcccccgctattctgcacctatcttttttgttaatcatgcatcttatttgtcccgctcttttactcgctccccacactttttttctatatttttgtacatgtctatccctctcccttataatatagtctctcgcgtgctctcatatgtcctccggctctgctccttttatctactcgtttctaccctcgcccttgttttcttgttatcctatttgtttcgccccttttctttatt

SEQ ID NO: 417125 - DNA, 767 bp, Homo Sapiens
ggagtctaccatattcagtcttgagttttctctgatgaaaggattccttcgtctttgcagcagcaggctaagttggtactctccacagattcttggaacaacaacccaggctctaaggaaacatctaggcactaaattgaatgaaagagtgatggctttttattcaaataaaaaaatttcaaatctgtcaaaacagcacccctcggaaaactaaaatagagatatttcaagattttataattttcaaagacctttgaaatattttaaacttgtgaaaagttacaaacctgatgtgttgtctaaaagcgtttttcaaacaagccagtagacttgaaaaatctagtctgaagcacagacttaaccaatatttgctggggatatgcccccaaatctggccataaacaaaatctctgcagtactgtgacaggttcatgatggccatgacgccatgctgaaggtttaccggaatgagagcaaggaacacctggaccacccaggggcaggaaaacggcttaaaggcgttcctaaactacaaacaatagcctgagcgatctgtgccttaaggacatgtttcctgctgcagataactaggccagaccccatggcttttgtttcgtttgggcaaggaatacttttaatttaatctataatctatagaaacaatgtttatccatggcttgctggtcaataaacatggggtaaatctcttgtttcgggggctctccgctcttgaaaggctgtggagtcccccctgaatttccccactc

SEQ ID NO: 417126 - DNA, 529 bp, Homo Sapiens
  misc_feature (62)..(341): n is a, c, g, or t
  misc_feature (347)..(371): n is a, c, g, or t
gggcctcatttactgtggccttcattcaagtagtaatgattatttacctattaagagtatannnnnnnnnnnnnnnnnnnnnnnnnnnnnnnnnnnnnnnnnnnnnnnnnnnnnnnnnnnnnnnnnnnnnnnnnnnnnnnnnnnnnnnnnnnnnnnnnnnnnnnnnnnnnnnnnnnnnnnnnnnnnnnnnnnnnnnnnnnnnnnnnnnnnnnnnnnnnnnnnnnnnnnnnnnnnnnnnnnnnnnnnnnnnnnnnnnnnnnnnnnnnnnnnnnnnnnnnnnnnnnnnnnnnnnnnnnnnnnnnnnnnnnnnnnnnnnnnnnnnnnnnnnnnnnnnnnnnnnntgaagnnnnnnnnnnnnnnnnnnnnnnnnnctttgtcggccgccctcggcccctcaaaaagctttcctagaccaattcgtttggccgcgcggggccccggtagggtaagtggaacatggtccaatacctgtttcccctaggaaaatccctgcgtcatgaactaggtgctttgggattccccacccaat

SEQ ID NO: 417127 - DNA, 517 bp, Homo Sapiens
ggacaggaacgtactaccgaagccgtggataatccagcgagaaacgacggggcatgggcctgcagtatttataaggggctggttaatacaatctacacctgttccaggcttctgcaagcccgtgacaaactcgggtcccagggcagagcctggatctccaccacctgtgtcggcttcacccagggtgcttaaacactccctgagtcccccgaatgagtggcagctcagaagcctgctccagggctgggtcaccggagaaatgcacacagcttgtctgaggtctgcggggagagggagaaagggactatttacctctctgacttccaaggaacctactcttggggctgtggggaatccagggaggtgcagctgggccttaacctggaagatttagaaggggctggttaatacgatccacacctgccccaggcttgtgctcgtccgtggcaaacttgggtcccaaggtcagagcctgggatctccacccacctgtggttggcttttacccgggggggtt

SEQ ID NO: 417128 - DNA, 1288 bp, Homo Sapiens
  misc_feature (750)..(750): n is a, c, g, or t
  misc_feature (993)..(993): n is a, c, g, or t
  misc_feature (1143)..(1143): n is a, c, g, or t
gattaagctcggtacagtgggacctctagagtccgatgccgtcccgtcttggaggcggagatcgtaacgtacgtcgacctccacggggcccagcacgtcgatgagctgcaggaagcccggcatgtcgatccgcgcccagtgatgcacggggatgccgaagttctccgccacggtgcgggtggccagctccaccccgccgaaggcatgggcgtgggtgatcttgtccaggccccggcccgggatttccacccggctgtcgcgggggatggagagcatggccacctcccgggtgtccgggtcgatggagactaggatcatcgtgtcagagcgggtctgggcgcccagttcgcgggcgtcaatgcccattaccaggaggttgatccgctccacaaggactggcaggctctggagagagctgcgcggtccggggagggccgtgcgctggtcccccggttgccgactggcatctcccctaccctctccctcttaccataggcagagattgacctgttgtcctgccttttttagccccctttgttagattgcttgtctcccgcgtcccacccaccaaatcgcctctcctcgccctccgtgattgaacgaatagtaaggagaaacactatatataatataccaaaacctctttgtgcagacaaacatcaggcaagggaatggtatggtagaaaaaactcatgtacacaaattgacacattttctgtttctttgggcatgtatgtcccgcgagtattncacgtcttaggtgttaatatattgtgaaacccacctagaggttcctctctcttggagtcaccaccatatcagaacacaaccgcgctgcggacttccgccgagtctgcgtgaaggtggctcacccgctaccaggagcgcgcgtggcgtgagacagttcacaacgaatgctcaacggtggtccaaaaattactcgggtgccgtcggcggcagcggtcgtctagtctgattactggacaagcagcncccccacatttacaccaaatattcccgccgatataacccggatacgtgtctcttcgacagagatcttcttcctgtattgcccgccctttcctccttatgagcctgtacacagaacggttgtctcctaaaactcacctcgacgcttacgcnatgaaatttaatcgaagtgtgaggttcctgatctctttcttggctctcctatatcaatcatgtactcgcccgtaaccaactatacatggctctcactctagcactaaaacacacacctacattataaaccgctcactctgcgtcg

SEQ ID NO: 417129 - DNA, 1340 bp, Homo Sapiens
  misc_feature (475)..(483): n is a, c, g, or t
  misc_feature (973)..(973): n is a, c, g, or t
tcctctagagtcattttcccagcagggagctgcgggaggaactgccgcccgcggccaccgcttccgcaccaccagcgacaccgaggtgctggtccacctctacgaggacgagggaccggccatggtgaagcgcctctacggcatgttcgccttcgccctctccacccccgacgggctcttcctggcccgcgaccccctggggatcaaacccctgtatgtgggcagggaccgggagggggcgctcctcttcgcctcggagatgggggccctgctgccccacgtggagaccatcgatttattttccccccgggcactactggactgaacgggacggtttcctccggtactatgatctgcccccggtgcgctattacccggacagccctttacccgcgttggatgtattcatctcccatttgcccaggtctatcgtagcctaccccttcctgagccctacatacctgttggtatgtgnnnnnnnnntcgggtttccccgaaatcgcacgcatgaatctaccatttcatcaacaccttttatgctcttggctaccccaaacacgaaaaaacgccccggcacacattattccctcctccccacttttggggcccgttcgccactttgaccgcgcatatgatggtcccccttggcgcaccccgtgtttgttattaagcgattaggttgccgcccccacgggcagatactaaaatcccctgctacgctcacttgcgcgcggctgccagaatacgctgttgtttttgtccccgcgccgcgcagttagccgctattgtttcacccccccaccatcgccttaatattatattcgcttaccacctcaccccccgcaacacatatatacgcaatccatattaaagtggacaagttttggaactaaccccctcgtaaacgttaagtgcctgcgacataaaatatatgagactgcacaaataatatataatccgattattcgctcantgatcacccacccgctagccccaccacgattctagtataacataactcatacgcctaataagaataatcagtcaaaaatatcatatagtacgcgccaggaataaactactcggccattgtagttaatagttctctcagacgttgtggaagtattcacccagcactattatactagattatccaccgcgcggctgcatctctctttgttccccacactataacacaacacccatgtagtctaattctaccccgcgcgcgacactatgtagccactctggtctcagacatatatatttaaccccaacctacgatgtgtttttgtcaacgtgtgtatcgcctcctatccgataccaccctccccacgata

SEQ ID NO: 417130 - DNA, 762 bp, Homo Sapiens
  misc_feature (278)..(420): n is a, c, g, or t
caaacaaaatattgcatgggacatacttgtactaaaacattatttgttgttgttctgaaatttaaatttaactagatgtcctgcatttttgtttgccaactctcacaaccctgtaaatgagccatctctatgttctcactaggtcttactactgatgagttggggtggttctagttctattagcccccatatagcagctgtgagccttcacccctgaggaaacatcccttctagcagtgttgagatacacgcttgtcaagaatggagggatgtggtgnnnnnnnnnnnnnnnnnnnnnnnnnnnnnnnnnnnnnnnnnnnnnnnnnnnnnnnnnnnnnnnnnnnnnnnnnnnnnnnnnnnnnnnnnnnnnnnnnnnnnnnnnnnnnnnnnnnnnnnnnnnnnnnnnnnnnnnnnnnnnnngccacatgccctgttaattcccgaacctactcagggagggcttatatcaaggggtaatccgcttgtaacccccggtaatggcgcaaggcttcgcattgaagcccaatatttcaagccatttgtcacctccagctcctggtccaataataaacctggacctctcctttttccaaaaacttttgtattctataccctaaaggaattccgcttttcctggggtgcttaagggggcaatcaaaacaaccttcttaaggggggtttcctcctcgcggtggcactcctgacccaggtgagcacgcattccagtcccttaattgtagaaacccttgtcttatacgacca

SEQ ID NO: 417131 - DNA, 764 bp, Homo Sapiens
  misc_feature (99)..(138): n is a, c, g, or t
  misc_feature (141)..(188): n is a, c, g, or t
  misc_feature (193)..(531): n is a, c, g, or t
gggcattgttggcaatcagggctttcttttatatacagtcttgcatcatttaacaatatattccgagaaatgataaattaacctttgctaactctaacnnnnnnnnnnnnnnnnnnnnnnnnnnnnnnnnnnnnnnnngannnnnnnnnnnnnnnnnnnnnnnnnnnnnnnnnnnnnnnnnnnnnnnntgaannnnnnnnnnnnnnnnnnnnnnnnnnnnnnnnnnnnnnnnnnnnnnnnnnnnnnnnnnnnnnnnnnnnnnnnnnnnnnnnnnnnnnnnnnnnnnnnnnnnnnnnnnnnnnnnnnnnnnnnnnnnnnnnnnnnnnnnnnnnnnnnnnnnnnnnnnnnnnnnnnnnnnnnnnnnnnnnnnnnnnnnnnnnnnnnnnnnnnnnnnnnnnnnnnnnnnnnnnnnnnnnnnnnnnnnnnnnnnnnnnnnnnnnnnnnnnnnnnnnnnnnnnnnnnnnnnnnnnnnnnnnnnnnnnnnnnnnnnnnnnnnnnnnnnnnnnnnnnnnnnnnnnnnnnnnnnnnnnncattaaaccctaattggtttaccaatccggttgtctgggtgcctctaccacgtattgcatggtgggaattcctttaattaggaactgcgcacgtgccaatacagctttgcctcatcgccccgccaatctcccgcctaaccccctgtcacacaattgggcttgcgggcacaagatagattaaatacggccttaacatttgtcaccctcatgtggacatgaatcttcttttcccc

SEQ ID NO: 417132 - DNA, 685 bp, Homo Sapiens
  misc_feature (99)..(257): n is a, c, g, or t
  misc_feature (293)..(600): n is a, c, g, or t
ggtatctatgtccatggcacacgttttaaagtaaactttcctaaggtcaagattttacctggtgtttgcaacaggctgaaaaatgtgtccctccccacnnnnnnnnnnnnnnnnnnnnnnnnnnnnnnnnnnnnnnnnnnnnnnnnnnnnnnnnnnnnnnnnnnnnnnnnnnnnnnnnnnnnnnnnnnnnnnnnnnnnnnnnnnnnnnnnnnnnnnnnnnnnnnnnnnnnnnnnnnnnnnnnnnnnnnnnnnnnnnntgtatctttatgggaaggaaacagagggagattttnnnnnnnnnnnnnnnnnnnnnnnnnnnnnnnnnnnnnnnnnnnnnnnnnnnnnnnnnnnnnnnnnnnnnnnnnnnnnnnnnnnnnnnnnnnnnnnnnnnnnnnnnnnnnnnnnnnnnnnnnnnnnnnnnnnnnnnnnnnnnnnnnnnnnnnnnnnnnnnnnnnnnnnnnnnnnnnnnnnnnnnnnnnnnnnnnnnnnnnnnnnnnnnnnnnnnnnnnnnnnnnnnnnnnnnnnnnnnnnnnnnnnnnnnnnnnnnnnnnnnnnnnnnnnnnnnnnnnnnnnnnnnnnnnnnnnnnnnnnnnnnnnnnnaagtatctttggccattataattataacgggctgtaaattagtttaaaaagccaatagtccctggttactactattttaattcct

SEQ ID NO: 417133 - DNA, 970 bp, Homo Sapiens
  misc_feature (455)..(463): n is a, c, g, or t
  misc_feature (790)..(790): n is a, c, g, or t
gggttaccaaaacaaaccgaaaaatttattgtatttgggattttagaaaatccaactattaggaaccagaatttagtctgctacagtaggaaaacaatgtgaatattcacatcatcaagttgatgttacataaccttagaaagctactgctgaatcttttatatcaatggattctatttttaaatacttatcataataatcattattttatgacatgactataatattaaatctgttaggactagaagaatttttacctttttcaaggaaattgccagtagctcagcaaacatgttcctactctgtgacatattctttcttatagtgacgtccctttgaaaactttcttttctccctcccttctttctttgcgggcccagccatctacgtggcctaacaaccgatggtttttccaacttttggctttgtcacctttaaactcatcaaaacccccnnnnnnnnngaatacccccccttcataaatcccagaatttatacctggtggcgggaatttaaaatcctcggcgacctttatccaaggagcttctacaaacatattgccaaggctgaacatcttaactccgagacttccatttaaattgaagaaacaactccctcgtgttaagaagaatgattgcgtttaaacgcgccccctttaattggaacgaagcccctcatatctattttctttcaccacccgtaaagactgcatcttttacaacgcttttcaaacacgcattcatctcccttcccttgtccattttcaggcacgtatgataacgagatactnatctttgccattgccaaacacctgtccgtctcatcttacatataaagtctcgacgtgcggatacagacagacgcaccacaaagatctcactacgtcctatgtaaaccaccccgttctgtcacgtcactatattcagactttcagcgacatttctgttgtctccgacacccagggcaccgc

SEQ ID NO: 417134 - DNA, 693 bp, Homo Sapiens
ggggtgagaaatttgtagaagtaagacgtgcaggtgattctaagcatatacagaccttataccacactgcttcatacgcagataaagactttgcggcacttgtagcactacaatctatactgactaatgacccctctggatatttatataaagatttattatagactaacaaggtatcatcactatactcttttagccctacagtgagagatgcaagttttatcttatgtacctttgatattcctcttgataaagatcacaacgccaccctgaaagatatcaagactgcctttaactaaaatagaaactatcaggttcacactacacgaattacatagagctaacaacaacaatccctacaggtctacaaaaattaaaggaacaaatactatccctaacttgctatacactccaataaattatatcttgaccctggacacctatcccctggcctcaactttgttactgtgattatcggtactagaacctttaatactcggaacaacacccataagggttaggctaaacctacgtactcctcaccggatacctaaccgctcaagccaggctattgtttcattcccctcccatacgcgcatgaaaattgccaactgtaagccccccttggattcttttttcgaatacaaataccctttacaggaccgctctgttcccaaataatttttccaacgg

SEQ ID NO: 417135 - DNA, 599 bp, Homo Sapiens
ggctctaactacctggccaaaacctaaattccttcaagtctcagattaaaaatcttctcctctctgtaatcttaccacaactcccatccctagtattccctccagctcataccctggtatcctcctgggcccacattcacctcatcctccatgctcttgctgtgctctatatcagcctctcccacatacagctccttttggtagaatggagccttcatagtctcccatctgccttcacagtctctcatcttctgtagattgtgagatcctatagagcacagcctgtgtcttattcattgtggtcattctgaaaaccttgcatagtgcctagcctatgcaagtaggtgctcaataacttgttattataagcatcactgtttgatttccctggctttatttttagctctgattttcaacctgacacaaagatgtaatagaagcgactagatactaaaaagctataaaaaaggacaaatcataaagcaattaatgacatagaaagactcccgaaaaataaatagcaaacatgttacaacgcaaagaccatccatgcattacttccaatttcatggggccataaaaaagcattttaactcctg

SEQ ID NO: 417136 - DNA, 126 bp, Homo Sapiens
cttcatcacacttaactgtttacacagccattgatttactttttctccttctgaactatgaacatcttaaaggtagatctcattggtattactggtctttagtttcccctgcaggtgcttaataca

SEQ ID NO: 417137 - DNA, 125 bp, Homo Sapiens
ggcaggtagagcagcagggatgttgacccaaagaatccatgctcaggacccaggtcccaccctgatggaaggagcttgcagtgccaagagagtgtgttgccatcactcaggcactgtgaaggcac

SEQ ID NO: 417138 - DNA, 380 bp, Homo Sapiens
  misc_feature (259)..(260): n is a, c, g, or t
  misc_feature (262)..(262): n is a, c, g, or t
  misc_feature (264)..(281): n is a, c, g, or t
cagcgatactattattcttgtttgcacatcatcgtgcccttgagtgagaagagtgatggggtcaccgccaaggcggatgggcactgtttgtcaagtatgggggtcgtcacccatcttgaccacagggctagaccacatgtggctctgtctgctctcatacacagtactgtgctgcagtgagggggatccttaacttctgtccccaacctccatttggcacttcctgttctcaggggaaagatggtttctgagccctttnntntnnnnnnnnnnnnnnnnnnggggtgaaaaaagcctctcccctgtgtcaccccaacctgggaatgcaatgggcatgatccataggttcagggggaagcccggaacccccggaagttcta

SEQ ID NO: 417139 - DNA, 742 bp, Homo Sapiens
  misc_feature (106)..(176): n is a, c, g, or t
  misc_feature (241)..(340): n is a, c, g, or t
  misc_feature (394)..(671): n is a, c, g, or t
ggcacataaatatagtcaaattatatttgtcaaagaagcaaaggcaattcagtgcaggaagagggaagaggagaatctttttaacaaatgggaaaatccagacagnnnnnnnnnnnnnnnnnnnnnnnnnnnnnnnnnnnnnnnnnnnnnnnnnnnnnnnnnnnnnnnnnnnnnnnctacagaagctaatataggaaccaatctatgtggtttgtggtttggcgatgagtttttaaattcnnnnnnnnnnnnnnnnnnnnnnnnnnnnnnnnnnnnnnnnnnnnnnnnnnnnnnnnnnnnnnnnnnnnnnnnnnnnnnnnnnnnnnnnnnnnnnnnnnnngtaagccaaagattagaagttatttgcaaaacacattaactgataaaggactgnnnnnnnnnnnnnnnnnnnnnnnnnnnnnnnnnnnnnnnnnnnnnnnnnnnnnnnnnnnnnnnnnnnnnnnnnnnnnnnnnnnnnnnnnnnnnnnnnnnnnnnnnnnnnnnnnnnnnnnnnnnnnnnnnnnnnnnnnnnnnnnnnnnnnnnnnnnnnnnnnnnnnnnnnnnnnnnnnnnnnnnnnnnnnnnnnnnnnnnnnnnnnnnnnnnnnnnnnnnnnnnnnnnnnnnnnnnnnnnnnnnnnnnnnnnnnnnnnnnnnnnnnnnnnnnnnnnnnnctacagcttacttgggaagaattcagcagttcccttataaaacctaaacattatttgccccctttggatcc

SEQ ID NO: 417140 - DNA, 227 bp, Homo Sapiens
agccttttttggtcttcttttaatatccgccttaattaaaggggaccactctcctttgggattttaactggacctttccaacccggcgtttcccctggttatagttttcggccttatggttcctttttttaaaatcacccccttttcccttaatcgggtttttttaatttaaacgatatggctaccaccttattttcaccacctggatcggcctattttggtaaaca

SEQ ID NO: 417141 - DNA, 940 bp, Homo Sapiens
  misc_feature (263)..(284): n is a, c, g, or t
  misc_feature (869)..(869): n is a, c, g, or t
ggcagtataaacaacaaagaacatcatttgtcagaatgacctgggggaaatagtccagtgaaactaagcaaagggaactttataccgtgagggaaaatcaatggattgtaacagaaccctgcaagaagagacatagctttcaagttccagatattaattattgactgagaagcaggatgtaccagaaactgggcttcttgttctacttatctagcgcccttttcacagtgttgtatatgtaaataaataataaagcactgtgnnnnnnnnnnnnnnnnnnnnnnaacttatagaaacaaacaccagatgaggataaatacaaccgtcttcatctataataatcattgacttggtgctaataccgctaaatttcgcactacaacactatcatttacgatggttaagagaacgcttgcgaccagataggattcacaaaaaataaggcaatagagtaggcccactgatatttgaaagagtattggtgcgcgaggaggcgttaccagacgtgagggttaattgctttctttaagttaaaaagacccgggatatccggttcatgaatatgcgtaaccccctaagccacgctggaaggtatcccccgagatcacccgactcaggatccctgtgtcattaagagcatgccccgagcacttgacaagtagggcatatgtaacagcatgtccgatcgtttcacccaggccctctccagcccgttatcttagtaatatcgcaaggataaacctcggccgtggcgaggggagtaagtgaagtagatggtacaccgtgcgtcatagaaagcactgccgatcccggtgagaataacgtagaaaggatgtagtcgagtgaacctcatcacccactccgcctgnacgtcgctagtatgctcagttagacgatgctcccccatcagattaaatgataagtccgagcatctagtggg

SEQ ID NO: 417142 - DNA, 774 bp, Homo Sapiens
  misc_feature (415)..(415): n is a, c, g, or t
gggtcttttaaggtatgaagtagaataggatagagaattttatctccctgtgtcccccacctcctacccagggcttgcttttacattcagctttatccagcacgaataattatcagtgaggaatgccagccatctaagccctagtgaagctgtgggtgaagccagggactgacacttcctggactgagaggcccttctggggagaggcattggcggacaattattttatttccttcagggagtggcgcagtgatcttatcagggaagataagaagtacatcggcagtgtgagtgacagctttggcagttagtaggaagggactcagcggggagtcaaaaatatcccaaagatcttgaaagtatttggagtaaggaatggggtgtaagagattccttttcaccaccagaatcttangctgagagacattctgtcaagttcctctatcctgtttacctgtgaatgaagcttagcttgttcctaccactccctgaaatagtaggcagggctttgcatgtacctcttatgggcacattccaacccttttcccaatatatgtggggcattggcatatatgcatatttcttccctttcatccttcccaaacttaaagaaagtgtcgtgtgggatgaaaaggcagttttggggttagggaaaggagctcacatttttggattccgaaccgaccctggttttcaaattactgcctcagccccccaggggcaagtttccttaaccctctcctcaatttccccccctattccttatttaaaggt

SEQ ID NO: 417143 - DNA, 1014 bp, Homo Sapiens
tgtacgggtcccccctcgaggtcgaccactcgaaaaggtgggatgtcggacgtacattcgccgagagtgataggtggccaggaggcgtctgaaggagagtacccctggatggtgtatcacaagcaagggtgtggtgggacgctcattgctcctcaatggatcgtcaccgccgcccactgctacttcggtctatccgatcccacctccttcccgttgaccctgggcaagaccgacctatcagacaattctcaagacagtttagtgctcactcccaagaaagtccacatccacgaaaattacaataataacaacttcaagaacgacatcgcactggtggagctaaatgaaccggtgcagttctcgtcgaccatccagccaatgtgtttggcattgaacaaaaacatcaaaagaggaggcaaggtagtcgccacaggttggggtactaccaaggcaggtacgaacaagtattcagacatactgctggaggtgtctctagacctacttagtgactctaaatgtcaaaacttaggcaaacgcctgacccccagtatcttcatctgcggccctcactcaagacaagggataccctgtcaaggaagacagccggtgggccctcttgatccccggaaggtggggtgaaggggaacaaatgggccactgggttaggataatccgtccagcccacggggggaaggattgttgcctggaacgtggaataaagccccaggaagttccaccaccccggcgatgagcgggctttaacacccttcctggggaatcccccttctcaagaattggggactcccgctccaaccttggttaagaagagtttcttttgggggcgttcccatcccatttaaaggccccgaccacactcggcaatttttcatttagcggggcttcccattttcaaaccatccacgaagtcaagctcaagggtcaaaccaaatccaattacaagatatcctctgctcatatccttcccatcatgggagcccgacgatattacaatat

SEQ ID NO: 417144 - DNA, 796 bp, Homo Sapiens
gggacattcctacagccggcaaagaggcctggtgatttgaagcagagtcctaggcttatggagagagaaaaccctgagtgaaatatcttttgtttgactcaaatcacatttgaaaggcagtataagtggttaagggcactggcctgagaggaaggagagagggcttctcttcccagcttagcctccaatgtgggcctcataaccatcagttgttactgatgcttgttttggttgtcaaagaagaatgaggagaggagatataggaggtggacttggaggtttgttcggagtcactggctgcagcaagtctcctcccacacagccgaccccattcctcagacctgcactctgtacagcatggctactgaccaactcatggttaattgcgtaggacaaactgaagcacagctgaggtgcccaccatcagtagagctaggccagcatcggagaaagctgggcctcctagccctttctcggattcaaaattctcccagcagatacccaggcggaggagtgtgaactctcaccccctaaaagaggtttttccccaattttccatggatttagggatcccttgaattccagtccagtttccctaagcttataaatcttatcccaaaagaggagccgacaaaaaaagcctgattgtggaaaagctgaagaggaatttttccagcgcatttaaaaaccagtgaaaagaaaacacgggtgaggggaagaatggcttataccccccctggccttggggaggaacttcctgggcgcctcgggccttgtatacccaccttctctgggg

SEQ ID NO: 417145 - DNA, 426 bp, Homo Sapiens
  misc_feature (189)..(252): n is a, c, g, or t
ggattattactgttgcaactactggagaaaactggacatttacaaagttaaaagatcagtcacagaattaagaaacaaccatttatccacacaataggagaccaaaggggctaatggtttataaatgttgcaaaggaagcttcctaccaaatcccaatataaaatcggcaaaacaaaccctggaatagnnnnnnnnnnnnnnnnnnnnnnnnnnnnnnnnnnnnnnnnnnnnnnnnnnnnnnnnnnnnnnnncaggtctaaaaaccacggtgagaaaggaaataagggaaaacaagggaaagagtttggaacccacaacgaaaattggtggaaacagggttttaattttccccgcaggaaggggaaaaatttgcgtaaattggggtagggaatctgaaactctgttaaagaaaaaaaccccgtggg

SEQ ID NO: 417146 - DNA, 460 bp, Homo Sapiens
  misc_feature (217)..(267): n is a, c, g, or t
gatccaaagaaagggtggtagacaaaggtctagctcctaggctgagggcctcagggcagaatgcggcttcatcctgagtcaatgatcttctcaggtagttgcttcatatatacccccttcccaacaccagagctgctcttagactgaggtcaagtgtgagccagagatggctggagatatgagaacaagagcaaagcggacaggaaagggctaggannnnnnnnnnnnnnnnnnnnnnnnnnnnnnnnnnnnnnnnnnnnnnnnnnnccctaatacaaccacctttcccaaatcaaaaaatgtcgggccgccctcgggcccttgaaaaaactttcctagaacacttccttttggcgccccgggcccccttaaggtaaagtgaaacatggcccaatacttgttttccccagggaaaatcccggttcaaggaacaaatggctctggaattctcccccccatt

SEQ ID NO: 417147 - DNA, 748 bp, Homo Sapiens
  misc_feature (396)..(681): n is a, c, g, or t
ggcactgacctctcttcctattaagacatccctgcagatgtatcaacaccgtatccatgttctggaaggcagaaatgtgggacaaccaggataagtagttttattcagtatcacacaataaatggactgtgagtggacactgaaaataaaccctaagcttgtcattcatcacaccctttccacagtgggagacattaggctgatttccattgctgtctgagtttgcaagaggatagggcacattatttagggagcagatgcttgcttcacacacccctggtgaccccagccaatgtgaacatgccattccagcttccagaccaaaagggaaaattcgagcttaacttgaaggtacagtatgcaaccttgttttctttgtccttaataagcaacctnnnnnnnnnnnnnnnnnnnnnnnnnnnnnnnnnnnnnnnnnnnnnnnnnnnnnnnnnnnnnnnnnnnnnnnnnnnnnnnnnnnnnnnnnnnnnnnnnnnnnnnnnnnnnnnnnnnnnnnnnnnnnnnnnnnnnnnnnnnnnnnnnnnnnnnnnnnnnnnnnnnnnnnnnnnnnnnnnnnnnnnnnnnnnnnnnnnnnnnnnnnnnnnnnnnnnnnnnnnnnnnnnnnnnnnnnnnnnnnnnnnnnnnnnnnnnnnnnnnnnnnnnnnnnnnnnnnnnnnnnnnnnnttaattaaataccaccagggctatttcaagtttgccaaagaaccaacttgggtcaaaggattgtttt

SEQ ID NO: 417148 - DNA, 889 bp, Homo Sapiens
  misc_feature (227)..(235): n is a, c, g, or t
  misc_feature (345)..(354): n is a, c, g, or t
  misc_feature (510)..(510): n is a, c, g, or t
  misc_feature (811)..(811): n is a, c, g, or t
tggcatgtatcctgatttctggggtattaattagttcacatggccatccaagacccactccagatgcagtggggctcctccccatctgtcacagtacactggcatcaacatcatggtgaagttatctcgttgttgtcattttcatcttcctacttgtaaaataactttacatactcacattatctttttaaattatttaaaaccacacttattactcacttttctannnnnnnnngacattggtattctccactcccgctcccccaaaaactcatatacctcactcttacctcccctttacaatcattcaacccccactttttactttcttcccctttcctccannnnnnnnnnttactctttcattatccctctctcacccttcatattctaccttctaaaataagtcgaataaaacattccttcccaccactccatcaactatttatataataaatcaggggatcctcgtcgtgttccacgccctctttcctctttatttagttcttnatcttattctccaaaaatacattaaaccactgactgaccacactttcatcttcttatatccttaaccccgccccccacatttacctctccatccttccccccctctctcttatcctatattctcccttgcgtaaccataaattctccaataacactcatataccaatcttctagcccccaatctcgcaaaattataaatatataacttgttttaccttagtctcgcacattaatctctcataattccttacaaatccatcggccactatttaatattgtacttccgtcttcctctgatttnatttatctccgacagatatattccttgttatcgccgcaagataaactattatagttccccgcgcacacctcatctttc

SEQ ID NO: 417149 - DNA, 738 bp, Homo Sapiens
gggatttaatgttgccaattctgttctttagaataccatcatgtatttatatccctatatatcacataactaaaatatacatttatctgtacgcgtgtgtatcatatggagcacattttcttttgcagggtttctttgttttaaatgtctatttggttattttcttgattgaatttctgtgtatgcttttttcctcaatgctttagctgtaagcgaataaggtaaggactttgtatgcaatattctacatgttttgttttataattagagaatatcttattttatctaaacctcgtgtatcacgtgatatatttgacaccctgtcatatatcatacttggatgcaaatgtttatgaaacacaaatcatctcaaatcaacaggatcaaaattatatttgaaaaatgtattcaataatatgtgtaagacaagataaaattaattctaattgaattcacacagcgtttgaaattggatgtaaatctgtaatatcaaattacattacatatgaattattattatatttgcattcaggaaattgtactgtgttcacttctgagtatcacttagaaagaacattagaacagatacccctattttcacttttctcttctcttttcccgctcctttttcttccctctttttcaataacctggtcattgaaaaaatctcctccatccttaatttatcaaatatgaaagaactgaattctgaagaaaatgtagaagaaccccaagaat

SEQ ID NO: 417150 - DNA, 758 bp, Homo Sapiens
  misc_feature (363)..(635): n is a, c, g, or t
gatttattgtgtactgaaatgtaccatgcttgaaagtttccttttgtggttaggtaatgaggaagtagtgaggtgaggcagaagtataaccacctatgtggactgctgaggcatattataattgaggagtggtagtggttaagtgacgtctgtcagaacttgggcttttttgaattgaggtttataaccctcataaatcattaaatgccttgagtttatatgggaaagggagaataagtatgatttttaagtctgatattgcaatagcgtgtgccccagataattaaagctgtagaaagttctaacgtaataatcacctaatgcaaagtgaaactggttccatttaaaaattcaggaaacagnnnnnnnnnnnnnnnnnnnnnnnnnnnnnnnnnnnnnnnnnnnnnnnnnnnnnnnnnnnnnnnnnnnnnnnnnnnnnnnnnnnnnnnnnnnnnnnnnnnnnnnnnnnnnnnnnnnnnnnnnnnnnnnnnnnnnnnnnnnnnnnnnnnnnnnnnnnnnnnnnnnnnnnnnnnnnnnnnnnnnnnnnnnnnnnnnnnnnnnnnnnnnnnnnnnnnnnnnnnnnnnnnnnnnnnnnnnnnnnnnnnnnnnnnnnnnnnnnnnnnnnnnnnnnnnnncattgaaggatctgttccccctcaattaattttggatcactaggtcccaaatttcctggaaaacgaatatccgggctaaaacaaagttttccaaaagccaaaccttcccctttccattttacc

SEQ ID NO: 417151 - DNA, 220 bp, Homo Sapiens
gtgtgagccacccgtgtccggccataaaacatttttttacaaaaggcttacaaaggaatatttatagcaagttttatttgtaaatagcccaaaaagctggaaaaacaacccccaattgttctaattcaaccagttggacctggggaaaaggaacacaaaatttggtgggccttaatgtttccccaacacacgctctttagcgacatatttaacccccagc

SEQ ID NO: 417152 - DNA, 754 bp, Homo Sapiens
  misc_feature (258)..(351): n is a, c, g, or t
  misc_feature (382)..(454): n is a, c, g, or t
ggaaatacatatattcatatacataagacttagtctaaacaggaatattctttcaggagggaatcttgcttctcctacagaaaaatacctaacatggcaggggcaaaggtaatattggaccaaaaaaatctggacctatgtctattaaattgctcacagtgtttatataatatcggtgaagggaagtaaaattgaggttagtgaaagatactccacgttttaccctaatacttttctactgtttgaattttttatagnnnnnnnnnnnnnnnnnnnnnnnnnnnnnnnnnnnnnnnnnnnnnnnnnnnnnnnnnnnnnnnnnnnnnnnnnnnnnnnnnnnnnnnnnnnnnntttaataagaaacaaggtctttctctctcannnnnnnnnnnnnnnnnnnnnnnnnnnnnnnnnnnnnnnnnnnnnnnnnnnnnnnnnnnnnnnnnnnnnnnnncctcagcctcctgagtagctgggactactggtgcatgccaccatgcccagctaagttttaaaatttttgtagaaacagggtcttgctatgttgcccaggttgaccttgaactcctggcctcaagagatcctttcccctcagcctcccaaagtgcttgtattacaggcgtgagccactgtgcacagcctacttatattatttaaaaaacaattaatcaaataagttggttagggattaagtttcagtgggcataaaacagaaacttaaaacaatgtggaaagcctttatttccgttctccc

SEQ ID NO: 417153 - DNA, 722 bp, Homo Sapiens
  misc_feature (143)..(592): n is a, c, g, or t
ggactagtctgtctgttatgtttctgggcacatatagaccttgctcttttggctcacggcctattagaggttgttagggaacataaacaatgcttagccaagttatagatgaagtatctgaaaatgtgacacgatttcccagnnnnnnnnnnnnnnnnnnnnnnnnnnnnnnnnnnnnnnnnnnnnnnnnnnnnnnnnnnnnnnnnnnnnnnnnnnnnnnnnnnnnnnnnnnnnnnnnnnnnnnnnnnnnnnnnnnnnnnnnnnnnnnnnnnnnnnnnnnnnnnnnnnnnnnnnnnnnnnnnnnnnnnnnnnnnnnnnnnnnnnnnnnnnnnnnnnnnnnnnnnnnnnnnnnnnnnnnnnnnnnnnnnnnnnnnnnnnnnnnnnnnnnnnnnnnnnnnnnnnnnnnnnnnnnnnnnnnnnnnnnnnnnnnnnnnnnnnnnnnnnnnnnnnnnnnnnnnnnnnnnnnnnnnnnnnnnnnnnnnnnnnnnnnnnnnnnnnnnnnnnnnnnnnnnnnnnnnnnnnnnnnnnnnnnnnnnnnnnnnnnnnnnnnnnnnnnnnnnnnnnnnnnnnnnnnnnnnnnnnnnnnnnnnnntaatgtttttaggctgtatgactgtcttggggaagaggatttctgattcccatagccctgccttgtgggaagaagtaatttctagttttctaccgggctaaggctccggggaaaaatatgaaaaccctgt

SEQ ID NO: 417154 - DNA, 384 bp, Homo Sapiens
  misc_feature (108)..(138): n is a, c, g, or t
ggatatctcttcattctgaaagaaattctgaagagtaattctgaactcttcagttttttagtgtaacaaaatgaaagaaaatttactcaggaagggattgtgggttcnnnnnnnnnnnnnnnnnnnnnnnnnnnnnnnttaatcttagaaatcatatttctttttctttcatagtcttttcctgtgtacgtgttttctttcactctattcattttttgctcagctatcctcctgtaacctcataacattcttattgaaaatgatgggatgggtaagtgtcttgcaaaagcggggagataaaatccctttttcccctcctggatttccaacggaaactcattgggttcctttccccgcccttttcttttaatccaaggtttaaac

SEQ ID NO: 417155 - DNA, 898 bp, Homo Sapiens
  misc_feature (630)..(739): n is a, c, g, or t
ggcagccccacagtcgggtggttctcacctccccaagtggctgggtctggggctttttatgggctcagaataggggaggggcaggccataggtagtattggaaaaggcaacattcaactggttaaaaagcattattcagaaagaatcaatcaggaaagggtgggcaaacaggaacagaagttctaagtctgagtcgtgggtttcgtctgggaccagcagtccagcctttcagctctgtttttggctggaaggtggggtttcaccagggacccacccccacctgccaatgcatttggctgcatcccgtggctatcagtttgaccaaatatctgggtactgagccgccatgaggaaagcagctgccaaggactgagcccctcctctgcataataaaacctttacagaaaaagaatttacaattttcactcctgccaagttgacatgtaaaattaatcatcaccagtctgctccttgtcaatctgggacccacacatctctccttaaatcatacttcaccttcaagtaaagacaataacaagatcgtagttctgtctaacatgacacaactatccttgctacaactgcatcctactgcactaatccttttcccagaagaggatacaaagtccnnnnnnnnnnnnnnnnnnnnnnnnnnnnnnnnnnnnnnnnnnnnnnnnnnnnnnnnnnnnnnnnnnnnnnnnnnnnnnnnnnnnnnnnnnnnnnnnnnnnnnnnnnnnnnaagtcaccccctctgtctcactggagataaattgcataattcctggctggccccctttgggagaaagctaatccgcccaactctaaaaggaatggccaaccccttttggtcttccttaaacctaccccaatgaaccctgggaaaggcccccccctccca

SEQ ID NO: 417156 - DNA, 897 bp, Homo Sapiens
gggatctaatattcaccttcctttcatagccaaactcattgaaataatactgaacattgccttttctctgcttcttcacttctcactcctcagaacactgtgctctggctgtatcttctgcggtgtctcagaactgctcttggaaaagtcaccagtcacttcctacttgataaatacatgtctcttacattgtttgatgacttttcagcatttgatggttgctgtccactcccactttcacagaaccctcatcaaacagccttctatgatcccaaatgcaactttctatcacatttttatgctcttcttctgcctactcatgaaaatgttggggccatccaggcttccatttttagccctcactttgtgcaggtttatactttattttcagttttgttatctgatctctgactccagcccagaccattcctgactccacatccacatattcatctggcttgctgaataacttctcttggatgtacatgtgtgccttagactcattatgtgcagacatgaagtcatcttttttctctccagacctgtttttcctctcgtattcttcttttttggtgatgggtacattattcagatggaacgtccaagtccaaagtcgttctagaatcctccctccctcctaatgccccatccaatttagtggacaaaatcctatccaattcggcccttctaaataacagtcaaaacatttcattccaattcaccgccccgggtcattggctttaaaggaaaaccttcctcctttttttccccggattcaagccagagggccccggaaaccaatatatctttcctggcctttcccagaccttgggcattcccaacacccgcgaaaattaaatcccccctggaagagggcgattccctcaagggggaatc

SEQ ID NO: 417157 - DNA, 781 bp, Homo Sapiens
  misc_feature (356)..(640): n is a, c, g, or t
  misc_feature (647)..(647): n is a, c, g, or t
  misc_feature (657)..(657): n is a, c, g, or t
ggatattgatataaaggcattcaatgacttaaccttaccaagtgcaacatcttcccccccaacccattattttataacaaaataactgcaaccccttaagtatataaaacctgttttccatcactttagtaattaagacataaattgcttttttccgttagagaaatgtaacatctgatataatttctcttgtctaatgggctgctctgtccagatggatatctgcaattatccagtgacaagatcagttaaagcaactcacagcacatttagaaactcacgggtgaatttttcattttgtcattgtcaggtctgtagtttaagccttctcttttccccttccttcgcttgtttannnnnnnnnnnnnnnnnnnnnnnnnnnnnnnnnnnnnnnnnnnnnnnnnnnnnnnnnnnnnnnnnnnnnnnnnnnnnnnnnnnnnnnnnnnnnnnnnnnnnnnnnnnnnnnnnnnnnnnnnnnnnnnnnnnnnnnnnnnnnnnnnnnnnnnnnnnnnnnnnnnnnnnnnnnnnnnnnnnnnnnnnnnnnnnnnnnnnnnnnnnnnnnnnnnnnnnnnnnnnnnnnnnnnnnnnnnnnnnnnnnnnnnnnnnnnnnnnnnnnnnnnnnnnnnnnnnnnnnnnnnnngtgggcngtgcattagnggaaggcccttcccctgttcgggccggcctccggcccttcgaagaaagcttttctagaacacatttcgctttggggcgccccgggcccccagtaagggtaaagttggaaacattggggcccata

SEQ ID NO: 417158 - DNA, 758 bp, Homo Sapiens
  misc_feature (617)..(617): n is a, c, g, or t
ggtgtgtgatagggcctgaggtttggcatttctgaccagctctcgggggacgctgaagctgatggtcccagactcacaccctgagtgcacagactctggagtctgcctcctgcggaagcacagacgggctttgtgcatagacatggtgactggcgcctgtttttgtggaagacactgggagtggttctttgcccttcaaaataattctggagcctcactggccaataattctggtgtagaatcattcttttgacttcaaggttttgttccttatttaaatataaacacccagtggtactcttgagctaagtactggctcattcacattttcaggaagtttgcaagccagttgatgtcacgttgggagcttgatagcagccatggtgggagggtcattccacagaaatcaccaaacactgcaaatcaggcatttctctcccagctccaccttccggccagttgctaaacatttaccaggccaccactgctcagctcttggagaacaatacattaagctatatcagtccttgtcactgtaattgggaaaggctctattcctccccttcctgagaagaagtttcgatgagggaaggtgggtagagctgggagcacatgangtgactgaggggagagagatgtgccagctgcagtctcttggagctgtgtgtgcactggtctccttgtcctgagtctgaagggtcttgggtggccctggcagaaaaaaggggctgctttccctcaccctttttaggtccggg

SEQ ID NO: 417159 - DNA, 762 bp, Homo Sapiens
gggataaagatgcaattgggaagtgatgtgaaatgtctgaagtctccagcttcccttttcaggcaaccctgccccacctagctcagtcctgctttattttccagctggaattttccaggtagcttcctacctggtcgtccagcctccagttcctctccactgttcatcctacacgtcactattacattactcttctgaaagtgcagctccagtcacatcactcccatcatcgttgtcatcatcacgtcatctactgctcccaaataaataagtgtaaactgctcccaacatagaattccagtttatcctcccaccctgtttccagaatcaccagcccaactgttcacccagttgttccctgaaccccatgttccctgccttattcttgctgttcttcctgtctgcaatacacccacccacgtctctgcctcttgaaattctagtaatcctccaagtcctctctgaaccagcatctctgtcatgaaggcttttctttgtttctacaaccaaattttctccttgaatcttctttttcctatgcgcctctcctttggcatgtaatcttttcatgccttctagcaactgtgtacctgatgtattcccttatgacaatatatactcttaaggcccaggaactgcctctgaatcatcttcataactctcaatgcactgagtgacaaggggacctggccagtgttaggtacttgtaaatatcaaattaaagtagaaaaaattgggcaggccaggattagccagaagtca

SEQ ID NO: 417160 - DNA, 569 bp, Homo Sapiens
  misc_feature (67)..(67): n is a, c, g, or t
  misc_feature (237)..(237): n is a, c, g, or t
  misc_feature (240)..(240): n is a, c, g, or t
  misc_feature (326)..(326): n is a, c, g, or t
  misc_feature (458)..(458): n is a, c, g, or t
  misc_feature (511)..(511): n is a, c, g, or t
ggacccgtaaccaacaattctggaaacaaaaaagggcccttaaaataatcccgcggaatttctctcnacaagtgaaatcttcataaatcacaaaactttttgcaaggaacagaacattaacacgccaaaatactaaatacatcaaaaaacaagagtaaaatgagtcccgcggccccgccacttcaccggggctctccctccggacagacaaaacctgtgctctgtagcaacccagtnctnctgtatttggcgttgcgccgccggggcataccctgtccagtgcgtaattagcgagtacacatgtcggatgtacaaccgcccgcttnttcccgatcagggtagaatccgctggcctctcctgaaccaagcggcgctctgcatccttccttgactgcgtcccaataacttattcacgctgccgtgtcactttaccccatcttcgccgataacacaacttnaaagtggcaggactcctttaggggcccttctcctggctacgtacactccacanccgcagtcgactacggggcgccttttatctatctaccttactgcacatcgtccccgcg

SEQ ID NO: 417161 - DNA, 338 bp, Homo Sapiens
  misc_feature (98)..(107): n is a, c, g, or t
gggatctttttaatgaaagttaatagctaaataacacatgccctcaggcaaagaataattagccagttcttgaattatttctgctgtagttcaaagcnnnnnnnnnnggattactgcttttaataaatacactattttgcaaattataacaatcttgtgaaagtccaaacaccagtgactaccactggcctctaattgatgaattatatttcattagctaagcaaatagttcttttgttaagggttaatgggataatttatgaggtcctaagaagtctgttgttgcctaaattaatagaatctctggattgagaagtaactttcagtagaatatagct

SEQ ID NO: 417162 - DNA, 310 bp, Homo Sapiens
  misc_feature (127)..(128): n is a, c, g, or t
ggataatagtccccctttttttggtttatctcttctggttagataatcttcttaaaatactgggaacccatgaaatgtaatagctaattttgtgcaacgaccaataatatcctgtaaattagcctcnnaattgcctgaaccatttcctttggtgaattctaaagcttcattagtacttgtgatttagtcaaataggcctggttggagctgttgggaccctgtctgtaacttttggaataagttttctttatccttctgccttcccatcctcagagcagcctttgttccctggcacaatgggagcccagca

SEQ ID NO: 417163 - DNA, 727 bp, Homo Sapiens
  misc_feature (559)..(636): n is a, c, g, or t
gggattcggacagagctgaggcaactaccaggcatagaagaaggtataattgaataaagttcagtcttaagtccctcttattagaatggctcaagaaatgcacttaccaaactagaagacttgaaatggaaatgattagacaagagagaaacaggagaaccagaatccatggataagagagaagaagcaggaaaaccagaatccattgattaagagagaagaagcagaagaaccagaatccatggatgccactgtaggatggtcaaggctctggcttgattgaaattgacaacttcctttaatttgttggtagctttgctgtctctccagcaggtttcattccacgcccagacactgttaacctacctggtcttaaagatttataccgagtctggctccctaccctagtaggagatttttgtcctccttcttctagaacccttctcttttggattctgtacagaataaaatgtcttttacaagggatgtgcccttataaggtgttggaccacttcttagcaccctgatttggatttatcttcattagtatctatctttnnnnnnnnnnnnnnnnnnnnnnnnnnnnnnnnnnnnnnnnnnnnnnnnnnnnnnnnnnnnnnnnnnnnnnnnnnnnnnagcatatgggaaaaagtatgttaattggttattagtagtaataatgaaaacgggagataaatcaagatgtccaaatgggagaatgctttct

SEQ ID NO: 417164 - DNA, 255 bp, Homo Sapiens
  misc_feature (130)..(173): n is a, c, g, or t
cccctgactgaatgttctggattctcaccctccgtggaaagccccacatagggctggtttcctctttccccacccggggaaaattttttgtggatgaaaattagaaccaaagaattcccgggtccctccnnnnnnnnnnnnnnnnnnnnnnnnnnnnnnnnnnnnnnnnnnnnaacccggaaattaccccctattttccctcaccatttaggagcctggcggtatattattatccacaaaccctttttttggggg

SEQ ID NO: 417165 - DNA, 774 bp, Homo Sapiens
ggcttaagatctgttttaatgttaatgctgctcaattgttcctgagttccaaagggaggaatgtgtaatgagacatgtctgaccccctcttcccatcatggcctgaattactttagaatgcccttagttgagaggaggggtccattcagacggttttggagcttagaattttgtttttagtttgcattcctgagtgctggtagacccttcagtgttcattagaactttattgttcagacccaagaagagcaaactttttgatgaagtgttacaagagaaaagataaacagccttctgaagaagcaagttattttgttgtagcaatgtctactaaagaaaccaactggcttcttcctgttcgcccacctttcctttgtttattgatatttccaccagaggaaggaccaggcaaaagggagaataaattcactttttaagataatgcttctgagttttagcacagcatcccatttcccgggaagctttattgccaaagcaataaagagaccatgtgagtaggagtttaatgcacagccatttgtgaagtgagactgcttgggttcagatcttgattctgccctttattctatgttgtggaatatattacattgtgctgtgccctcttttaccttatttgtaaatagaacaggcaccaaactcaagcagttgtttccagaaactgccttgctatgctggtttaataaagtatgtggccaaaaccaaggggggtaataaaatgttaataaaactggtttgggaatccccttttaccaa

SEQ ID NO: 417166 - DNA, 100 bp, Homo Sapiens
gacacatctagtatggaagacacatcacaacaaaaacaaagtacagaatctagttatgagaagtacagcttaatgggggaaaaatgtggtgaggtggtga

SEQ ID NO: 417167 - DNA, 626 bp, Homo Sapiens
gggaggtgagcaagaatatggataaatcaggattcttatttgatggttttcctcgtacaatcgctcaagctgaagcactagaaaaactattgaatgagaaaggaatcacttttgcaggaactgtaggtttagaggctgatgatgatgtattagtagcacgtatcctagagagaggtaagactagtggtagagctgatgatcaagatgaggctaagattcgtacacgttatacagagtataatgagaagacagctcctcttatcgcgttctacgaagcaaaaaataaattctacgctgtagatggaataggttctatcgaagaaattacaggacgtttaagcaaagttatagatactttaatataaggtactttataacattcgctaaaaaatattacatttgccgcccaattcctattgtatggtgcaataaggacgaacaacatattaaaaaatttaattgataaccttgtcggccgcctcggcccctcgaaaaactttctagaaccatttgttttggcgccgcgggccccagttaggtaaaggggaaccatggcccataagcttgtttccctagggaaatcccgggctcattggaataagggccttgggatttctccccccaat

SEQ ID NO: 417168 - DNA, 455 bp, Homo Sapiens
  misc_feature (291)..(299): n is a, c, g, or t
ggatcttctttctaaatgaaaacaaaagtgctccctcccttcctggaaacctcagtaacactatgggaaaagtagaacatgacattgcagcctattgatttcttcttccagataggtttaaagtactccttaagttctgactaaatagaactaagccttattaaaaataactgcctcttgttcatgttatctgtaccttcagggacctgcctttcttcaagtatttcctagagtatctattatgatactgaagaagctaattaatttgtgttgtaaatgggtataaactgnnnnnnnnnctactgggtttctctagccagggaaaaatgcttttctggagttaacatatccctgctgccgaaccccctcaatccaaattgtaaacccttgggatccaagaaaacaaagttaaacttttggggaccccaagcttaaactggggggaattttttccc

SEQ ID NO: 417169 - DNA, 738 bp, Homo Sapiens
ggggtcaacctgaattgaaactccctccccatcccctgttcctattctgagcctggaacgagggtggggactcaagtgaaagcagcaaagcaaacgcagccagatttctccctccctctccccactctacccctaaaaaacagcccccactgaggtagtagtggtgtgagtgatgcttacagagacataagctcaatgacagatgtacagcatggagtgagaagcacagtaagtccctgactaggctgcttcctaatcagggaactgagggtggggtggtatagagttggggtaggagagctactgaagcagcctcttcctacttttggggccagctggtcttaggacaaaatggatatgggctatggtgacaggtactgggctactcatcatgaggagttcaacagaggacttgcttggactggccactaagaaacactttaaataatgcaagaagatacttaggcaaatgtaaatcctaaaatgatcagtattctggaataatttctttttaaaagttctaccatttggagtcagaatctctcatgtagataaaaaagtcaaaatcgtcagaggtaaaaagtcctaactaaatgctcaaatttagcccatgcttagggagtcacctaatttctttatctaggtcaactccattacaaaaaatttattttttggccaaggtgccggtggggctcacgcccctgttaaatccctaaccaccttttgggggaaagccta

SEQ ID NO: 417170 - DNA, 457 bp, Homo Sapiens
  misc_feature (44)..(283): n is a, c, g, or t
  misc_feature (313)..(323): n is a, c, g, or t
  misc_feature (346)..(355): n is a, c, g, or t
gggaagcagtggtatcaacgcagtgtggctattacggccggggnnnnnnnnnnnnnnnnnnnnnnnnnnnnnnnnnnnnnnnnnnnnnnnnnnnnnnnnnnnnnnnnnnnnnnnnnnnnnnnnnnnnnnnnnnnnnnnnnnnnnnnnnnnnnnnnnnnnnnnnnnnnnnnnnnnnnnnnnnnnnnnnnnnnnnnnnnnnnnnnnnnnnnnnnnnnnnnnnnnnnnnnnnnnnnnnnnnnnnnnnnnnnnnnnnnnnnnnnnnnnnnnnnnnnnnnnnnnnnnntccaaagggagtggctgaggtcttccccgnnnnnnnnnnncccggggcaaaccaagcgtcgtnnnnnnnnnncacacgggcttgcaaggcatctcatggcggttgaaatccggggaaccattcggccgaaatgaaaaaaatcacccccggcgggaggaaccgaaaacggggggg

SEQ ID NO: 417171 - DNA, 551 bp, Homo Sapiens
ggcaagggccagaatagtgtacatagtatcttaccatttgtgtaaaatagaatgcacacacgtgcttgtatatgtaccaaaaaactctagaaggacacatgtgatgaataacgtttggttgtttatggcaaggtaacagggtgcctggggaacagagatggaagggaattttttcagtgtgcagcatatccatttgtactttgtctaaactccagattttacttaaatttcacccatttttccactaatatcctttttctattgcaggactcactccagaataccacaatgcatttaggctttttgaattttgaaccatgaagattattacctattgaaacaagcaaaccttttagttcttggtttaccatactacagactgtgctctctgcctggccctggctgtctttcctgtggcatccatagatgtgtatgataagtaactcctgcccagctattccctgtgtatctctgctatatccacagggtagagtccagatttctttattgtctctcatttttgtaggcctcttatcaccatgtcgtttttt

SEQ ID NO: 417172 - DNA, 668 bp, Homo Sapiens
  misc_feature (516)..(516): n is a, c, g, or t
gggtaagagtgttgttaagagccagagtgagtatcatgtaagacacagaccctttcttcctaaaggctttgtggcatcagacacataaagggtatatgtagtgtggagcactaaccatggcagggtaatttattccaggcacagagtcataattctggaaacatctagactcactgcattaacagagcattttgtttctaaagtagacctcttatgtcatccagatttcactcattctgaccacagccaggaagctgagggtgaagccagaattagctgaaacccaccaagagctgcatagagcacgtttagctagagtaggagtttgcagtgctcatatgggaaatgctgctgctatacttttaggaatttctgagtgcaatttagaaacatctagcacacttgaaacactgcgtatcattttcctcactcatgaatatagtcatcagaattcataaatagtttacctgagccctttaacaaccctcaaataggccaatatttctcttctctggntgatgggcatggaacccctacagggaaaaacccccacctttaccggcttcctgaaccagccttcacttacaaaaagggagttgcttgaaaccccaatcccccatggtatggccaggaataaaaagccaaaagggggggtccctgggccttgg

SEQ ID NO: 417173 - DNA, 801 bp, Homo Sapiens
ggaagtgtacaaatttaaagctgtactgtgttagaataaaaaagtaggctcaaggaaaatttctatttttctatatgaaaaagagaatgatattcaaaatagtatttttaagtagtttctaattgtgttcctttaaagagtattagaaatgtctgttatgtcagtaacattagaaaacttcaaaaactgatttatttttctgagttctctggaaaccaaacaattttgaattagttgtgtaagtaaagtaagttaagttatagcttgctggaattttattgtggaaaacaaatatagattttatctgaaaaattttaagggccaattctacagaaagttatgctaacatgctaactttccacacatggctgcattccattttgattaatgagggttcaggaaatagaaaggcagtctctgcaaaagcagtatccaaaggctaaattaacaacccaggactaccactcattattgtgagaaatatgggccagagttacaatatcacatcttccagtctcagattggcctcaataacccaccctccgtttccttaaatggagaataaccctgaagaagcccatcccttgtcccagggggagaattgcccagaagatatgtaaccccttctaggaagggaaaaacatggtctcccggggacgggtaaatgaaaattcaaggctttttcatttaactgggttttctgccccccaagaatcccctttaaggaaaatgaaggaattatcccggaattgggcccaaggttaaaccctgggaaaagaaaaccctcaccttttttaaggg

SEQ ID NO: 417174 - DNA, 735 bp, Homo Sapiens
  misc_feature (23)..(23): n is a, c, g, or t
  misc_feature (52)..(66): n is a, c, g, or t
acgtaattaggctaggtacgagngctgggtggtgaatcggcacgaggtttannnnnnnnnnnnnnnggagaaaggagagttaaatgttgtgggaaggcagcaggatgctaagggtgcgggccccagcagggtgagacaccttgtgccctggtcttggcccagcaaacgcaaaaccagggagtgtgcagagcccggcaaacaggttttgttagcccagggcggcctcagaattgcgggtaattcatactttgtctcagtgagtggctgagtggttgcccatcgtgagtgtgcacaaagccgagggtctcggcactcataggaagtgtggccccgaggtgttggcccagcccgagtgtgccgcccgttcaccagcctctcgtgttccaccgtgtgtgcggtctctttctctcccggaaagtgtggggttgtgggattgttgtggccctcggcggaaaatcgaggcccccagcacccacaaccccggggccgtgggagctgatcggttcatttccaccagtttgcacaatgtgcgccttagagtgcccccgagttcaccttgcctcgtgcgggtgtgtcccggtggttgtgggtgcccacccagaccaccaaaatcttgggccggatgtgtgttccagtcccccattctccagccgccacagtacttgctggtgtgccggcaccaccatgtgccaaagttaacgtgcctgcggaggtgataagagctcgggccagatt

SEQ ID NO: 417175 - DNA, 1051 bp, Homo Sapiens
  misc_feature (161)..(218): n is a, c, g, or t
cccaaccccacacacacactcaccctacgcctcatgactccgcccctgtaaatcgaaacacgaatggcctactgcagcgtatgcctcgcctcaacggcacgagagcactgcggctgccggtgttgctgcagccttcagctctccaccctggactacgccannnnnnnnnnnnnnnnnnnnnnnnnnnnnnnnnnnnnnnnnnnnnnnnnnnnnnnnnngcccttgctgtgatgactcaccctcttcatgctgtctgctgcccccatgctcatgctcttacttgctgtgtgcctgctcctgactgtgctgtgtccatccctgtcatgtggactatgctggctgcaaatcatctccttctgccaaaatgcatgtgctgcctgccacctgggtgctgcatctgttgtgctgtgtcatttgtgctgcatgttgtgcttgtgactgtccattgttcttgacttgatgctgtgacttaacccaccatattatctacaacttgcccctgtgaaaagttgcaatggtgccatgtgtgagaccagaaccgttgtgtttcttgggacgtgttgtgcccatgccattttgctggttgacgatgcaccaacgctacatgtgacctactttgcctattgtgacttgtgtaccatgacatggtgctttgcgcttacccatgtgcccatgaaacatgtaccttgtgacttcttggttgcacccaattcaaaaatctccttgttctggtccccttgaagaactcttgcgcgcagaatcaatgaactgttcatttggacgaaacctattttcatgagcacgagtgtccccattccaaaaaccgaaaacaattttttgctccccatttcaatgccttgagtgcttcccagaactttcattgcaaattgaagttgttgacgccagtgtacattccttggctggacctggctattacgcggctgtccgatcttgctagctccccttatttcggctgctctgccaccgctttgggccttccgcggttgctgcctggaggttgcgcaagctgttcctgttccatgggggctac

SEQ ID NO: 417176 - DNA, 634 bp, Homo Sapiens
ccccggggcttctatgtgggggggcgggacgaaaggagggtacgcggaatgtgggcccttgggctcaataggctggttctcctggccccagcttttcttggtccaaggtgggtagcatcttggccgggctccccctattagggggaggctcgtagtccatttccgataaggccagggttacccttggctttattgatttccgggcaagcggcccggcggacattacagcccgagccccagatagagccgagggcagcacatcataggggaacccaaacgggactatcacgtggaaagactccacgatgctgaacgtcgaccagaaaaatcgcgacttggcactgtggagcaaaccgaaaaagacaacgcccacgcggcgaacaccacggacggaggggcaagaggaaggagccgggggctcacaagaagcagccccaaccaaccgtctaacgccgcgaaagggacaagcgggtgcgatcagcacagagcggaacaaggccaccccaacgagggcgccatcatagcaggggagggcgaagttgtggcccacaacgtacgagagcactatgtgagcccgctacaatcacgcggaccggcaaaccacgtaccagaggctccgcccagggaacagatg

SEQ ID NO: 417177 - DNA, 1409 bp, Homo Sapiens
  misc_feature (68)..(85): n is a, c, g, or t
  misc_feature (387)..(387): n is a, c, g, or t
  misc_feature (565)..(565): n is a, c, g, or t
  misc_feature (809)..(809): n is a, c, g, or t
  misc_feature (1359)..(1367): n is a, c, g, or t
aaaaaccttacggctaggtacgaggctgtgtgttgaatcggcacgagggagagaactagtctcggagnnnnnnnnnnnnnnnnnnggcttcaaaaagctttattcccattgggcccaaggcttgtaaggataggttaaaaaagctgtgccttattgggcttggagggagaggctttaggcaaaaccccttatttactttgtgcagaggggccctttcagaaagtctcgcgtgggcctcagaaaggcctcttatagctcggtgcttgaaaagtgtgacccttttcgaaagagagaattctctcgcccagagcccagagcctctcgcggggccccaccccgagcctgtgtgtggaagggtgtggtctagcaggtgtgtgtctcccaccncaaatcttctctgtgtgaaaataagagcttctcaacttctcctctcaactcttgagagagaaaggtgtgaggtctctctccagagagaaggtctcacacaagagagactgttggggcgctcaccgtgtggcggcgacaaagataccccccagggggccatgtagaaagatctcacaanagagggcgcccgttggttctcaaagctatatattctctctcccaggggggcccagtgtgggcagggcatttcacatagtgcggcgtctcagggggggtgtttttaacccccccacctctcactctcttctcaggcctgtgggctatttctgtgagaaagtgtctcctgtgggagaagaagaagcgcgggtgtcccggcgcccacacgcggctcttgggatatattggggggcatctccttctcnagggggagagacgcgctctcctggtttatgccccctcttcgggagcggcagtatctctcccctctcggggtggcccaaagagtttttcccgcggagaaaaaagacagtggtgggggtctcacaacgcgccctttttccccaaaagaagggccccaactctcttcaaattgccggcgcgggactgccacaataatattaaagaagaggaccccccagagagaggagagaagaggataaaggtgtgtatcagggagaggggaccccctgagcacagggttacacccaccaatgtttggtgaccccgagaggatcgttgtgtttgacacgcggggagttgagcctcttcacaaacggtgtgccgggggtgggaaacaactaaacgattacccggtggaaaccggaaaaaactttgtgggggggaaggccctcccagatgagggcatcatgggtggtcttatgcgcccacacagacaagaaggggggggcccattaaaaccccccaacacaaaaacaaaaacgccgtgggcgtccccatgtggtgcagggggtnnnnnnnnnaacaaaaacacccgcagagaaaaaatgtgtggtcccccccag

SEQ ID NO: 417178 - DNA, 1481 bp, Homo Sapiens
  misc_feature (57)..(71): n is a, c, g, or t
  misc_feature (95)..(151): n is a, c, g, or t
  misc_feature (390)..(390): n is a, c, g, or t
  misc_feature (821)..(845): n is a, c, g, or t
  misc_feature (948)..(957): n is a, c, g, or t
  misc_feature (975)..(987): n is a, c, g, or t
  misc_feature (1024)..(1055): n is a, c, g, or t
  misc_feature (1158)..(1168): n is a, c, g, or t
  misc_feature (1217)..(1225): n is a, c, g, or t
  misc_feature (1284)..(1293): n is a, c, g, or t
ggctaggtaacgagggccgggtggtgaatcggcacgagggagaactagtctcagtannnnnnnnnnnnnnnaggaaatggagtcgggctcggtcnnnnnnnnnnnnnnnnnnnnnnnnnnnnnnnnnnnnnnnnnnnnnnnnnnnnnnnnngtttcacgccattggccatttctctccgcggccctcgagcctctcccaagtatagcgtggggcatacggggcgcccgccaccagcgcccaggtataattttcgcgtggtatttttttatagtatagagaacgggggtttcaccagtgtgtgggccgagggcgtggtgttctcgaaacctcgctgtgagaccctcagagtgtgtacatcgcgcgcacacacgatgaggtgccctcccaanagaggtggggtggggaatttcacgagtgggtgtgagagtctcagcgtggcgcccggcgggccccgaggggacacaatatttatagtgagagaacacaaagagagaaccagagcggcgagtggcgcgtgaactctctctcgcgagtgtgtatcacgagcgcgtggagagaacagagagcggcgaaagaggggtgtgtgtgggggtgtggtcacaaagcgcgaggctctcgaggggggcgagagcgtggggtgcgcgtggcggggcgagtggccagtgtgtgcgcgagaccgcgagagagagcgccggtgtgggcactctgcggggtgctcatcacccgagagagtgggcctctacaggaggggacaagaggggcccagaaacaccctgtggcgcactgtggcgcagagcgtcacacagacgactcaccaccnnnnnnnnnnnnnnnnnnnnnnnnnacaccccgagtgggggcggggcgagtgaaagagaaggcccctgtgggaaagcggggggctctttgtggcgcactccccccttggggtgtaagctcaccacctnnnnnnnnnncgtcctattaacacccannnnnnnnnnnnncggcgcacctccatatatttgggggcacttgtgggtnnnnnnnnnnnnnnnnnnnnnnnnnnnnnnnnaaacttttattccccaaggaggggcgctgaggtgcgctcgtggtgcccaatatgtggtaccctttgtgggccccttttaagagggggcacgcggagaagtgtnnnnnnnnnnnagagggggcgtggtggtgccccccacatacaggtggtgagcacataacnnnnnnnnnccccatcgtggtgcgcccaaaacaggctccttggggcgcacaaagggggccgtcccccnnnnnnnnnncccccattaggaatcgggccctaagtaagggacacccccccggggagcatattccacctgaggcggttgtggcgccaacaaagtgccccccaagggggggcagcagcccgggagactgaaaagcattccacacgcccataaaaaagaagggggcgcccactccccttgggtgggggccgcaaaaaagg

SEQ ID NO: 417179 - DNA, 796 bp, Homo Sapiens
  misc_feature (544)..(745): n is a, c, g, or t
ccgcgggacgcaaatatgtctaggtcgaggcctgggtggttgaatcggcacgagggtgacagtgagcaggcctcggaggcaaggggtgtagccctcctggtgcctggaatgggctgtctgggcccccatggcgggtgctcctcactcactcaatgcaccaatcatgagcctccactgagaagcttccacagcagccccagggtcagcaccaggcaccaagtgcatgccagccctggtcagtgagccttgattgaaggcctacggctcgcccaccccaaggagttcgatctgatctctgggacaaacgattcctacacagagtggagtaggggtctccacacagcatagccagccacagacatggagcctctgcagagctgggcacagcggagggaggctgagatacagctaaaggaaacagccaaggcgcctgaggagccccaagcttagcggctccattcacagacaaggaatccacgcccccacatctccttaggtggcaggagacaggcacctggccttcctcgggcgttacaacttggannnnnnnnnnnnnnnnnnnnnnnnnnnnnnnnnnnnnnnnnnnnnnnnnnnnnnnnnnnnnnnnnnnnnnnnnnnnnnnnnnnnnnnnnnnnnnnnnnnnnnnnnnnnnnnnnnnnnnnnnnnnnnnnnnnnnnnnnnnnnnnnnnnnnnnnnnnnnnnnnnnnnnnnnnnnnnnnnnnnnnnnnnnnnnnnnnnnnnnnnngaactggttggccccggggcggggtgggggccgggttcgcctaatccgcgg

SEQ ID NO: 417180 - DNA, 859 bp, Homo Sapiens
ccccccttattatcaaggggttggttttcctcataaggcttctgggccttttctcccttagtggtaagctttctctgattggacatcttgggaatagctccttcttcacttttccctctgtgacggggttgtgggttctcatggaggtgctccatttggcgtgatttttagaggtgaggctttctcgtgggggctaccaggatgatttttctttcactcctctctgagagagaagagtgagtgttttagatatgtgctcagctctctgggagctcctccctcgttggggctttttaaatgggaggttccagactcgagagagactctccctcgacgatctcctccactcataactttttatctcgtgggggggctcctttaaacagaggttttcacacaaatattctctccttttgtgtgggcacacgagacgaggaatccactcatatctcccggtgggggttattatcaaccccttgtggccttggggggttatactccctttctcatcgtggatccttttgttcgagaacgacggcattccacagacggggctggacttctctccaccttactaccagaacaaccttagccaaagccatttccccaaataatgtatggcggcgatagaactttgaactggcggcgccaatagaatatatgtcccgcgagggtaagtctgtaaattttttcccaggcctattttggcgtggataaccccctattcctccgtcttaggatacctggaatactctggcggggagccaaagcatgacccgaaacggaggtctctgaacgggtaaacccctctgtcaacggcggttgtgctgtggagtacccgcgctgatgggtgcaaatc

SEQ ID NO: 417181 - DNA, 1444 bp, Homo Sapiens
  misc_feature (65)..(84): n is a, c, g, or t
  misc_feature (388)..(388): n is a, c, g, or t
  misc_feature (723)..(723): n is a, c, g, or t
aaccttacggctaggtacgaggcctgtgtggcgaatcggcacgagggagagaactagtctcgagnnnnnnnnnnnnnnnnnnnnggaaaaagtctatggaggccatggggttggtcttgaacccagtcttggggggtgttcgatcccttcccttttttggtcttagatttttattgttattccgggtttctctcgaatgtgtgtgtgtggtaggggtggggggctctccatttttgctcccctccgaaggtttagtggaggagtcctctctactatttaggcacttttccgctctcgaagccggacgcctctctcagccctctctcgggcgccagcggcccaagcttctccttctcaaagtgtgtctcttactgtggtcccacgaaantctccgtgtgtgcaagcctcagctgttgggaggggtgatctccctctcttacacccccagagtgtgctttgtgggtttctgttccaagagccctattattcataactctttgagtgctctagagcgcgggaagtgccttgtgacaccattgtgtaaaacagccacattcaagaacccaagagggtgtgtggcatctgaaggtctcccccattgtgttcccacacatatttgtggcaccccacaccgccgcgagcaattatgtgccccgagagagacaccggggatatatattgcgcctttcgcgcctataccccaagaagaagaggcaccccaanagagaggaactcttggcgtttttccacgcccttgaaaatgtccacgccctttttatttctttgggccccacccctgtgtggggacagcggggtagattttgtgggggggccccctatttgttgaaaagcaccccccgtgtgcctcccagtttatttagacgcgctttctgtgagagcgttaaaagacgcgttttccccaagtggaaaaggggggcgccggtggggggaacaccccctgaagcgggaggggaaccctctctcctcccaagtgtggaaggatctccactctgtgtggctccccgagagaatacccaacaccccggggggaggcgttggtcttggggcacatttttataccccggggaggttcctcacacccagggggagacacttggttttccccaagacatgtgtcttcttggggcacaaagggggcgccattttatttttcgggggggaccacccatcgtcgggggtggaaactttcccgggggaagtccctgtgttggtttttgccccctttgtccagagggggggttttaacaacacacccaggggatgttggtgcgtctcttctaaccaatggtattatttaaacccctcgggtttgtgttccccccaattctctcgggggggccactcttttatacgcaccgtcggtgtgtgtagaatatgcacaaaagagacgtcatgatgttttccccccccgcggtggtgtgat

SEQ ID NO: 417182 - DNA, 850 bp, Homo Sapiens
tgctaacggctaggtacgaggcctgggtgtttaattcggcacgaggccacaccactagtgagccgtgggccgtgccaaggttggctgttaccagcagcagcagcgatgcagcatgctaagcagcagtatgcatccccagatgctgatgatagtccccaccaccaatgtccacagctctggcagtgaagaaatgtgaggaccaatggaccatgccagtatggcagcagccgtgagctccatgcctcagaggtcccagccatgagccagcctcctgctgccagcttctcctgcgggtaacctgggctagagagcaacagaagaggagagctgccatgagtagcgagccgcgatggactagtggccagcaaagtccggggtggagagcggctacgttctctctggagaagaccgagacaggacttgaagtgcttgaagaacagcgagcttgccccccagaccgttctgcctgtccctaagctcccagtacccatcaagcagagggccgttcctcaaggtagcttggatggactggcgatggcggccgtgctttcgcaccaagggcaggccgccctgattgcgcgtagcgtgctgtcgaggtggggggccatctagcgatctcgtgctgcacgtagcccgcgtagggcgcggcggctgccgcccgcatgggcgtttccctcagagtgctccgggatagctacaagaacggggacaggggccccctgaggagactgtcatcccagtgacgcacattcggggagtttgcgaccccgcgttccttccgaggacctgaccatatgcccacagaccattgggaacagggaatgtccgtccgaacgtgcctccagatgag

SEQ ID NO: 417183 - DNA, 1379 bp, Homo Sapiens
acagtaaggctaggagcgaggcctggggtgatttaattcggcacgagggcatcaccgacggaagtgaactgagaagaactgggccaacagtatgaacgccatcctacggtgagtgtggccacggtcgcttccaggtggacactggtatattgtgcttggtctggcgctgatggctgacggatgtggaggctctgttggtggtggggcttcggtgctgcccagcggctgagaacagacatgtgccgtgtccgacatccaaacaaaggcatgctaggacctcgagtcgtactaccgtgggacatgatggtgggagccattacctctggggaggtctggctgaccgggctgggtcggaggcagtgtctgctcatactcgcgtctcagctcaacgagcgtctgtacgccctatcttactacatacttaatcgtaccaggggttgacgggacactatggacctacttactggccagccatactatgcgtggcggttaggcgatatgtgatggcgtacctaatcccacgaattggatcgtatcataccgtgatatatcatcgcgcagatatctcttagggccacaagagaggaaaaccgatgggcgcgagccagtatactgcgagcctgtgcatctggcaagtgttaatatgggtactggcatatagggcttgcaggccggtatgttaacagcctagatcgttgcctaaactggtagacgcctagtggatccccaattacacagtacgcccccgcaagcttaactatgggattagagcaagatatatacacaaaggcactgcaggctagactaggcacataaagccctagattgtacacctatataaagacctacgggacacgcgggtaacttagcaggttacacataccgttacactatggcgtgcccttatgaacaccatgtcctagggttggattatgtggccaccaactatggtggagaggacttacttaggaactcaacctgtaccaaggaccctctggaagggacaggcaccaccccaccgggcttgagaccatgtgacccacgtaagtgacccggcaaacgtggcgagcaacacacgcacacaattggcaccttgacagacggcccccccatgcggggacgttggacagatatgagcccatgggaacaaaggaccacacagggaggaatcaccaaaatcggacaacatacacccgcaacttaccaacgatgagccgagaaagtgtctcacacacaaaggtgggtcaacaagagtatcaccgatgaggcaacacaccacgatacggctgtggagtatcacccactccacacggatataaagacagcccatgatgccaacattcgacgatgagcaacgcgagacttcactacattcacag

SEQ ID NO: 417184 - DNA, 995 bp, Homo Sapiens
ggctaaggtacgaggcccggggtgtatcggcacgaggcatcagcaccatcaaaagtggggatgtgcccccagccctctattctgcttcgggggtcagtgatagtgggctcgggagaaaccaaataatgtggccagggtgtggtcgttacccacaacaaagtgaaaagcccacttgtgtttcatatagaggaatcaggagttgggtggggctttatgtggtgacataagtgttctgtgtcatgacagtacaactaagtgttcctggagtgtaatccatgctagatagttatgctctgtccactaatagagcctcgtgcgaatggaaagatattttcatatttgtctgcattaaaattcataatacgatggtgtgagatgtgtgtgagactgactgacgagtgtgagacgtattctacgtagaacacagtgtagctccactagacaaattctggtggacagagtcggttttcttggaggtctgaacaggttgagtcattaaggcagtagtctgacaagaacagcatggtaacatagttttaagcaaaactgatgacgtcaggaaccttcgaggaggattaggttccccacttaggattgtaaggagtaaaaaggggtgagatatggcctttaagtgccgtctagcaattcacttgggtttgggacatttgctggtgtaatgctagatgcgcacagcgagataatatcgtaccttggtcaacgcgtagcgtaaaactcgctggttatctcaagcaagcccttgccccaagagggtaggtgggcacctggactgacacatcgcgtgatgccctctgtaccgatctcagaggataccgctctgagagaacagtcaagtgcacgcaatgggcgggacgttccactcggaacacgactgagccggactgggtcacggagcaagagaaaagcagcaaagggtgaccacgacagcacaaagggggggaggaaccacatgctggcaacggaaagagagaaacacg

SEQ ID NO: 417185 - DNA, 957 bp, Homo Sapiens
  misc_feature (28)..(28): n is a, c, g, or t
  misc_feature (459)..(469): n is a, c, g, or t
  misc_feature (483)..(539): n is a, c, g, or t
  misc_feature (584)..(592): n is a, c, g, or t
  misc_feature (673)..(735): n is a, c, g, or t
  misc_feature (775)..(829): n is a, c, g, or t
ctaggctaggtacgaggcctgggtgttnaatcggccgagggtacccgcgggcttccccgggcggctgcgtcccagtagcccggcctggcctcgtgcaccgcgtgtctgtgggggtccctgggccgctggctgcatgtggcctggggctggctggctgaggcctgaggtggctgggaatgccactgccctggcctggcatgtgtgaactgtgcaagtcgatcccctaacccagaaatgccccagtgctgctggtctctatgtgtgctggcccctgctcctgcttctgttttatttttttacggacagtggtgtcgctctacctgccctgggtttgtaatgcaatggtgtgatcacgggctcacctgcagcctcgcacctccctgggctgaacgcgatcttcccgcctcaggcctccatgagctaacctgtggaaccagcagtgcgcgccctgcctgtgcnnnnnnnnnnncttcttactctcannnnnnnnnnnnnnnnnnnnnnnnnnnnnnnnnnnnnnnnnnnnnnnnnnnnnnnnnacctcacaactcccggcgcccacaaccaaacacgcaccgtgccannnnnnnnnacaaaagcaagtcagcaccaacaccaagagccaaatacacacaaacgaaaaacgagtccaaaaactaacaaaagaaagggnnnnnnnnnnnnnnnnnnnnnnnnnnnnnnnnnnnnnnnnnnnnnnnnnnnnnnnnnnnnnnngaccaaacagtagagaagtacaagcggccacacccccatnnnnnnnnnnnnnnnnnnnnnnnnnnnnnnnnnnnnnnnnnnnnnnnnnnnnnnntcaattaaaaacccacccacgaaaacccacagcacacacaacgagcaggcagcggacccccccaagaagtagtaaagaaccaaaaacaaaccgatgaggcaaaaaagtagaacgaccaacaccgccca

SEQ ID NO: 417186 - DNA, 857 bp, Homo Sapiens
  misc_feature (54)..(69): n is a, c, g, or t
  misc_feature (82)..(100): n is a, c, g, or t
  misc_feature (177)..(187): n is a, c, g, or t
gtgcgctcaattaacggctaggtacgagtgctgggtggcgaatcggcacgaggnnnnnnnnnnnnnnnnactagtctcgagnnnnnnnnnnnnnnnnnnnaaaagggcaaaaattgacttttttgaatgggaaaggggatgaggacaacggtgaacccccagtgacccctgtgtggnnnnnnnnnnncagacagagggggggttggtccggaggccctcgtcgtgctcaagtggattcccaggagcagggccattgtgtcgcgcttcccaaattctctctaggcataatattctggataagttatactacccactcagtgtttctcataagagaactgggcagacaccagcaacacgtgctagaaacctcaaactccttcaattactcaaagaaaggacccatttcagtataccctcaaggtgaagtgaaagagttagtgggacactctgcgtggtgggctcctctccccgtggttgcaccacttgggtaccttataactctgacaaaaaactcttggagctgcaacgggccttgccaaagggctcaggagttggtaatcaggacagaatggtggatagcgaacacagaagaggtaactttaacattcccccttaaaggtcaaattttcacccaactcatcttcctggaagtgtccctataacagaatgaggtcgaacatagaccagaggcccagccaactcttataatacaaagctcctccaacgggggtctcaaggacccggctcccttcacaccagatagggggcggcatccccagggtaagggcaccgtgaacttacggggcgcgttgaaggaggcgcccgaccaggtgaggctggctgcagagtgccaagtc

SEQ ID NO: 417187 - DNA, 1127 bp, Homo Sapiens
  misc_feature (69)..(106): n is a, c, g, or t
  misc_feature (134)..(166): n is a, c, g, or t
  misc_feature (447)..(447): n is a, c, g, or t
taaaaaaaatacggctaggtgcgaggtctgggtgtgaatcggcacgagggagagagaactagtctgagnnnnnnnnnnnnnnnnnnnnnnnnnnnnnnnnnnnnnngggggggaaaacccctttttttgggttnnnnnnnnnnnnnnnnnnnnnnnnnnnnnnnnntctttccccacaaaaaaaaggtgcgcccccgcgcggggttgtcgtccctgctatcccaagagagaggagggggttttcatcaagcagccgcgggcgacacacgagtgggtccccatcagacagggtgggcgccccgcgggcacgaccgcgcagcaccgcggtgctggtgataacgaagaggtaaccgcccgcgcgcgcgaggaaagtaacacggaagaacacgaaggaggggcgcactgtgagaagagaggtcacacgacagacagagccgcacactgagngcggctcctctgagacgaacaaagtgagagggtggtggattgtgagtgcagcgaggagtggcgacacagacagtcataggcccgcacatacgtgcgccagccaatgagaaaacaggcgtcaccatgatccggtgaacagccactcaccgcaagcatcacgtgcgccgcactatcttatcagcaccgacggcacgcaacaccaaagccggtgccaccgccaagccgcgcggggagcacgggagagagagagagggcggaaagtgagtgagacacacacacaagaaaatcacgcccgcctgaaagacagcacctacttggaagtgaccccagaacagcagaagagggatgagtagatgagaacgagggtcccccgcgtggtaagatacaacatgggtgagacctcaccaagaccccaaacactgggagaaaataaaggcgcccgatgttgctacacacatagtagccagacagatgaaagaatcacgaccaaacaaacaaatagaagaggggggtgtcccccagacagataaaaaacgacagcggtgtgggcgcacccaccacaaccgagcacaggagtcaaacaaagcacaacgagaggactcctcgcgaagaagaagaagtcgtgccacttcacaaccgggggtgtaatcgctctcccggagtaaaccacccaggtacat

SEQ ID NO: 417188 - DNA, 494 bp, Homo Sapiens
  misc_feature (42)..(55): n is a, c, g, or t
gttaggctatgtattggccttgtggttaatccggcacgaggnnnnnnnnnnnnnnaaaggggccacggtcgcccccccgttccccgcacgcgctctccagcctgctggcgcccgcctgccgctggtcaccccggccttcctgcctactgtcccccagtgatctggatcaaaggccgctgagctgatggccctgcctgctggggctggcatgcggtggtgacaggagcgctgacgacgagcgcaacggtgcccgctttcagcccaccccttcatctgccataccactgtcgctgcgtcagcacgaggattcccacattcatggacctgattggcttgcatcccggcgggcaggcggaccggagaatgcccacaggaggccagccgggaacacaaaaacggtcggccacgatcccaccaatacatgaaaagaacacacgtgaccgcccggggagccttggacaatggaagaggactgagcccggagagatcggagg

SEQ ID NO: 417189 - DNA, 850 bp, Homo Sapiens
gcatagtagagggctgtgatatacggcgatggctagcctcactataagactcttagtaagattacacatacaagcatacccgttccagtaaagtacaccctactaaatacaccacgatacaaagattggacgagcatacaatgcacgcagcaatagcagctacaaaactgctatagcctagccacacccccacgggaaacagcagtgataaacctataagcaataaacgaaagtattaactaaatgctatactaaaccccagggtaaaggtacaatatatacgtagccagccaccgcggtacacacgatataacccaagtacaatagaagcctggcgtaaaagagtagtatttatgatcaccccctaccccaataaaagctaaaaactacacctaaaagtattgtaaaaaactacccagtttagaccacaaaataagactaactcaaagtttggctatataacataatactataacacacaataagctaaacaaccccaaactagagcattaacgataccaccactaatagctattaaggccctaaaagcctaccaagcgagtcaaacgatacacagcaaagagctaagctacgcccaagaaaacgactaactagagccagcaggcctataaacgagaattaccagaagggagaccccttaagtcgggtaagccttcactcaatatccccctcttaaggaaaggaagccctagtatcttagtaaccttacgaataaaagacccccagaaatccaaaacttcaggctaactatcataagacgccaggcctataataaccgggccgacttaccagcaaaacccttatattaagtgctaccgaagttatagcc

SEQ ID NO: 417190 - DNA, 852 bp, Homo Sapiens
aatacggcacgatagctaggcagtctttgcccaggtgcctggcctggctgtgaattgggcccatgatcatgtgtggactatcaattgacttctaccctggccatagcagatctactattgcagagtccctgcagtgcaattgtggacttgtgatgtgccaatttgacccccaatgtgggtggctacttcgtggacaatgttctgttggccaccagtgtaccacataccttgcatgtttttgcctacgtaataatgtttgaagttgattgttgctgccatgtgcttgcccttgcatgctgcctgccatgcctacattgctacttctgacccccaatggacatgctgtcattgcagcatgaaccttgtgttgtattacctgtgttccacctgtggtgctctgcttgtgtgtgccttggaaggatgtgacgtgacattccatgcaccctgtggatgttgatgtgaccatagctactaaccagcacaccatgaacctgcctgatgcttgctgtgagatgcttgctttgtgatgtttcacccccacaatttgtagccttgtcatggtccatgaataggattgaagcactttgtgatcgcgtttgcggatgtgaccgagcattgaaaatccctggcccctttgtgatggcccttgaaggtgaatttgcccctaattacttgaaacgctctgacggttttttgatgtgtgtgtcgatgtgtgttgaacgtatctagaatttgatgctgtggcatttgttactttgccttgaacattgggttgtgccctgttgatgcccctgtgacttgccaaaatggtgtttgacccggattgggcctggaattgcttgacgaccctag

SEQ ID NO: 417191 - DNA, 745 bp, Homo Sapiens
  misc_feature (589)..(589): n is a, c, g, or t
ggctcccccaaactaatggctaggtacgaggctgggtgttaaataaggcacgagggggaggagagaagataggtatagcggagtaagccgcctacctggaagtacccgtatataacttgctaggaagacatgtatataactagtatacgacgagagcggcagcggcgaggtaggacctgcgagagtagtgtggtatgccctagtactagtacgtactagccggccggcccggaccctaggacaccataccagctaggcttaacaagatagtaacggagcgcaagaggacggcagcgtacggcgaaggtgacctagtacctgcatacctacaagacggccctagggggtaggcagagctacaccgtagaccgacctaatataccgagccatatagaccaagaggagaaggggaagatacacatatacgctagactataccacaggtttagcagaaatagtaaccctagccttacgcagaggaataacctagtaacccggatacagacacatttacgaaagctagtagcagagacctacacctagcgccaatacccaaacggcttactagtagccgatatatacagcccgngaaaactacagacgctagggcggaagcctagtaacgcaagaagctaggataaaggacccagggtaagcggagagacgcggcccctacccgcgtaggacataaccggccatagagcctactatagcgagtagacctactagggcttacgtacctaca

SEQ ID NO: 417192 - DNA, 451 bp, Homo Sapiens
  misc_feature (81)..(128): n is a, c, g, or t
  misc_feature (255)..(382): n is a, c, g, or t
aattggctaggtacgaggctggtgtgaattcggcacgaggcctatttcaagtagttaatactgaatagagtttcagcatgnnnnnnnnnnnnnnnnnnnnnnnnnnnnnnnnnnnnnnnnnnnnnnnnattgctcctgggagtttaattttgatgtgtaatatattgaatggttactctttcctttttagttgaatcggcttaaaaagtattttattctaggtgctggggatatggcaataaataaaatcgagtnnnnnnnnnnnnnnnnnnnnnnnnnnnnnnnnnnnnnnnnnnnnnnnnnnnnnnnnnnnnnnnnnnnnnnnnnnnnnnnnnnnnnnnnnnnnnnnnnnnnnnnnnnnnnnnnnnnnnnnnnnnnnnnntgaaaaacccccaaaaaactgagtccttgactttgaaaagcctgctttctaaagtgaaattttgttcat

SEQ ID NO: 417193 - DNA, 721 bp, Homo Sapiens
cccttacggctaggtacgaggctgggtgtgcaatcggcacgaggaaggtgtagaggaggacctggtagagagccagcgcttagccccagcctcctcatatgcacatggctctgtagaggttctccagacagtgctgctgctgctgctgtttcgagccttatctcctctgtgctcctcacaagtgtcgttaacagcgggcagctcctggcagcacaagggacagggatttgtcttgcttagccggggcaaaatgcagttagaatggaaaagctaatggcaaggcatcccaacaacagcctcctcctcctcaagcacatggggcacttgtgtgtgtctctcagcctgagagctcctgatgactctcctggggaggttcccaaccacactgtcttggcagctggtggaggcaggtggtgattccaatttactgccatccccgagtcttcaaaatccatcctattgaaaagtgatctggtgagctccagcagcatgtgggttagggtctcctgcttggggttcaagagcttgcagtcctgttcattgaaataggctgtcatggctgctcagctctctgacatatctctcagactggcaaagatattaggtctgataccaaaagtacaatccatagaagaaaaaggatggatacattggacttcattaaaattaagaatgttttctccttgaaaactatgttagagatagagatagcacaactcga

SEQ ID NO: 417194 - DNA, 844 bp, Homo Sapiens
ccaacgaccggcctgcgctgttactcggccgaggggcactactagtatagagtagaaatagccctagggaaatctaccttgatactcttatttccaacgggaaactatactaaagaaaaagctgatataggatgctttcaaacttcacctaaacttgctattcctcataatcttaaccagtcatacggaaatgacataaagagaatgcaaaacaattggaaaatggttaatttcatccacatcaaatatgtatattagggcttaccatgctgcctaggcacctgtctcttagcaaacagcatcgtgaaggactgtaactgtattcacttatcttttattcctggctactaaccataatgtatagaggttgagctctaacttattctaaacacaatgtgtaaacttaacgtgtttaactttatataggttatacaaggtacattctcacatcatcctgatacattactcaacttctgctgcacggctgaggccacactcgtctcaccacagcgcctgattccctacctaacgcgaggccacgcatgcctaggcacattgaaactgccccgcccccactcccacacggctccaatggctccttctaccactcctaacctgtcgggcatatcaaacgcacataaacacaacgcacacgcagcatcgccacctggcactacgggacccagcaataataagcgtcacgcagaaaatacgaattcgacgagctctaacccgccgaagaccacatacccttccataactccgcccgaatttccgacccgcagctaacaccgctcaaccgccaaaccgatagcttttggcgtgctgcccaccctaacctgct

SEQ ID NO: 417195 - DNA, 845 bp, Homo Sapiens
gcagtgtcaacaagaggttgtaaagacggcagtactataacggtctaaggtagcgaggcgggtgggaatcggacgaggcaggcaccagcattctcaaccccttcaggctctaagtgcagtaaattcctgggaagtgtgactgaaaatctcttcagtcatccccactcagagggcagaggctttacccaggcatgggaggccaagcatacggagccccaatttccatcaacccacatgcccatagggtggggtgtccatgcagtgagaggctgctgccccccacacagaacccggctaatgcaacagaattccctctgatagactcaggcactgttcctgcctctaggtctatagtaggggctcagacattcagcccaaaagagagagaggcgtaagaacagagagctccaaagcccctcccaaaggaactgacttgatttgaaacagtatggggatgttcaagcctaaaagtgccctggaaaagaatggacatttgatggtaagcagttaagaggaggcagcagttccattagagcaagaaataaactgtaggtcagcaggtttacagagagggaggaaagcacaggaagaaccatctgggaaacgacttcaaggatcggaagctctcagtaaaagaaggccctaaatttaatggggtcagacaggggagcagtgtgtgcccaggcatgtgaaaggaatgcagcaaggcgcgggccagaagtgatcggacactggacaacaccaacagggtacagacaatccaggagggccaaagcaaaatcacagcacccacagggaggacccaccggcgaccccagggacacaccggggcggccagaaacggc

SEQ ID NO: 417196 - DNA, 1605 bp, Homo Sapiens
  misc_feature (193)..(244): n is a, c, g, or t
  misc_feature (1510)..(1552): n is a, c, g, or t
ggtaggtcaagttgtacaacccagcagttttattaaaactgactggcagtaactataactgtgttctaatgtgtagctgaggcctggtgtggctgaattctgtgcactgattgtgcatgctgctgtgtgcctggtgcctggtgactgtgggacttgtctgtgctgcagtgctgtgccatgcccaccaacttcnnnnnnnnnnnnnnnnnnnnnnnnnnnnnnnnnnnnnnnnnnnnnnnnnnnntgactgatgacttgcctgatgctgtgactgtgattgtgctcctgtgtgcaccccctgtatgtgtgcccctgatgccctgatgctgccccatgccctggtgagattggaaatctcaatgatgacaagacagcccaattctctctaacgaattgtctgaagtgttgtgagacaatgaggatgcttcattttgacaggtggaacgacacattgtgccagcttttctgagggcagtgagattgtgaccatgtagacccacaagttgcgttgatccatctggctttgaatcagaccaatgcttgggccagagataagcagacacagacctttgtattgcacatgtgggctagttgtgttggatggcacatgatgaggatgcgaactgacgtgagtgatgcccagggtctgtgctcgtgggaatggtggccctaaaagaggggtacacgtgtgagagccaatatgtgggtcaagacagtatcaagtaccagaggaaggatctttatcacttttgcacaggtgtggaggcattagcaatgaagatataatttcacatttggttgactggattagaataacaaattcattatacccattagacagagcgacagtttgtaaacagtttagtgagaagttccatgggattgtgatgatagatgattaagaagacgatatagggaagattaggtaagcattggggaaaagaataagaagatatcacgatatacaaattcaaagaataaggagcaaccgagtatgggatgtgaacatatggaaaagaaaagatatggtaagacaataagataagaggatagaaaagagagagacagaaatgatattaccacctaagatagaagtagattatggcaatgacattcactcgaaaaataaaaaacataacgaatagataggaaatggattagggagatcaaccacaaaatagagagatagagggagagtagaagattcagaagttagaaggtatcagaaaaagattaggacattatatttagagtaatcgacgataacaagacaaatagtagagggaaagacaaccagagaaagtagataaataggaagaagagggaaacagcataggaaaaagggaagaaaaaagatagaaaagtttagagtagacaattaggtgtgagacacatagaaaatgagtataatagataagtaagatataaagcaaaattaaaaggctaaaatactctatatggaggagtagagacaatacagatctagagaagtaagttagtaaatgagatnnnnnnnnnnnnnnnnnnnnnnnnnnnnnnnnnnnnnnnnnnngatatgtggcgagatgaagaaccaattcgagtgagaacgattggagatatgtt

SEQ ID NO: 417197 - DNA, 1016 bp, Homo Sapiens
tcaattgtagttgtcaccccagtttttaagaggcagtaactatacggtctaaggtagcgaggcctgggtgggaattcggcacgaggcagatttacaagccgccagcgtcaccggcctctactggaagctgcttcccggagcaggctgctgcccccgtggcgcaggtgacccctggggcggggtggctgtgggctggcgctggtggggcgacgcgtaactggtgctgctggctgaaagctgaccggagcacaagctgaagcctgctggtcatcgcggctggtgcctggacccgccagcctgcgccaccacaacaggacaatgttcccggtgcctcctacctgtacagccccgacgcctggtcagcctgcccgctgctgctggggctggttctttgaggaatttcgtcccagggtcaaactgctactgcgccggaagttggcttggagcacgaaagggcgttgcttggtggtgggcacaccgtgcttgccaaggcgcaggttgccatggtatgcccgctttggatatgcgacggatgccccccgtgcggtgcaggcgggacgccctctggtccccctgtgaggctcttgctgacaccgtattggtgctgtgcgggttgtgtccttgtccacggggcagcacgcggggcccttatcccgcagcagtggagcagtcctgttgttgcctgccattcaaacacgcttgtacaagcggcaagctggtgagaactgcagttggtgtccttgcagcagtggattcccgcgggttggacttccagtgcggccagtttactgcctcaagtgtactttctcctatatcttggctggccttcccgtggaaccgaggtcgcacgcggggacgcactagtcacgtctagcatgatggccctgggttgcttcgtcccgcgccgttgagacagtgtggcacccgcaggcctaggaaccgcgagcaaaaggtctacgacctcacaccgtgggctgcaacactctgaccaaagtgccatgctcctaaatcggccc

SEQ ID NO: 417198 - DNA, 533 bp, Homo Sapiens
taacctatacggttctaaggtagcgaggcctgggtggctggaattcggcacgaggctgtgttggatgcctgagcaaagcgctagccaggcgcaagcgcgcacatgactgtatgccatccgaaggacacccctggcccgccggccaccgcggaggactcccctggcggaatcgcctccggatcgccctgcagtcggggggacgttgttgaggtcgcgcaaggccgatccgggtcccggtaaggaatgcacacaccacggctcttaaggcgaacgggctgtgcaaagaaagacccgtcatgtatctaccgctcccggacaggagaggacgtcatgaacagacacggagagattgcataccacgatgacaaagcagttgatcacgggcgtaactgtattccgactgagaaaacacccaagaccaccacctacactgttgaacatcccgcactacaagtacccaagcataaacaaaagctccgtcgtaggatggacttccaaccgcacataacgaaaggagaacaagagcaagacgg

SEQ ID NO: 417199 - DNA, 514 bp, Homo Sapiens
  misc_feature (267)..(267): n is a, c, g, or t
gcagtactactacggttttaaggtagcgaggcctgggtgtgcgaattcgtgcacgagggttatctgtctggacgcgctgggtggattgcgttgtgtggggctcctggtgaactgtgttggagccgagacaagcgctatgccatggctgcaatgcgcgcacagactgtagccatccgaggacaccccgggaccaccggtagcgactcgatggagaaaaccggcaaaatcctccgaatccccatggatatctggtagaggaaggttganatgcgaaagcggtctgggagcaccgagcacacagctagacacataacagatggaccaaactaaaaggaggaagttgaaatataatatcaagacagagattaattttaataaacgcacaccggctatgcaacatagatgatacacctctatagtgcacgcactgagaccagtgtaacatgcctaacgaccctgaaggtggccgcacaatgttaccaggcgatcccagccaagagcctggataaatcaa

SEQ ID NO: 417200 - DNA, 2128 bp, Homo Sapiens
  misc_feature (161)..(297): n is a, c, g, or t
  misc_feature (333)..(333): n is a, c, g, or t
  misc_feature (1833)..(1833): n is a, c, g, or t
aattgaggcagtaacccataactagtgttcataagtgtagctgagtgctggtgtggcgaattctgtgcacgatggtgcctgcctttcctgtgcctgctgcccctgtattcccatgtgactgaatgtggcactcctgcacctggacccctgtgtccctgtgnnnnnnnnnnnnnnnnnnnnnnnnnnnnnnnnnnnnnnnnnnnnnnnnnnnnnnnnnnnnnnnnnnnnnnnnnnnnnnnnnnnnnnnnnnnnnnnnnnnnnnnnnnnnnnnnnnnnnnnnnnnnnnnnnnnnnnnnncgtagtcctgatgtgcgcaagcctgatgtgtgctcncttgctgtgcttgctttgcgctgtactctgttgcgcgtgctcattgtgtgcctgtggtgactttccagttgagccattaagcgagtggggctgtttcagaggatcgcataccagtcgcccaagccattgagtttgtggataagagcatattcatggcagcgccacaagtttatggtgcacttaccgttccagggacccagagtgacgacccgatttagccaatcacagagagttggtcctttgggaaaccccatatggcttgatgatattcccgactccgtctagttagcatttggatcgcccagtgtgtgagtttataagccgccaggttgtgggcgcaagaggaagaagcgagccaatgtttcaagtttcgagcggctgaggggggtcgtaacaggacagctgtacaagcggctatgtggtaccttccgaagcgtggaaccatggtgattcatgttaagagacgcccgccgagggcccattaccgaacgtggttttatacgcggcttaacgttatcaatggcttttggtgggtggttttggaacagcacaaagagagtgtccgccgagaagctctggccctttatttggtatggttatggcaaacattatcccttttggcagattattaccgaagccgcagcaggtgtgggacgttcacgtgtgggaaacaattgcactgcgcgcctggaagccgagatttccatggcgaacagcgtggcaattccacgagaagaagacaagatgcgacatggaaagacgtgcggttccgcggcctatgtaagttttggaacaagccgttggccttttgttagtagcaccccatggctgccagaccaacagatgggccccgcgagtggatatttaaattacaccccctggtttgatgattgggtggattaacagagacgttattattatatccgtatattggggagccgaacgagcaggttccgccagtttgcgcctgtctttcaggcgagagaatgcgccatccgacaataatcactgtggtgggttccagactggcaagacgtggtggaaattcccttggattggagattgtggcccggcaccgcagaggagagttattttacaacgcatgggtgggttacacttcgctgataacattctcacgaggggataacacccgttttggatacgagctcaagcttcagtagaagcagacaaagttccacaaacgagagcacgataatcagccaccattatgaactatggtcgaacacccccgatttttacaatgttgtggtagatcacccgagaccaggtggggtgaagaagatgagagataatcaacggattggagatacgcacgtaatcccctgccttattgacgatgaccattctcagacacggcatttctagatggaagaagagagagccttttgaaatgaattaacagcgccgggtagttattgtgtaccacaaggatgactttgattacagcacgggagaccacccaaagagactcaaagacantaagctttacacgccacataagtccagttgtgtgtcatgtcagagagcgtttcattgtccccgagactcagtatgtcgtagttggcaccagatctgagttacccagtaagtgtaccccagaagtgccccaatagaacacggtgtcagcaggactactgtcgttggtagcccacgatggagcgaccttacagcaaaggttgagtcctctctagtaaggtggtccaacagatactgagcagatgggagagttcctagactgccgtttgaagtggtcgtggagggcggcagcaggcat

SEQ ID NO: 417201 - DNA, 966 bp, Homo Sapiens
cagtactctagcggtactaaggtagcgaggctgggtggtgacattcggcacgaggatatgtgatatacttgttggtgaatgtctgtgaatacatgtgggaagaatcggtgtcttaatagtctccagtgtccacgcgtgattgccgtggtgtgactccagtcggtgtctcaacagtctccagtgtccacgcgttgactagcgtgtgtgactccaggcggcgtctacagcagtctccagtgtccacgcgttgactgccgtgtgtgactccagtcgacgtctcagacagtctacggtgtaccacgcgttgactgccgtgtgtgacgataccagtcgggtctcaagagactccggtgtccacagcgttgactgccgtgtgtgactccagtacggggtctcagaagtctccgatgtccactggcgttgactgccgtgtgtgactccagtcggggtctcagcaatactccggtgtaccacgacgttgactgccgtgtgtgactccagtacgggactcagacaggctccggtgtcccacggcgtagaactgcgcgtgtgactaccagatcgaggggtcatcagcagcctaccagtgtccccgacgttgaggtgccgagtgtgactccaggcggcgtactaccaaactactcagtgtgaccactgcgagttgactgccgctgtgttgataaccagtacgggcgacatacagacagactacagagtgtacaagcccgttcgactcgaccgtggtggctgagtcccaggccgggcgtctcagccagcactccgggtgtccacgcgctagaatggcagcgtgatcaacccgaaagggcgaaaaacaagcagcagcacagaccacccgcatcggactgcgctacgaaatacagcaggcacccaccaaccccagagacacagcagaaatacagagacaacaacagaggacgcacacaaaacgacgacacacacgaagcg

SEQ ID NO: 417202 - DNA, 1522 bp, Homo Sapiens
  misc_feature (65)..(292): n is a, c, g, or t
ttgaacccgcagtgttttaaacgacgtgcagtaactatactggttctaacgtgtagctgatggcnnnnnnnnnnnnnnnnnnnnnnnnnnnnnnnnnnnnnnnnnnnnnnnnnnnnnnnnnnnnnnnnnnnnnnnnnnnnnnnnnnnnnnnnnnnnnnnnnnnnnnnnnnnnnnnnnnnnnnnnnnnnnnnnnnnnnnnnnnnnnnnnnnnnnnnnnnnnnnnnnnnnnnnnnnnnnnnnnnnnnnnnnnnnnnnnnnnnnnnnnnnnnnnnnnnnnnnnnnnnnnnnnnnnctggcatgtggttgacctactgtgtgcaactgtgtcctgtgatgttcttgatgtgacactttgttgatgccttgatgtgatgtcttgcattgcattgtgatgtccctgactgcctgtgatgtccctgatgctcctgcaacgatgtgatggcctgcctcctgtggcccctgctgctctccccctgtgtgatgcttcctgtgtgctccttgtgtgtcctgttgttctgtggaatgccccctgtgcatggcccaagaggtgacgcgacggatgtgatgccctggtgacttgtgtcagagggtgttgaaccctgtgtgtgtgactgtgctgcgcatttgagtgacccctgtgaggcttgggacagcttattcaaaggcttcgagatcatgtggacgatgcgacgtgaacgacagcttgagcaagcgtaagaggacgctacaatgaacgagggtagcagagagcatgatgcaatagtgagtccaggctccgagggacaatgcttgggccgagtgattcatgtccaattgacggagagagataggacgtgcgttgaatgccacagttaacaatcatattgtatgagaaattgttggagagataatgggtagaaaacactagagagaaaagagcttttgagagacatcaactttttagtgagctagatggttcaggatcgaagccggtgtttacacatacgttgtgttgagaaaagttataggtgtggcgatcaccaagaagggggttataggcagtaatataaggagatttactacagaaggagacggatgtcaggtgagtgactattcctttgagtgcattagaatgaggtccttagtatagagggaaaggcaactaaggttgatcacagagaaggaacacacagagcaccaacggcgagttaaggacgaaacaagaaccggaggagtaacaaccggagccacggtaccggaagcacagagacagccataatagaaaatgagttcagggtctctgagatatgtaaggagagtttcacaaagtaagcccaggggtcatcaacagtaaaaaggggctcggtgataaacgacaaaatcttggattgaccaataataaacaattgttattacaagggaggaacgagagaaaataagatatatagaagagtaatcgtatacaacgaacacaccatgagtcataaagtacaacgaaagattacaagatataagaaaaggacagaatatgatgtaataggcg

SEQ ID NO: 417203 - DNA, 972 bp, Homo Sapiens
  misc_feature (618)..(665): n is a, c, g, or t
caatagcatacggttctaaggtagcgaggctgggtggcgaattcggcacgaggcgtgttgcacagactggtcttgaggttggactcttgagctcaggtgatctgctcacctccgccttccaaagtgctggtgagtacaggtgtgggccgctgtgttggctgaaatgtatgtcttttaaaggagtgtccacagttatccagtcactgtgtctgtgatggataggcagatacagaaattctcaagacttccataataatgaatgttgtgtagctaagctttggtcagaggaaataatctaaaggtttagtgaattcatgtaaccttttgggctgctcaccttaaggtaactcctgtattaacaggaggaacagaatagggaagaagatctcagttcagtgatgtcagctttgtgaccagccagtgatccagtgcaatcaggtagaaatgaccttcctgctacatcaatatttgcttctatggaggctagtttccccacttagggcatgagaagaattggtaacagtccacataaaattgccaaactgtcaccaaaaatgatggcaacatctgtatttttctcttaaagcgtgttataccaagctgtaaatacggtatagnnnnnnnnnnnnnnnnnnnnnnnnnnnnnnnnnnnnnnnnnnnnnnnnttccttggagaaccagtgttgggaaccatggcacaaaacctttgttcctagggaacccaatagccacggtaatggttggcatgtacctttagtcttaagtgattgtggcaacgttgatagaaccctgtgaaggagaagtcgcgcagaccaagatagcaacgctgcgatcaagacgagtaaaaagtggaacccctacagaatcaatagaaattatcctcccatcatcacatttcgatcagagtcaacgaattataaccgaaacccaaaaccaaagatacacatcacgtgtagaggctaaagtactgct

SEQ ID NO: 417204 - DNA, 524 bp, Homo Sapiens
tctcatagtatcctgattggttagaaggtctttaggggcatatacactgggttagttcggctggtctagctgcgtcatgccatctacacctctacccgccttggatctataccgtgctgttgagcgcctgactggggctgatggtactctcccctaggctattctagctagacaggctgtagattggcatgaccgcaggtgccactggtgccttgtgggaacaccagccgaattggtcttatccgatgactgcgatggcggttccagtgatcagcgcgggtacaaaaatgtgtataacgccctgattcgaatcacccgggaagagggtgtctcacactgtggggggctgtcccttacatggctcgggcgtcgtcgtccatgtgccagtcgctctatccatccagcgtttactggctcggtactcttgcactttgtgcctttggcgcgtcgcggttgtcccggctcggcgggtgcgacgtccactgggtttgggcggccaccggggcggtcggcggggttccggg

SEQ ID NO: 417205 - DNA, 1616 bp, Homo Sapiens
  misc_feature (76)..(224): n is a, c, g, or t
tgcaagagaccagtaactccctcacacggttcctcataggtcaacggcagtggctgaggtggcgcacatacggcgnnnnnnnnnnnnnnnnnnnnnnnnnnnnnnnnnnnnnnnnnnnnnnnnnnnnnnnnnnnnnnnnnnnnnnnnnnnnnnnnnnnnnnnnnnnnnnnnnnnnnnnnnnnnnnnnnnnnnnnnnnnnnnnnnnnnnnnnnnnnnnnnnnnnnttcatcgtcgatgacgtgcgttcagtagtgcgtgcgcagcatgcgttctgcgagcgtagggggagcggaaccacacagcgcaggcgtagggcgcgtgcttgcatacgcagctagcaattgctgattgctgctgactgcctagttgcatggtcgaacgggcggcgcttgctgctcgcacgcgcggcctgctaggccgctagctaactcgcgcccgacgagcgatgcggcgcgaggtaggtcgctagctaagcagagccgggacgaggtagcaggcggcaggacacgccgctcgcgagtagtcgtcgatcagataagaatacgacaggcctgcatggcgtgacagtgctggcatagctcaaatcagatatagtaaggtttagattgcagtaggttcggttggtgtgagctgggctaggctctcggttttagtttcttagttatgtataagataatggcagtagtattagacttggccgatatgctattcgcagttggaatgtgcatggacatggcgataggacatggtccgatgctccgctagtagtataggcatggcttatgatgcgcagacgagcagcactacaactcaactccagccaagctcaagctacgagcttctgatatcgaccactgccgtactaatgcattggcgagtcgcaacacaccacatacaacaatttaacagatgcaatgaattggaataggaggcgactgagtggacactcacgagacgagcgcagagatggctacgcttcgagttgtagttgagaagacgaacagacaagaggtgtagatagacattgagcgccgagcgtgacaggcaccgatgtcaggtacatcgaccacgtgatgacgaccgtggggggagagtgctaacgataccgatagcgtgcgcgtcgcgtcacaggtgagaagcgagcgaaatggcgccgggaccttggactaggctatgcattagtatcagtgccccgagtcggctctagaggagagacggcataggtcatgactcgacatgaggctttggacttggcctcggcttcgctataccgtaggacaggatacagaacgagttgtgccatgtacactgggcgacgaatgtgatagactcgtctatatcattctcgattcagatacgatcctctcatctgctcctgtgcgtgtcgctgtcggagtgcctgtagtattgcgtatcatgcaccgaagccgacgtaggacgataatgacatatgctcagaaccacactgagacaacggtggctggacgagccagcaggtcgacacagatacagtatgaacgcgtgcactcataatcactccgctcgctcagagtcccgtccgtcagagcggattgagctggattgactgacacatatcatgtaactcagccagctaa

SEQ ID NO: 417206 - DNA, 896 bp, Homo Sapiens
  misc_feature (701)..(715): n is a, c, g, or t
  misc_feature (777)..(829): n is a, c, g, or t
tagcggtgcgaggcctgggtcccgaattcgggcacgagggtgagcagtcgatccccgccgccccggggcacagctggaccggctcctccagccgcggctcagaactcgcccctggattccgggttagcttcggtgccaggaccgcggcccgggcttggattcccgagactccgcgtaccatgcctcgcgggagccccgtgcacctttgtatgagcacgagaggattctgcctccgctgcagcagcccgggaagcaggagccgaagcgcgggccgtggagcaaggcgggaaccggaggcggctggtggcggcggccagcggacgcacagtgtgccaaggaatccatgcttcagacgatgccccccactggagtggatgacccggcagtgcccagcagctattagcttgaagaggacgggccacgtgattggaccaaagagaggatgaggacatggtgtccccggggttggcaagaaagacacccactactagcggccttgacgtgggcgtggtagaccaggagaacgacccctggtgggatgcttgatagagacggttgagaagggaatgaacagcaaaaagacaacacacaaaatagcgacatgataaagaaacgaaacaacagcgaccagaaaacccaaataacaacataccaaaacagaaaaacacaaattaaagacacagataataaaagcaagcacnnnnnnnnnnnnnnntaaattcataatacatcacaaaccatctaaatactacactcaacaaaaacacaaacatcatnnnnnnnnnnnnnnnnnnnnnnnnnnnnnnnnnnnnnnnnnnnnnnnnnnnnntaaccactaaagaaccatatccaaccacaccccaaccccaacacccaacatatccataaacacataa

SEQ ID NO: 417207 - DNA, 875 bp, Homo Sapiens
  misc_feature (232)..(240): n is a, c, g, or t
  misc_feature (643)..(643): n is a, c, g, or t
  misc_feature (683)..(683): n is a, c, g, or t
  misc_feature (691)..(691): n is a, c, g, or t
  misc_feature (704)..(704): n is a, c, g, or t
  misc_feature (727)..(727): n is a, c, g, or t
ttacgcggtagcgaggcctgggtggccgaattcggcacgagggccattctaatcgcaatggcattcgggggggcttaccgaacgaaaaattctaagctataatacaagctacgcaaagtgccccaatcgttgtaggtccccctacgggactacttatcaacccgttcgctgacgtccttaaaatctcttcactcaaagatgcccgctaaatagtccgccgaaactctacctnnnnnnnnntctcacatcacgctggctcctgaccttgtatgcgtctcgaccagtcagctcgttcgtactgatgatagccctcccttccccaattatgcctagactcctgcttgggtctagaccctcagaatcgtagtgccctccatagttgtcattcgtatgctcagcgctcttagccctacgcctcgattatatcctcaatgtccctcgtgactcaagggatgacgacatttcagaatcatcagaaacttacctggcccctgtaggtctggtcgacaacttgtcggaccgcccacaggtacgtcccatatgtcacacgtctcagtagtgatagagatcaactccgtaggcgccatttcgatgtcctaacgtgaataccaacccaaattgacctcatattagaagattgagnctaccctcttgttagagcacattccgtgcccgagctcccngttcaatntcgagctatagcnaccgaatagaagatcaaaccttnacattgaattttaacccttcccattgacgcaattcaatcgtaagctcccctattgtgacccctatttacacttattgccatgtcttcaatcgtaacaccaaacaacataagaccagagaggaaccgaagcccagaaaaaccaccacat

SEQ ID NO: 417208 - DNA, 727 bp, Homo Sapiens
ggaaatcagtaagtggctcagagtttccatggacaagaaagttgaaatcacgggcaacatacacacttcctcgcctgagtccccacgggagcctcggcgagtgttgtcagtcgccccatgccgtgcaggtgcttgtggcctgtgcgccaagccagatgcacggtggcctcgctctcctatcccggcggtcataccaagagaggagagcccaggctgtctggaggccgcgacttggtatctcacgtcgtgttttgtgtcttggttacaaatcgtttatgaaggccctgctgtgcttaggcgccctcgtgtgggaattctggtaaagttattttgcgtgccttgatgtgcgacagagagatgtagcaaccatctctagctgcaccatctcgagcaaaggcacgtcgtgaaggcagagctcttttcagctttctggaagaaaggtctgctgcaaccctgaaggaacctgggcgtggcaacatttacatctaggaggaaaactgtggctcagttttaacaaatgggctcattgagtgagttccaaattcatgtttcaccttccatgatgtagccaagctgagaactcttaaaaatgcctcaccgcctttttcactcagggccacctttttcccaaggaacttctcaaaactccctcaattccaattttattgaagttctacatgtaggctattgccttgaatccaattttccataagaaagagctcattta

SEQ ID NO: 417209 - DNA, 364 bp, Homo Sapiens
ctttggatggcatgcggtggtcgcgccgacggggcgaatgccgctggtaaggcggtgagtgtctgctggcgctgcccctaacccccatctgaatacgctttttatcaaggtgaaggctaataagaacgatttttctagcgccttgattaacggcgtgaagaagatgacgacgaatcgcatagatggttccatgaacatcgcaatgtctgggggagaggcaatggccgccccttagctagagcgtaaaagtcacctactggctcgacgactccaagagggttgtcggaacgatccgcggaggtctcgaagctaaggagcacggggtcgtccggccctgccataggtaatgggtcggacacgtacg

SEQ ID NO: 417210 - DNA, 166 bp, Homo Sapiens
gaagtgaaacaaatcatacagaattttaatactataaaaacattagcactgtaaaaacagcaacatattatacagcctcaaaacagttttaaactgaagtctagtatgttcagaaacgcagggtgctgacccaacatccaactgaagctgaactcaggaaagccct

SEQ ID NO: 417211 - DNA, 720 bp, Homo Sapiens
  misc_feature (71)..(87): n is a, c, g, or t
  misc_feature (115)..(289): n is a, c, g, or t
  misc_feature (377)..(377): n is a, c, g, or t
  misc_feature (522)..(530): n is a, c, g, or t
  misc_feature (548)..(548): n is a, c, g, or t
  misc_feature (620)..(620): n is a, c, g, or t
  misc_feature (647)..(647): n is a, c, g, or t
  misc_feature (710)..(710): n is a, c, g, or t
tatttctatggtaaatccttgcaaacatggaaacaatgcatttggcccagtgctttgtggttgtgtactcnnnnnnnnnnnnnnnnnaatagatggcattggcggggggcatggnnnnnnnnnnnnnnnnnnnnnnnnnnnnnnnnnnnnnnnnnnnnnnnnnnnnnnnnnnnnnnnnnnnnnnnnnnnnnnnnnnnnnnnnnnnnnnnnnnnnnnnnnnnnnnnnnnnnnnnnnnnnnnnnnnnnnnnnnnnnnnnnnnnnnnnnnnnnnnnnnnnnnnnnnnnnnnncttacttcatggagggctgccaacagggagaaatcatttcgaaactccgggaggccagaaggtttgcagttgagccccaaaaatcacncccatttgcaccatccagccctggggcgcatgaaggtgaaaattggcttccaaagaaaaagacgaaattcggcggtccacccactgtggttatacacgcgccccggaggcaccaaaaccccctgggggcaacaagagtaaaccannnnnnnnnacttgcgccctccccganactcgccgagaggacttttagcgcccatgtgtgcgcacacacgacgactgccctcgggggccggcgaaagangtagataagcgctaccgaacacaacantgtaacaatcgtacgagtgccggcgctcctcctccagtcagccatcgctaacaacaacaatcncgcaattaaa

SEQ ID NO: 417212 - DNA, 843 bp, Homo Sapiens
agaatcacaggtcacccagcccattcctccctggactttctggcactttcttcccacagtccttctgctagtattctcctcagcctcatttccaggcaatggagttacagcttgtacttggggatattgctctcttcacagttctgccaggaaacccgagaatctgcccccggccaggcagatgctctctccctggtgaccctctccacctcttccgtcatttgcagtgagagagacatcagcattttgtccttcaccctctttagaagcagtcctccaaaaccatccgtccagggtgttagggagacgtgttcttttgtccagaactgctgctgctactgaggcccaggcctctccatgttgggcagttttaggaggaaatgccgttcagaaaccagagtcggtcccctagtgtatggctgtgtggctttggccagggtcactcaccccaaggagacttccgtagaaatcacagtattattcaggattgccagaacatctcaacgtgggcctcctcctgactgggggcaccattactctccattactccattactctccatttggtacactgttttccaggtttctaagtgtgttccatgttgtcctttgcggaaggttaaactccccagatcctacgcgccttctcccctgtccttaatagtagtaagagcccaaccctgagtcccaacaagtcgcacctggaagtgccgtctgcgctcggctcttccctgggattaacaaccgcgtggcccaactgtcacagtcggggtgctgctgaagcgcctggcaccctaactggggacttcagtttttttaaatcaaaacaaacctgatttttaat

SEQ ID NO: 417213 - DNA, 306 bp, Homo Sapiens
gtgagtcatagagaactcagccacacactgagacacgcggggctccgcacaggcgagggcgatgccccagggcccctggctcgtttgggtcccctgttcctgctgagatggggcacaggtcagtcactgggtgccagctctcatgtccctgcaatgcagagtgaggggcccggccgccctgtctgcccaactgtctgttctttcagttggggctgctctgtgctcctgtgtgtgctgcaccctcccccaccatggccctcctttgatgctgggaatcctgggcaagtggcatcgtgggtaagccac

SEQ ID NO: 417214 - DNA, 626 bp, Homo Sapiens
ggagagtagtggtcaggggagtcccaaatactggaatgtgtggatggatgaagatgaatggaagaaacattacaaagttacataattttgagcagagaagttgagctctacaaaggaggaagaatagcagcagatcaactaacctggcatgtagagttcaaaagtttaattaaagctcttggcatgaaaaatagaggtgcacagacccttaaatgacagccattaacagttacaggacttggtctgtgtggggccaagagtttcaaacatttttcaggtgcaacctcagatagagatgaggatattggtaacaagaatcaactttgaataccaaaggatgatgataacatcactacatttctgaaattcttaagtctctgtggtataagaaaatgaggagattctggatgatttatgacatatttgtcatgaaattaattgcatgatgctcaggacatttatcttcttgcttagctaagatgttatactctttatattctcaaaactgaacatggttctatgatataactcctgagcttacattttagacaaagggatgatcagtgaaatgtagtatgtatgtagacataaaaggacacacaactaatataaagagatcaaaagat

SEQ ID NO: 417215 - DNA, 374 bp, Homo Sapiens
ggaacctgtgaattttaggggaattcccttcagtctgaaatagaaagccattgttcaaacatagttttacatttgaatatggaaggagggccttgagagaagcctatactactttcctaatcactcttgtattcatacatgataaattttatgaaaataatggtctcaattttacttggacttagggactggaacattgggtagttaaattccattgcacagaaagggaatacagttttaaagaagagggtctcaaatgttgagcataatagtcaactgtgtagctgtagcttacttaaaaggcagctgtaggttccatccagagaatatgagttcttgagcctggtctgtatttgtttcctatggctactatg

SEQ ID NO: 417216 - DNA, 658 bp, Homo Sapiens
  misc_feature (129)..(162): n is a, c, g, or t
  misc_feature (240)..(255): n is a, c, g, or t
ggactctcaaatgttaataattaacacagatttgaaaacacaggttatagcagagagtggtggacatgaccaagccccggcatccagccagtacacacaagaactgtagttgctataagtgacaacatnnnnnnnnnnnnnnnnnnnnnnnnnnnnnnnnnnaacagcttacttggaaatctcaggatttctgcagtttaaatgatgtagacactagaagtttaaaatgaggcaagagcnnnnnnnnnnnnnnnnccacagttggatcatagcaaatctaacagcagttcctattcctcatgacaagcaagtctcaaacaagaggctcccaaacaaagtaaacaaaaacccagccatgctgtaataccgcagcaaaacgtgttacccacctacataaagggactcgctgacaggcgtgcgtgctgtcagtgagctgtagctctcccggacagaccctgaacggtggcaggtgagcactatgctgcaggccagaatttaaataaacaaatgaataaaatgtcctcttcactaacacatttacagggagttcagccacttacacacagagagaggcggaaacttgatcctgagggctccacaaaatcaagctcacctggcagcacaaatattgggttgatggtctccagtgggtgaaagt

SEQ ID NO: 417217 - DNA, 420 bp, Homo Sapiens
  misc_feature (70)..(253): n is a, c, g, or t
gggatgcaaacggtgtctgcggctacttatattcagcttgaggtggtcataggttgaagtaatttatcgnnnnnnnnnnnnnnnnnnnnnnnnnnnnnnnnnnnnnnnnnnnnnnnnnnnnnnnnnnnnnnnnnnnnnnnnnnnnnnnnnnnnnnnnnnnnnnnnnnnnnnnnnnnnnnnnnnnnnnnnnnnnnnnnnnnnnnnnnnnnnnnnnnnnnnnnnnnnnnnnnnnnnnnnnnnnnnnnnnnnnnnnggcaggaatcccgcttcagtaaggaagaaagtgcaatattcagtgcaagtggagtagggaaagagggaaaggcgatttgtgcaaaaacaagtccaacctactctgccaacattagagaagccttccaggctgggcggggtccgtttgtaccttgtcagttctgctgg

SEQ ID NO: 417218 - DNA, 452 bp, Homo Sapiens
ggatcaacacttgtgtaaatgttatctttaaagatagaacatgttgaaaattataggaggtacagattttacagaaaattaattctgcagtgaatcctttggtgaaacgaacagtttgcagagacatatccttagagttctttgtctctctgaatcattctgggttttctaggttgggagacaattatacttattgggagacaattatacttaattgattaatgcataaaaatttaaggccgtattttaatggctttgaaaggaagctaagtttgtttccagttgtttctgtgaactgtagtctgaatctgtcagtctatagttctctactgttccatcaacaggaagcatctggtcattcttcgtgtaattgttagaaaataccaggtgtacttttaatgtttgctgttcaaacgaaaatagattggatcttggttaagttcacttggttt

SEQ ID NO: 417219 - DNA, 666 bp, Homo Sapiens
  misc_feature (505)..(573): n is a, c, g, or t
  misc_feature (631)..(631): n is a, c, g, or t
gggaatgtacctgtctgtgtctgctctgtgaatagcaccacttaaacggggttcttgctgtgtcgtacacaatctgcacagctctatgcaatggccctggttggaagagctaaacttcatatctaaactagcaggaaacactgcttttctactagtgtggaaagcatgggtccagtgacgtgatttgatccgttactggggctaagggatagtcctgaaacatttaaagcagctgcctctggccgtgttcccagctgggtcaatctaaacccctatgcccttctttccttagagaaatcaagcttttccatgcctccacacctgtgcacaaactcttcattctgacaggaacacttttcttcttcactgctaactggtgagctgctaattgtcattaaaaacctggatgaaatcacatctactttggaagattttgctgactctcgtgtgtgatttcctaagtgcatcttgctagtgcccctgggatcctctgtgtcttctttannnnnnnnnnnnnnnnnnnnnnnnnnnnnnnnnnnnnnnnnnnnnnnnnnnnnnnnnnnnnnnnnnnnntatcttgttagtgcttatcaatattacctgctgtagtccatcttccccataaactgangatcttgaaggccccaagttttatcatcttgtttt

SEQ ID NO: 417220 - DNA, 446 bp, Homo Sapiens
  misc_feature (347)..(347): n is a, c, g, or t
taaacacacaagttgaggaaattttaaaatgagaaaaatacacacacaaacaacaaagctctagccattagcaattagaacagctttatttacctaattcagacaaagagactggagattctttagggagttaaaggcacgagcagtggaaaaaaaccatgagatcatcatcacatcatcccctgaagctgtctcaggaggagtcactgaaacccagagaaaatctaactggtaattaatacatagggctctcgtgtccctgagggaaaggagtgaaaacaccaactgaattagcccatacatggggctgtctgtgccctttagggagaggagtgaaaacaactganatcagcccatcagcccatgaagacactggtgaaaattatgcgacttgtccttctcgcacctaagcagcccacagataactcactcttatatacgaacct

SEQ ID NO: 417221 - DNA, 667 bp, Homo Sapiens
  misc_feature (581)..(581): n is a, c, g, or t
ggcagaatctcttttgtgtctaccacactaggctcaagacttcccagtgtctttgtctcctctccctcaaatctctccacccaatgtcttgacaaatactgtagatccttcctgcacagcatcaccagaatgtttttctttcttttcattcacctctgtcatcatccatgctatggtgtttatggaggatgtattctgcagcaggaagtgtgatgggcactgacgctgcagaaagactcctgttgtccacctcgggagctgacacgataaatgcggacaatgagtagccactgctgtttgccctggcccatcaatgagaagatctgctcttagagccctgctttcctgctgaaggccctgaaatcacctgtgttccaggccacctgctaacaataaataatgctgccctgatgtggggaattagctcaagtggtagagcgcttgcttagcacgcaagaggtagtgggatcgatgcccacattctccaagctttattatttagacatcgtgtctccaaacactcaggtctccaaacccaagttagtgtctgagaacaggatgctgctttggttcagacgtangagcagcaatatagagggctggtgatggctcctcttggcatcaatatagtgagatctacatgtaataattctctgtttcttgagga

SEQ ID NO: 417222 - DNA, 660 bp, Homo Sapiens
ggctggagaacaggcttggggaatgtcagtagaggcagaggtggaagccacatatgacttggtcatcccttggaagcagttgagccttgaagggcagaggcagctggaggcagccatggggtagaggcaggcttgggagcctgttcagtgctggtgtgtagggtcctgggagacaggaatgatggcagggaggctgctgaggcggcaggctgggctgggattttagcaggctggaggagcactgttgggggatgctgagttgagtcaatccatgtctggagttggaggtgagaccctcctggtggcggaagagaggtctcaggctaagaagggacccacggcagggtctctggccagtgtcgaggctgggcccagttgagggtagagagaacagatttctagttgcattgccattccagctgtgacttagcaagtgcaggtgaagaggtagacaagattgggatttcaccagaggcggccagtgtggcaggagatgaatcccccaagcagaatccaggctgggcctgtgggtccttgtcctttttaaggggacacatgaaagccctcactgcccagttgaaaatacatgaccctgcttatttctagtgttaagaacttgcgccttgcacttcaatttgccattcctagatggccctcgtc

SEQ ID NO: 417223 - DNA, 548 bp, Homo Sapiens
  misc_feature (416)..(466): n is a, c, g, or t
ggaagaccaagtgtctctgaaaagtgtttccttagtgtctggagagactacagcagcaaggcttttctgatcctactctgactctcaagataatggtgcttgaagtgaaatcacagaagagatgactggggcaggaaaagcaagatggaaaagataaagttgtggaagggactgaaagtccatgaagtgctgggctggggacagaaagggtttaatagggcagggtcttgaggaacaggaacagagaccttggttctgggttgccatctgattcccagaagagtaaaggaaatggggcaggaggatgtctgtggaggacacagcgtggctgagtggagagaacacaagcttctggccagtgaacctaagtgagaatgtcagtggactttgcacaggctgggtgcctttgggggtgnnnnnnnnnnnnnnnnnnnnnnnnnnnnnnnnnnnnnnnnnnnnnnnnnnntgatgacctgccaatgtgtgtggaaatactatgtaaactgagcactatataaatgctggttgttgagatattgggagtgggg

SEQ ID NO: 417224 - DNA, 413 bp, Homo Sapiens
ggaatatacacatgtatggaacaaggagaaactattatcacaatggactataatatagtttctgactccctgtaaatagaatctgctctaaattaagcagatgctatagccatgcttcaatataactctgttttcaacttcgttatgaaatcctttaagggtgaggccattttacaaaggacaaagaaactggtgcttcaggaactaaacttttttggatgaaacccaaatgtatctggcatatcttgaattgtcttttatagtcaatcctgttttagggacattaacaaaggtttattattacataatttgagagtctttcaaataaaaggaaagggcagatcaagggccattttccccaacctcaggagttaactcctcagtacctcacaggaacctgaaatctttggagg

SEQ ID NO: 417225 - DNA, 368 bp, Homo Sapiens
ggactgaggcctctctgggattctttatcttttgtctgaaagcattatgaggcttaattcccataaaaataaaacacattccaaagccaaggccagggtttgggcattctctgctggtttatactgaccactcccccaggtcccgttcatgagcatggagaatagagaactgatggtagggctgatattgtgcaggcatggccctttcatggaagcagagggctaaggaggccttaaaaagccttcggggccagtcctttgtctccgggaggtcttgcttagcacgaatagatcagaccactctccccctattttcctcccagacagtgagacttgctagggtcttgggaatataaatattccacctg

SEQ ID NO: 417226 - DNA, 183 bp, Homo Sapiens
  misc_feature (88)..(133): n is a, c, g, or t
aaaaactttttaaaccctttttttgggccccggcccccgaaaggaagggaaaaggggcccctcgttttccccggaaaacccgggcccnnnnnnnnnnnnnnnnnnnnnnnnnnnnnnnnnnnnnnnnnnnnnngcccttttggaaaaatccccaggggggttccgggggctttttcgggttct

SEQ ID NO: 417227 - DNA, 108 bp, Homo Sapiens
ggcaatcttctaacaaatatctttgtacatccttatcttctcatccttgcctattcatcctaacataatagctataagataatttcttaggtgggcattgtggttcat

SEQ ID NO: 417228 - DNA, 163 bp, Homo Sapiens
ggaatgggagtaaggtctgccatgggttaggacatcacctttggcccagtttcaaaggaaggtgcagacttgaaggacagaagctcattagctgagtctctggggaccacgtttgcaatggtcccacctgcaaaccagatgagggaataaaattcagtctacc

SEQ ID NO: 417229 - DNA, 694 bp, Homo Sapiens
  misc_feature (502)..(646): n is a, c, g, or t
ggagaaggagctggtgttatcctagagacaggctggctagctgcacagtaggtgtccaggtggaggcaccacagcctggcatctgtgtttaattctgcagattcagagatttaatgcatcagttcatccagagcaaatcaggtggaatctccatgacaaagccccatgagcctcttcatacccgttcagtctgagcagtgtcacaagtgaagggactgaagtattctgacaaactcaggccaagctgaatgttgctcattttttgtccagtttgggtcgtggacacttgattgttccaccttgttgggggtatcacatggaaccaggaaattttcaagtggcttaaggatctctgaaatgccagtaactcagatcttgtggtatttgacatgttaaacttggaatctgaatatgccgttgcctagtttggacatacaaaaaagatagatttttctgttagtataaaatgatacgattaggttgcaaactcttttgtgtgtgnnnnnnnnnnnnnnnnnnnnnnnnnnnnnnnnnnnnnnnnnnnnnnnnnnnnnnnnnnnnnnnnnnnnnnnnnnnnnnnnnnnnnnnnnnnnnnnnnnnnnnnnnnnnnnnnnnnnnnnnnnnnnnnnnnnnnnnnnnnnnnnnnagccagcgtggtgcgcatgctgtatccagcactcgtagctgagcagaa

SEQ ID NO: 417230 - DNA, 561 bp, Homo Sapiens
  misc_feature (89)..(102): n is a, c, g, or t
ggaacatcctaaattatatattgaccgtttaagattctccagctatagtgagaacaaaatctataaaactataccaggtcttgatttcnnnnnnnnnnnnnnggtaccctcattacaacctaatgaagataaccatgtattatcttttcttaacaattcttcatagattatattttctccagcaaatttgtttgctgaaattatatcgtatatagggaaaagtcatttctcttttatatcatatattttcttttaatgaaatctgactgaaatgaggaataattttcactcctcttgctttatgacagtgaagtatctttcaagaacaaagttgggatatttgactttcattgtcctgagtaaaatagtgcctaagtcaaatagtacataaattatatttaaagaagtatagacaatatctagactcaagttctaaaataatgatagtcttctaaaaatgatttgctggaagaataattctgtaattgataaattctcttttaaagtgagcatgattcatagcttagatgagtgctgattttcaattatgaaggacagcag

SEQ ID NO: 417231 - DNA, 277 bp, Homo Sapiens
ggggagaatgtggatggcatgacatcagaattcctttatataatttaacttcagaatagtctgagatcatcgaagcacgatggtcaagggaattccgtttttgttttagagcaaatatgtttgctgtttgtctttcatcacaaacatcagtggagtttcagcaccttacagagctcagtgaaccccctggtcaccatcaaagttagcacacaacaaagccaaccacgtgtccccctcacagatgacaatggctgaactctgagtgaaaccacctgta

SEQ ID NO: 417232 - DNA, 591 bp, Homo Sapiens
gggagactcctcctgtgtggggagggtgggaacgcttcttaccttccgtcccataatcaactgtcttctttgaacaatagattgtgaataatttcacatcccggaacattctctctccaggcatgattttcgtggctgcaaaacagcggcttctccatcattacgcaactggcctctctgatcgtttccagattgctctcggccatgcacctccttgtctaaactccgttctgcaccaccagcagtatcatggcctggggagaaggggctgtgtgctccattccaggatcaagactttgtagaaatcatgttttctagatggttgtgggctgttgtcagcagaaggactcaaggcaattaacatacagctaatgaactccaaagaggcgctttgatttttgaagaatctgacttgagaacaaatcaagactaagactaatatagcctcatctttcaacataggagagtcggaaaacaggctgagtctgcgacacccaaatgcctgccaccaccacatcccggtatgtgggttcagcacttgacagctaacagatctctttgctagatacagcaatcacattttctggttaa

SEQ ID NO: 417233 - DNA, 413 bp, Homo Sapiens
  misc_feature (196)..(280): n is a, c, g, or t
  misc_feature (288)..(367): n is a, c, g, or t
tacaaataatactaaaattatctcgtcttgttgtcatatccctgtgctcccttccttacttgttatccttgtttggattttcattttatcttcctttattatattaatcttattcatttttatatcactctatcttatttatctccatactcttatataattttttcctatatattggaaattctatttcattagnnnnnnnnnnnnnnnnnnnnnnnnnnnnnnnnnnnnnnnnnnnnnnnnnnnnnnnnnnnnnnnnnnnnnnnnnnnnnnnnnnnnnatcacacnnnnnnnnnnnnnnnnnnnnnnnnnnnnnnnnnnnnnnnnnnnnnnnnnnnnnnnnnnnnnnnnnnnnnnnnnnnnnnnngtcatcctctatcacttgtttactatacaatttaaatttttctttt

SEQ ID NO: 417234 - DNA, 559 bp, Homo Sapiens
  misc_feature (170)..(192): n is a, c, g, or t
  misc_feature (205)..(455): n is a, c, g, or t
ggaactgagtgacgaatacatgtctaacttttttattcaattaaaatttgtatcattaaaattagcagaaaaggaaccactacaattttgattcagagactcgtatgaaaatttgcctgttcacttgttgcagtatgattcccaaatttactgcccatccaagttttccnnnnnnnnnnnnnnnnnnnnnnngagatggagtctnnnnnnnnnnnnnnnnnnnnnnnnnnnnnnnnnnnnnnnnnnnnnnnnnnnnnnnnnnnnnnnnnnnnnnnnnnnnnnnnnnnnnnnnnnnnnnnnnnnnnnnnnnnnnnnnnnnnnnnnnnnnnnnnnnnnnnnnnnnnnnnnnnnnnnnnnnnnnnnnnnnnnnnnnnnnnnnnnnnnnnnnnnnnnnnnnnnnnnnnnnnnnnnnnnnnnnnnnnnnnnnnnnnnnnnnnnnnnnnnnnnnnnnnnnntgagcaaccgcgcccggccgttttcctcttgaagtaacactgtaatccctaagggctggctttaaaaatctgaaattcgcatttctgttttggcattttgaaat

SEQ ID NO: 417235 - DNA, 664 bp, Homo Sapiens
  misc_feature (572)..(572): n is a, c, g, or t
ggatcactttacctagataatgcctaactgttagtgcaggtgtgagagatggattgtcaaaaaatcaacagttgaacctcagacttcattgtactgaacctttcttcttctaccagtttttactgagctgaagagtgacataagtccaagtggacaaaccctaggatgaggaatgagagcaaggggagtgttgggtaccagctagtatcacagggaagagtgtttggagttgtttgtgtaaaggatacccatcatgcacttctaactagtgagggagaactccagggtctcccaccttgatcaatacaacccttaatttcttctaactttctatagaagacaagcctcttaggaaggctgcagtttcatcagtttggaagcaggaatagggattattccttagtgatctgacctcgtagggatttgcccagtcttcactgtgtgaatctcaaggttaattacttatgcctaaattaacatggtagaaagcacactgcttaagccagagagctcttcctaactgaggaatggttggaatctttattaaacaatctgaattccttttccctttnggttcaaacagttttctgaagccatacagacctttgggtgtcctccaatgagtgcaaaatgtgtgagcatgtacctctcccggggtagctgt

SEQ ID NO: 417236 - DNA, 660 bp, Homo Sapiens
gggactgatagattatgtgcctcactagtcaaatttgaattccaagtactgctcattttgtatgtatctaaacattttgagaccttacatatcctctatgtgcaggaaccatttattaataatattattatattttttcagcagtagataactccagactagaagaatcataaaaacgcattttctttctacttagaaatgttgactaaaataaaaatctgactatatgaccgtaatttttaagtccatcactttgtatttctatgctttttcaactgtccattgagaaattgtttcctgtaaattggaaatgatgctatctcttttctggaaaatactgatgcctgtcaatactgaaaccttattaacagaaactttcctgttactgaaagctgaaggggcagaataatttgtatcatatctatccacatgatttctggaaaatcctattaagataaaaggggtaagaactgtgagctggcctgcttcccagtgttgtctaacgactgtctaactaaagagaataatgcatatactaaattggagaaaaaggtaaaatcgtgtgtgctgaggacttgtgttaaactaagctaatgttattgtttctaaattacttttaatgtctaaggaatttctcttaaaattttgtccattctgctt

SEQ ID NO: 417237 - DNA, 646 bp, Homo Sapiens
gggggcgaggttccgaaaggcaggagacttgggggaacgcaaccatagaaaggcctgggcgcgagggcttccttgcaaagccggccttgcgctccttcctgcgccaggccggggaccagcactgcattcgcctgtgttcacagctttggcggaaacgtaagaaatgtggccgaaatcttcgttaggccaggcgcggccgccggcccaagagcgaagtctgatttcttctttgacttcctaatacatctcgaattctcgcggccctcgtatctaactaacttgatacgttctgttgtcttatcatatcttggtttatactattgtttgcttttctaaccttaataattccccggccgaggctgatatgttcttgaacaactctaatctatttctcacatcattattaattttatttctatcactcgacccacgccccatcttaatatccgccctttcttaattaacctcaacatactctctgcctctcccccccactccgccgacacctaccctcctccactctctcaattctttactatctgcagaactccctttttacactttttaatattatctcatcgaactccaaggaaatacgatcttgattcccaaatatagatcatttaaacaactaggatttataaat

SEQ ID NO: 417238 - DNA, 702 bp, Homo Sapiens
ggtgaggcggctacagcaaccctcatcttctgactccgaagatccaacaattcaccccaattctcttctaccattccttgcaaaagtctgcgtgtaaacaatatccattttctcccttactctcaaccaccgccatcaataatgtgcagggtcaactttgcgaagaatttcaagagaattttgatatctcaacagctggaaaccagtcatttgagcaacagatatatgtcctagcttcttgaactgccaaataaccagtagatgagtcactaattctgtgaacccagaatgaccctgcaaacaatcattctatggtgcagaaagagacacgacagaaggaagttggaatctattacctcctaatcaaagcacacttggcagaatgccctggcttttcacacattcatcaagacatcccgaggagagtttgcctgattgtctcgggaactctcctaagagtaagtggactgacatgttatgcgaaagaaagtcaaacacagagaccagtgagcgccatctgacagcaaagatagcaagccaagtgactctccagtcatacaatgtaccatgagccttggcatcacatgcactgaggggacccttctcctctgtcttcacactccattaccctcttagcacaaggccacccaaagagtgcaaattggactaaaagactcacagaaagtgtgccctttttcctta

SEQ ID NO: 417239 - DNA, 360 bp, Homo Sapiens
ggccttctgattacttcattttctgaatccccctggaataagccattctcattcacggtgttggtgaacttcctatgacccctctcaagttggttgctggactaggtgctttttgagccttggttctgcctctgttttacatagaacatgcgcaagtcacttaaccttgttatgtacaaaatatctatatcatgaatatactgagagaaataaaggtgaaagcattcatgaaaataaatacctggaaagtaccttttcccaagtatttccaggtagctgattgctaaacatttatttggataaccattgagggatatcgctgaccccaaactcaggggacagtaaagaagttttccttga

SEQ ID NO: 417240 - DNA, 642 bp, Homo Sapiens
  misc_feature (620)..(620): n is a, c, g, or t
gggggctcagataatcccctgtgactggccattggagcggcggagctcctgaggctagttcacagcacccagaggtctcttacagtcaacagattgcatactgttgacagactgcaatccgtctgtgttccccacaccaactccatttccaagatgggaattttattcaggaactcatttttgagttcccaacatgttgacttcgcatccatttctgctcaccaaggcagaaccatagcagtggtgtgtgacaaagatgcaaatggagggcagcccaaacaatggaaaagagaagattttcagcccattcttggggctaagtgaggttttgatttatggtagaagacagttctaaaaagcagctggcagcatgggcttcaatttgtggcccttctgagttcaaacagaaggaaggaaaaggagccacataaagtgtacacattcaattcatcttagaatgatagctcccaccttattacactgtacaactatttaataatctgggttacacacatcaagaggtgaaataagaaatttcacttacaatgtgtatttcaactgctaattacctccaaagagtgccgtatcctgttcggtgtacttaagcttgctcagacgtnctgtgttaatgtttgcccaacc

SEQ ID NO: 417241 - DNA, 668 bp, Homo Sapiens
  misc_feature (377)..(413): n is a, c, g, or t
ggaatgtctcagatacacaccaggaattacgactggttggatgtgagcgtgcacttgtatgtgtgcttctatgtttgttttaactaatcaccagaactggttagtgtacatgttatcctagtcttaacagcagccagagccccaagactagtatcaaatgatatacatgggaaaaatctatctacattaaatggataatgtgtaaatatctgctgactttcaaagcacatggaagattagcaatagatgttaatattagttgaagaacagattttacctctgttttagaattcaactagcccatgtacgtacatatagatatgtctagcctacatatatttgtcattatttatgtccactcaattcttgttattacnnnnnnnnnnnnnnnnnnnnnnnnnnnnnnnnnnnnngctattttggctaatggaagggaaaaataacatgattgtgtataaatgactttgtttccagtaagaatcaaatcacaaagctgccaccgttagatttataacgtattctgtgtattaaccgaagatgttctgttcttagtcatgcctgtggaaatatatgtgaaattaatttgcatttccgtagtcagcagtggaaactgtcttccagtcaagcgacggtggaatgactgggaaaagaaatgcaaagccactaac

SEQ ID NO: 417242 - DNA, 405 bp, Homo Sapiens
ggcagaggaacaagaaagaaaaagatgaagaaaaattaacagagcctaggagaccggaggacattaagcccatcaatacacccataaagagcgtctcagagaagagagagaaaggggtagaaccatgatttgaagaaataatggtgaaactttgcaaatttgataaaaaatatcaatctatacatacaaaaagctcaatgaactccaagtaagataaactagaatagatctgcactgagatacatcataatcaaactgttgaaaatcaaagacgaatagagaatctcaaaagcagtaagagagaagcaacttattatatagaagaaatcctcagtaaaattatcaactgatttctcatcacaaaccatggaggccaaaggcagtgtgatgacattcaaagtgctg

SEQ ID NO: 417243 - DNA, 380 bp, Homo Sapiens
ggaaaatttgatattaggaagtacagatatacttctcatcataaaagggagtgtgttggggatgttgcactaatgatacaatcagcaacagcagtatcaaataatgtttattaagctttatttggcaggcattgtggactgcctaaccaatagccattttcctcctttgtcctaacagcatcacctgttttgtccacatactactttctttcatggtgtgtggtccaggtgaagtggaccctattccccagcccagccagtgaatcacagttagtccatgaggcaaccataagggctccctttgcacagctaattgatgcacttctggccagtgagatatgaagagagtctatggggctttgggaaaggttttctttctc

SEQ ID NO: 417244 - DNA, 231 bp, Homo Sapiens
ggaaatgagtcctagagtgttgctagcagcactatctatagtatatgcccattaaatcgtggtacattcaccgtggagaactgtacaacaatgacagtgaacatcctgcaattacaccaaataacaccttgtagttattcattaaactgaacatatataggttttatgcattttctatatgtcatggttcaccataaaagtaggaggaaatgtcacaaaaatgttagcagc

SEQ ID NO: 417245 - DNA, 515 bp, Homo Sapiens
ggtgatgtaaatataatatggttgggaagaggaaggtatattctagaaatttggaggaaggattattagaatcagttgagcctctcaaatgaataagaattagcataaagcgaaaggcaagaaatggcagaacaaggagagggaagaataacgaacaaaggcatgaagacaggtaatagtatggaaatttatagaaactttactagaccattaagtttgaaatctgaagtggcaatgcaggctgaagaaatatgtagtagctagattatgggggacttaaagtatcaagtaaagagcttgttctttattatgccatgttagggattcattgaagcgttttaagatggaagaggcatcagattgtattttaaactagattctatgtaacaaatggaatatgagagaaaagttttagatggccattgccctttgcagaccagtgtaatgacttgaatcagcatagcagtttaaggatagagaagtaagaatcaatttgggaaatatttagaatggaa

SEQ ID NO: 417246 - DNA, 690 bp, Homo Sapiens
  misc_feature (62)..(84): n is a, c, g, or t
  misc_feature (565)..(566): n is a, c, g, or t
ggaggccaggttattgggcgtgtttttaagggaaatagaaaggattgaggaggacttcttgnnnnnnnnnnnnnnnnnnnnnnngcaactctgttattggcaaacctaaataggggttcaacagtttcttattgagttataagtgtttacaaagatgttcagaacagcctgctttcaaaacttcagtgactgtaatatcttgggctggcttctttggccttgttcaacagaggagtgtgcaacagtgaacacttgcaactgatctgcaacattcaaggtgattttaatgttggaaataccctcatttcctggctcacagtctttctccctccttccatcctttcatggagataaaatggaagaacatgtgctggccactcatatgagatatttcaaatctgagagattacaatctttcatatcaaatgcagttacggccctttgtagagcagttttctgaagtgaatcagatgagtttttcagagctaaaggaagtcaagatgaaataaataaaagcagagaaggaaattgaaggggtggtggtttgggggaacatattttttcnnatatactttttaatatattgattgctattcttattatgcatgaaaatcactccacttggtggtatataatgtcttcttgttgaacgtcataactcagtaggacatacaggagattctcaaggta

SEQ ID NO: 417247 - DNA, 649 bp, Homo Sapiens
  misc_feature (612)..(612): n is a, c, g, or t
ggtaatagttgagaagtcacttatgcatacctacgtgaggaagaaagttgaattgactgtcattcattcagcccagtgggacatcaaactctccaaacctttcacagtaggaaaacaaagccaggcctccttaactatgctacatggcaagtcaaaacatgaacataatatctgaaaaagcctgaaaaacaactctggctaactagatctcattgcaggcagtgagagagtggtggcaaatgtgaacatgtctgtgtggggtggtggcaggggaattggaatatacgaatccaaggaaaactgactcttggcaaattacttgttttggtgctcctcttcattttttttattatggtagaagactttgtatacaaatttctcactgtacaaaaaacaagttcttcagttattgcatttctgcaatatattaaaatacacgagaaaatcacattaaaaagaggcatgattatagaaacaagatgttattgcaatacgatatcaacttataattcataattatatttgtaaatatcaaattataagtaatttatgagaaattagagccaaagcttttcatgcttacttttagtgttttctaaagggaaaacgtgntgaaagaatgtagagaagaccagctatcattatcatt

SEQ ID NO: 417248 - DNA, 613 bp, Homo Sapiens
  misc_feature (336)..(377): n is a, c, g, or t
gggggcatagaaaattaacagacctgttcatttgctatatatgattggaattttattgtaggatgcattattacctacttatgcttgatgctgcatttatttaacatgcagattggtaatctagtggctctcatttatattacaaacagaaaatgttaacatcctaattgatagatttacatgatatgacatttcatcatagtttttcttagcctttgaggcatataaacctgattattaaagacatgttatgatgtaaagctgtctttttgttttccgtaataaataagtgtaacttcatgaacatcaaatgttcttgcttccaatttattaaannnnnnnnnnnnnnnnnnnnnnnnnnnnnnnnnnnnnnnnnngcactagaccactggaccatcctcaggaaatgacacatatgacacatctccatgttaaaggaaaaaagcagaatcccccacttaacaagtttataaaactatgcattgtattgaaaaagagataaaatgaattctagttaagttgtatactcctgcacagaaaaatgacagtagacataaggcagccttgataagactgttaaagtttcaagaaggtaaataagtcacagctaaca

SEQ ID NO: 417249 - DNA, 415 bp, Homo Sapiens
  misc_feature (91)..(206): n is a, c, g, or t
gaaagaaagaaacttccctgaatattccagccctcctgagcctagtccctttttgagatttgtccccatttcttggacaccatatgagagnnnnnnnnnnnnnnnnnnnnnnnnnnnnnnnnnnnnnnnnnnnnnnnnnnnnnnnnnnnnnnnnnnnnnnnnnnnnnnnnnnnnnnnnnnnnnnnnnnnnnnnnnnnnnnnnnnnncagccaccaccaaaaactatcttgggatttgaataggattaccttaaatttgtagataaatttgagaattgacatctgtacgacattctagaacatggtatttcatgtcatgaattcatttcttgttaatgtctttcagaagagttttagggtttccatcatatagatcttacacatctttttgtagataacagatctttgtatttttg

SEQ ID NO: 417250 - DNA, 151 bp, Homo Sapiens
ggcttcggggagggagagatggcctggatacagagctaagcaaatgcttctttaagggcccttaaaagtgaaaagtaacttgcaagaggttgagatccttctgagctaggagaacttattccaccttcaaaacctagtttgggctgggtgc

SEQ ID NO: 417251 - DNA, 232 bp, Homo Sapiens
ggatctgctcttagcttgcttgtacttttgcaatactatctgttttcagttttcttcctcttcagttcgtcattcatcgggcagtgtatttttctagagatagtattgcatagtagttaaaagtgcttgtttttgattcaaaccacccatatttcttaaccttttcatgtctcaaatttctgtaaaatgaggacagttttttttagcctatgtaaagtgttttgcacagtaa

SEQ ID NO: 417252 - DNA, 402 bp, Homo Sapiens
  misc_feature (130)..(138): n is a, c, g, or t
  misc_feature (142)..(243): n is a, c, g, or t
  misc_feature (264)..(278): n is a, c, g, or t
ctgctctgtaactttaactcctggtgtattccttgaggtctgttgaagtctggatcacagaccattgtgggaggtggcaactttctaatgcattaattagattgaaagatttgaaagaaaaagttcacannnnnnnnncctnnnnnnnnnnnnnnnnnnnnnnnnnnnnnnnnnnnnnnnnnnnnnnnnnnnnnnnnnnnnnnnnnnnnnnnnnnnnnnnnnnnnnnnnnnnnnnnnnnnnnntaaggggttaatatctcgacnnnnnnnnnnnnnnncttgattttcttctaagacaacaccaagctcaaattctcaataataagtaataatctcactatgttaattgctcaaatcaataacccaacagaaaacgacatgacttggaattctttaccctta

SEQ ID NO: 417253 - DNA, 630 bp, Homo Sapiens
  misc_feature (283)..(446): n is a, c, g, or t
ggagaatataaaggtaagttttagagtaataagttaaattgcatattttcaaatatactgaatgtaaagactttcagggaatcattaaaatcaattttaatggattaatggaactacttttgttttgctatgcttttaaagttctaagacaaccctcttctactaccaggttggtctagataactgtggtatgtcttcaagtttctagatgttcataagttcttttattacctaaaacttttcttcttaaatttcagaacaaaacagaaaactttcacagtgnnnnnnnnnnnnnnnnnnnnnnnnnnnnnnnnnnnnnnnnnnnnnnnnnnnnnnnnnnnnnnnnnnnnnnnnnnnnnnnnnnnnnnnnnnnnnnnnnnnnnnnnnnnnnnnnnnnnnnnnnnnnnnnnnnnnnnnnnnnnnnnnnnnnnnnnnnnnnnnnnnnntttatattatagactttacatgttggtctcattatgtatttcttatattttttaatagttatgcctgtaatattattcttgttattattcatataccctttgtttttttatgtatcattattctttaatctaatcatttctagttaatatatttttttaaatcctcatttatattatttaaaat

SEQ ID NO: 417254 - DNA, 658 bp, Homo Sapiens
gggtgccgtggcaacttcatacagttctgctcactgagggcttaagagctggttatttaaaaggcattacagagaggccatgttgggtgatatgcggcttctcaggctcggaactgggctgcataattctttgccctgtgcgttgtatggtgattagcagcatccccagcttctgcccgcgagatgacagtagcattcccccatacccgaccaagctgtgacaaatggaagatgtttcctgacacaatcacatgtccccggggggtgcaatcgctcccgtttgagaagcacaggtctcctggctgagagccagcctcaggaggcagaccccttgggctcaaattcctttgtacttcagcctccctcctgtgccttcgtctctgcacttggaaagctggggtaggatggtgccccgctcataaacgaatgagtgaagtcatgtaagggaagcactcagaacagggtctggcactgggtccagaccatgcacgtgctagctgtctgtgcttggtgcatgttgctgactatgagctacactcaagccactgtacagtttagagttaaccttatatgaggtctggccttgccctcaactgctggaaggtgaactaggcccttggaatgtcctgcccgagaagatgtgtttatttatcggggg

SEQ ID NO: 417255 - DNA, 555 bp, Homo Sapiens
  misc_feature (516)..(516): n is a, c, g, or t
  misc_feature (525)..(525): n is a, c, g, or t
ctagaatagtgcttggcatgtagtaaactctgctatagcagagttttctattatcgacaaatagcaagatattctgccctttggatgtgtgataatttctttagccaatcccttactattgtatatttgatggccttcagctttttgttgttattcaaaggaggataaattatcactaaatccatcggaaataaatgtctacactctccaaataatccatgtgagagttacaatggacaggtaggtgccatttccttcctgtttttttctggtagcaaagtaggacaggaaatgtagagtctagttgggtggccatatgccctgccagaattcactggggagttctactattaaaggaagaagggaaccatggctactgcagggctatcagcagaccctgccacagcttttaacatccatcctatcccctagactacaactctgtggaaagttggttaacaagggtatcacaggactacccttatgttgtcacactttagtggataaatgtttaanaaaacctgnatctatttttatcatccctaaaatttcaac

SEQ ID NO: 417256 - DNA, 531 bp, Homo Sapiens
  misc_feature (52)..(76): n is a, c, g, or t
  misc_feature (294)..(481): n is a, c, g, or t
caacaacaacaaaacttttcagctcaggcagttttcttttcaacccctgcannnnnnnnnnnnnnnnnnnnnnnnngctgaggaaggcaagtattgttcctgtacaaaacaggctgccgggtgccgtatgggagcgccgcctccaggtgagccatcctgggttccagtccagcctctattcacttcaggtgggtgttttacctctaaacctcagcattgccatctgcacatagaaccagcctttctggtttccagctgaaaataggttatgactagaaaagtaaagagtgttgnnnnnnnnnnnnnnnnnnnnnnnnnnnnnnnnnnnnnnnnnnnnnnnnnnnnnnnnnnnnnnnnnnnnnnnnnnnnnnnnnnnnnnnnnnnnnnnnnnnnnnnnnnnnnnnnnnnnnnnnnnnnnnnnnnnnnnnnnnnnnnnnnnnnnnnnnnnnnnnnnnnnnnnnnnnnnnnnnnnnnnnnnnnncaggagatgacgtgacacggaggtggactgcatgagcgagatccacacgc

SEQ ID NO: 417257 - DNA, 657 bp, Homo Sapiens
  misc_feature (157)..(481): n is a, c, g, or t
ggttactgacgtgtcctcaccagcttactgacgcgtccccaccctccggtcttgctcctggggtcactttggccttcgctgtgaatgggtcaggcttgaggccatgccaagagccagggaagccagcactggccgtcagctcacacacagcctctgnnnnnnnnnnnnnnnnnnnnnnnnnnnnnnnnnnnnnnnnnnnnnnnnnnnnnnnnnnnnnnnnnnnnnnnnnnnnnnnnnnnnnnnnnnnnnnnnnnnnnnnnnnnnnnnnnnnnnnnnnnnnnnnnnnnnnnnnnnnnnnnnnnnnnnnnnnnnnnnnnnnnnnnnnnnnnnnnnnnnnnnnnnnnnnnnnnnnnnnnnnnnnnnnnnnnnnnnnnnnnnnnnnnnnnnnnnnnnnnnnnnnnnnnnnnnnnnnnnnnnnnnnnnnnnnnnnnnnnnnnnnnnnnnnnnnnnnnnnnnnnnnnnnnnnnnnnnnnnnnnnnnngtaaggtcggtcggtccttcttccgtctgccccccaaatgcctggtaactaacgcgaacccctccaatcccgggtaattttgtgttgttgcggaaaaaggggtatacctttattgtccataattcaagacactgctagctatttgaagagccgcattaagataaattcaaaattgg

SEQ ID NO: 417258 - DNA, 150 bp, Homo Sapiens
ggaggccggcactcagctggcggcccgtctcatcagggcctttgtcctgttctgcacggcaggcagcagcaattccctggcaccgcgtggagctgtacaggctcgtgctgtgctgagaggcctccccgtcccctgcccacgtcccccacc

SEQ ID NO: 417259 - DNA, 638 bp, Homo Sapiens
  misc_feature (198)..(206): n is a, c, g, or t
ggatagtaatatggaatctgagagctaaaagcttggacacccactggtcagactgccccatcattttacagacaggcacagagagccgaggtcatgtatatagtttggaggctctagtctagggccctttccagtagaccacactgcttttctgcaagacgcccctgacgaatgcgtaaatacaaccacagtgtcacnnnnnnnnnaaaccttgtttatgcctttagagagtgtataatggtttgggagaagtcttttccccaaaaaaatgaaggtgtaagtcatcagttcataccagctctgattttctctcactgatttcttgacatctagtccaggctgttcccaaggatccatttcaaagttgactaaactggacccggttttctcaactctagcactgttgacatttggggtcagctaatttttgttgtggggactgtcctctgcattgtaggatatttaacagcatgcctcagcagcatcccctcgtgagattctacccatcaccaccctgagtcatgacaatcaaaacgtgtctccagacattgccacacctcctttacagacaaaatcgtcctgtgttgagaacactgccctagacatgagactaggcttctcaactggaggctgctttc

SEQ ID NO: 417260 - DNA, 451 bp, Homo Sapiens
  misc_feature (64)..(78): n is a, c, g, or t
  misc_feature (80)..(366): n is a, c, g, or t
ccacagtgattgtgatacctttcacttgaatacttgaataatgatttaaacactttatctttcnnnnnnnnnnnnnnngnnnnnnnnnnnnnnnnnnnnnnnnnnnnnnnnnnnnnnnnnnnnnnnnnnnnnnnnnnnnnnnnnnnnnnnnnnnnnnnnnnnnnnnnnnnnnnnnnnnnnnnnnnnnnnnnnnnnnnnnnnnnnnnnnnnnnnnnnnnnnnnnnnnnnnnnnnnnnnnnnnnnnnnnnnnnnnnnnnnnnnnnnnnnnnnnnnnnnnnnnnnnnnnnnnnnnnnnnnnnnnnnnnnnnnnnnnnnnnnnnnnnnnnnnnnnnnnnnnnnnnnnnnnnnnnnnnnnnnnnnnnnnnnaaacactttatcttcttaatctcatttgttcctgaatattctaagtgtaggcaacataatttttatcctcctcacttctcagatg

SEQ ID NO: 417261 - DNA, 100 bp, Homo Sapiens
cccacacttataaaaaacttttattggaaaataaaacctataaaaagcatcaataatcataccacccagtaataatcactcttaaattttggtttattgc

SEQ ID NO: 417262 - DNA, 681 bp, Homo Sapiens
  misc_feature (522)..(522): n is a, c, g, or t
  misc_feature (555)..(555): n is a, c, g, or t
  misc_feature (651)..(651): n is a, c, g, or t
ggaattaaagcagcaagaaaaaaaacaggaaaacccagaaatttaaactttggatatatctttttactaatcataaatgtacagatataattaaatatataataccatatattgtgaaacaatgaccaaaatgactctatgaaacataattcctaatggactactctattttccttttattaagacggacctaatagaattggataacccaatggacaaagtagttagtacctatatttaagtacagttttagattctgttaccaggatgttctcaacagcatacaagaaaattatggtcatatctggtaagttctcagtggatatgctggacaccattaaaatttgtaagacagtattttgtacaggactactgagtacttatttgcagtttggatgactctacagagcatgttcaatacgttgaatcagtctctaacaattatggaaggtttcctgagtggtgaactcaagatgccaccggagaaaaagaagaaacagaaaacagcttagctcctgcttncagaaactcaatcagtagtgaaaaataacaaanttgcatatataaaggaaataaagtaataaacataaaattgagagcaagtttatacattgccaaaatagcattgaagcagcatgaagtcaagcctanggtttctctacaacagatattcttagtcag

SEQ ID NO: 417263 - DNA, 692 bp, Homo Sapiens
  misc_feature (523)..(523): n is a, c, g, or t
  misc_feature (563)..(563): n is a, c, g, or t
  misc_feature (582)..(582): n is a, c, g, or t
agagggggtgattagaacacctactccattccattatccagattgctacatacaccatgaccatttctcacttaccttttattttcaggcagatctaacaatatagatgagcaaatccctggattatgtgcattagaattagaaatccagtctcattttcaaagtttcttaccagatgcttattacctaccttgcaggattaaatgagatcaagggtatgaaaagtttttgagaacagtaaagtggatgcaaattaaagtggcatgattattcttcggaaggatcagtgtgtcagatatactcaacaaggttggggtgaaatggggctgctgaagagggcagacccagcaggtgcacctggcacctgagcaacagagtggactagtgggctagaggagctagaaggacttcagacagcatctaactcggcttgtctcagacttggtgttctcaggacccctctacacttttaataattattgagaacctaaaagggcttttgtttatgtgggttatatctatncatatttaccgtattggaaattaactgaaacattgttaangattcattaaaaaagatanactcactacatgtatcataatatatttttacaaaatatttccaaaccaacagtctatggaaatgaatgttccatttgcagttgtctactgtacaaaacctccactgtcgc

SEQ ID NO: 417264 - DNA, 687 bp, Homo Sapiens
  misc_feature (415)..(415): n is a, c, g, or t
  misc_feature (515)..(515): n is a, c, g, or t
  misc_feature (519)..(519): n is a, c, g, or t
ggatggttctggagattgggaagtccaagagcctgacattggaatttgctcaacatctggtgagggccttcttgctgcctcaaattgtgatagaagggtggaagggcaaaaagtgcatttcaactcaggtccctcctcttcttataaagccttgggtcccatcatggggtctactccatcaacatatgaatttgaggattaatttttcaacatatgaaacttggggaacatactcaaactatagttgtttctaccattttatcttataacatatttcttgtttaatcattctccaaagccagtcagcagtattcaatgcccgtacataattttactacagatataccatgccttttatcattttcctgctttatatgagaaatagtgtattggtcatcttgtttttataacttanacatggaaaaatcaattatattagatctttatcttaattgtttttagtgatcagtttcataagatatacttttagttctcattgatttttataatatccntcanaatagctatttgaattgagaatgaaaacttttctcacagaagtgtatctgatttgctgactggttgacagtgagactggcctgcaatgagtttatacagatatttcatatgactaatcgcactccatagtgcatcattaaacagatagatcagcattacaaagctgtt

SEQ ID NO: 417265 - DNA, 631 bp, Homo Sapiens
  misc_feature (86)..(182): n is a, c, g, or t
  misc_feature (190)..(204): n is a, c, g, or t
  misc_feature (423)..(431): n is a, c, g, or t
ctgaagaggatccctgagataacatacatcactttgggcccagcgaggggcatagggagagctcaataaatagaagctggaactcnnnnnnnnnnnnnnnnnnnnnnnnnnnnnnnnnnnnnnnnnnnnnnnnnnnnnnnnnnnnnnnnnnnnnnnnnnnnnnnnnnnnnnnnnnnnnnnnngttgtggnnnnnnnnnnnnnnngaaatcttttgaaatcctttttttggcccccggggccattcagaaaaataaaatgggccagactgtttcccagagaaatccgggacataaaatggcattgaatccccaccaataaaaacccccggggggaatccaagcgtgctaaaaatctcctaagggcttccaaggccaataatggtattattgaagggattcctaaaaattctcgttaaaagtaannnnnnnnnaacggctttatgaattggattggaattccataacaattccgcctactgggaacctcaaaagcgctggtgaaccgaagcccagaaggttccccctggccctttggatataattgccaaggaaacaagggggaaaaatgccaatgatcctataacctacggagagccccctgggggtgaacaaaattttataacttagaaag

SEQ ID NO: 417266 - DNA, 295 bp, Homo Sapiens
ggtcacattaacaaacagttataggatacctactctctgcagatccttgtgctagatgtcagggctctaaaccaatataagatctataagaccgtattgtaacctcagatatataaatatgaatgatagtatatgctaattgccaaacagatgctgcagactgtatgtactagagaagttcggaggaaggaagttaaaagagctcagtggactgaagtagcaaggggaatgcttaatggaaaagcctctagaccatgcgcctgaactgggccttagagggtagaaaatggatttg

SEQ ID NO: 417267 - DNA, 542 bp, Homo Sapiens
  misc_feature (513)..(513): n is a, c, g, or t
  misc_feature (516)..(516): n is a, c, g, or t
ctaaaaaagtctcttaaaagaaagcaaggtaattttgttgttgatactgaatgtaaggtacagtatcacaatattatttaataattatgactgctagctaaaagaagatggaaaatgtttaaaacactaacccagaggtttctggttcaggtaatagattaagtaccataatttgaaagaaattcattgggtcctgaggcaggtttctggtttgggtggatcctgagaaagaagtagaatagatcttggggtccttcaaaataatacagaggaaaattaaaaggatagggtgttgcactcatgggtacaaaaggctaaagcactttgacttcagagtaaacccctctttattttgtcaaatggtagccttgtctgcctgttggtctgttcccaggccacctatcttacagggaactctgcctgtttgacagtgtcatgcctttctatgaagcctaccctctttctcaaaggatttgtagggaacaggacacccaactgcgatgcactcaccangangaaaagatagatggaaagacaatcag

SEQ ID NO: 417268 - DNA, 677 bp, Homo Sapiens
  misc_feature (182)..(212): n is a, c, g, or t
  misc_feature (236)..(479): n is a, c, g, or t
ggccttcagattaatccatgttgtcataaatgacaggatttccttctttttaaggctgaatggtattccattgtatatatatgcattttctttatccattcagccgttgatactgaggttgattccattatgctaatgcttaatgtttttattcctaactccccaaacttgttaataactcnnnnnnnnnnnnnnnnnnnnnnnnnnnnnnngagacagagttttgctcttattcnnnnnnnnnnnnnnnnnnnnnnnnnnnnnnnnnnnnnnnnnnnnnnnnnnnnnnnnnnnnnnnnnnnnnnnnnnnnnnnnnnnnnnnnnnnnnnnnnnnnnnnnnnnnnnnnnnnnnnnnnnnnnnnnnnnnnnnnnnnnnnnnnnnnnnnnnnnnnnnnnnnnnnnnnnnnnnnnnnnnnnnnnnnnnnnnnnnnnnnnnnnnnnnnnnnnnnnnnnnnnnnnnnnnnnnnnnnnnnnnnnnntgagctaccccccctggccgatactcttaatgttaataaaagtttctttacttggtaattggattggctactcttttaattggaaatgattttgtttaaacaaccatgttagtaattcaaaatcattctacggccgggaggggggtcccagcctttgctccctgcttttcaaacgccaccacaaagctcctttaaaca

SEQ ID NO: 417269 - DNA, 661 bp, Homo Sapiens
  misc_feature (567)..(567): n is a, c, g, or t
  misc_feature (585)..(585): n is a, c, g, or t
ggagcttgtcactggagagtcctaaagaagctgtctcctctgtgtctgattctgggaagctggtccttgccagtgtcaactatcctacatgagacagagagaaagtcacatttaagaccaattcatggcataatgatcctactgagaagggccctggtagccaagccagtaccctaagaccagcctgctacatcgaagcaagcctggaaacacagccaagttcaaggttgctcccccaagagagtcctttctccattggccaaaccacaagggtgagagaggctctgttccaccagaaagcattcttggttaaaagcttaagaactaatctggctaacttaagtaaaagggacttactgaaagactgtcagggaactgacagagtagaagggagctgacgaatcaggcttgagaacagttaggagccaagagacaaagaggaagtccccaaaaaccacaataacagtctctgagcagaaaaagttcagcttgcctatcccatgacctctggtggtactacagccatctctgtttctccgcctttctcacacaaattctcccatgcanggaagagcatttggtggntgagtctagtccatgcacatccctgagcagcaggtgagagagatggatgtgctctagatttctactatacccacca

SEQ ID NO: 417270 - DNA, 631 bp, Homo Sapiens
ggatagagggactggcttcaggggactaaccaggtttgtttgtattaatagcagggagttagtgcatttgggcacagatgcaagtgggctggtaaatgggataatgggagtatgctttttctgattgatttttagtaaactatgaaaggagttcatcagttaagagtgagtataggggaagagtattggaggttttggaaggaagaaagcatgaatgagtcatatagccatccggcaggaagagtgagaacaaaaatgtcggagacaccaaaaatataggagacatgctagggggcataaaggaattatttgagtttttatgattatgagtttaaagaaatttgttttcttcagtcaccttcagctgcttaaacagggtggcaagttagattggaacagggttggggtataaccaggtgaatataatgaaagcaagagatgtggagtcaagggcaactgcagtgtgttaactataatgtttggtcatggaatctaagctgggtgtagaggaaagtgaggatttttagggaaggaggaacaatgaagcatattagaggcagaggattgagattcagctgggatactcagttagtgagtcagaagcataacgtagaaattaggagtgggttgg

SEQ ID NO: 417271 - DNA, 602 bp, Homo Sapiens
ggcagagcaggggagccctccacgcagccacggagccagtctgagggaagaggtacataggatagaaaaatctctaggctccaacgcttctgcttcggtgtctttccatttcccagggtctatgtgttgccttctcttcattttccagcaaaattccttttgagatatgttggccttcactcggctgaactagggggtgaaggaaggttgtcctctgtgggccactattgctggggaaacagctaaaccctgcaggccaagtggaacttggaggtgccaagaaaacctagaaggtgcaatggggctgcgacggatagaggtgtcaaaccagaagggaggaacccgtcggaggtgggctgtgaccaccggaccttttcataagtggtggcagtggtagaattgagggggcaagtaggcttggagaatgtttttagccaggggctgttgagagatggcagaagggggtcttaatgtggggactgtggacagtggggcattcgtgggaaccagagggattttggacaagtccagatggaatgtgcagggcataggtagagggaaaagaaaatccctttctgggaaaacatttcttgtttattgaa

SEQ ID NO: 417272 - DNA, 252 bp, Homo Sapiens
taggggtttaagctgtaaaataaccttttcttatcatgttctcattgctcgtacttgttattttgtatgttacaccttcctgcttatataatgtaaccttttctttatattaaatattttacacaaatttttgtttagttctagctttataatcctatatcttattctttacatattctcgttacaactttcttatactttcttttacatatctaatttatacaactactcaccttttttatataacagttc

SEQ ID NO: 417273 - DNA, 624 bp, Homo Sapiens
  misc_feature (129)..(224): n is a, c, g, or t
  misc_feature (236)..(467): n is a, c, g, or t
ggactttttctccttccatccaaattggtcagacctatattggtctgtcctgggatcccatgacactgactctgagcttgcaaattgttctctacttttttctgccagcatattgggtaattaatgccnnnnnnnnnnnnnnnnnnnnnnnnnnnnnnnnnnnnnnnnnnnnnnnnnnnnnnnnnnnnnnnnnnnnnnnnnnnnnnnnnnnnnnnnnnnnnnnntgacagagtttnnnnnnnnnnnnnnnnnnnnnnnnnnnnnnnnnnnnnnnnnnnnnnnnnnnnnnnnnnnnnnnnnnnnnnnnnnnnnnnnnnnnnnnnnnnnnnnnnnnnnnnnnnnnnnnnnnnnnnnnnnnnnnnnnnnnnnnnnnnnnnnnnnnnnnnnnnnnnnnnnnnnnnnnnnnnnnnnnnnnnnnnnnnnnnnnnnnnnnnnnnnnnnnnnnnnnnnnnnnnnnnnnnnnnnnnaccttctttccaactttcattgttgttgtcaggatttaccaagcattaggtagagcctccttcctataaagatgagataacccatccaaacacaggagcaagccagctgcattgccagagccagggctcccagaacacaaattccagagtagcttgc

SEQ ID NO: 417274 - DNA, 622 bp, Homo Sapiens
ggactgtgaaaaaactagactacctcttcagaagcaaaggagcagcataaaatgaacatgaacactgccatggataaatttgctggtatgcaccatttcctaggcctagaagatagcgacattggtctaatatgttgcctttttaaaagagttcctgtcgagttggaatagcttgtagtcacaaaacattacagttggtgactgaagaacaaggatttaaatcagctctagctggctccaaaggttatgttctttccttagaaccaaacagagtttgacttctttgagaattatctagcttcttctcctagcattttactttttttgttactttggtcacttggaggagaaatgtgacccgctggtgttggttgtcaagacacacacttaatgacactgagtgggtagcctgtcctgggtgcagttgaagctccacagccagtggtggcacaagagtgacagtactgtcacctccaggctgttcttgacctcacttggcatattgatcttcagccctgatccaattatgtagcagggtgacattagtatttgtcaccactcagctgctttcattgctcctccctaaaaagattttgaggactcaaagtctccaaatagagag

SEQ ID NO: 417275 - DNA, 578 bp, Homo Sapiens
  misc_feature (379)..(423): n is a, c, g, or t
  misc_feature (458)..(458): n is a, c, g, or t
  misc_feature (543)..(543): n is a, c, g, or t
gtgtgagcatccagccagaaaatgatttgctttctagacccatatcacctctctccatctacatctctagtatttaaattcaacacaattctagatagctgaaacagcccaaaatatgtgtttagaatacttagagtttgttataaataaccctctgtttagaatttgcccagtgaaattctctaataatacttaaaactctttactaaagttgaattttccttttttttcattgaaatagcaaaggtagtaatctgtattggtcaaagaaacgagataattcctagatctctgttttagaccagtagacctaactgtgctttcttaacttggatgttacatgaaacttaaaaacaaacaaatatgtgttacaagtacnnnnnnnnnnnnnnnnnnnnnnnnnnnnnnnnnnnnnnnnnnnnngaacttttgtacctttgcataaagaaggttatttnaacaagtggtacaaacagtgaactacttaatccttctatggtatcatacacttcttttcctggtagggtatgagactggcagaangtagagtatataatgtgctcagcttgtcttgattt

SEQ ID NO: 417276 - DNA, 649 bp, Homo Sapiens
  misc_feature (519)..(519): n is a, c, g, or t
  misc_feature (593)..(593): n is a, c, g, or t
ctatcttagcagaagcccagtcttcgaaggaagcattgttaattatagctaatgattatgtgcagtcagcctgacatctagccacagtaaactcctgttttcttgggatccaaacaccctgtgttttaccattagttttgttagtattgttaactttctttacacaagtaaaccatttccactaccaaaggtttagaaactatggatgaacaaaatgaatctccctgttcattttgagcctacatagacatagagaccaaatatgtcaaaaccttattcaaataaactctcttcagagtgaatacccagggtcaggacagactcagcaaaccttctatatcacttaattctgcccagtgaaaatcagtgaccctgaggcactgccagattctaaagtgcctttgggatcatcagagactgtctataaataatgcaaaatcttgatctggatgtcagtgtatcaaatcttatcaaacccattgacaaatcagtggtgctatactggaaatggctactccnttggatgaaggacctcatttcccagttgctttggacaaaagagaatttacatattgctgtaagaaagagagacngcagttgtggtagacaacagataagggtgccaaaaatatctgtctgataaagtcca

SEQ ID NO: 417277 - DNA, 452 bp, Homo Sapiens
ggagagtctttcagccatagagggtcctgtcatccattgaagggatcagtccattgggattttgccagttttagcattgatgctgtgtcctgggaaacccctgaatacttatcatagcagaagttcagccactgtagccctacctcaggaccgcttttatgggaaagaataattcctttaactgcttgagccatttgagttgtggctgcttttggtacttgtaataaattgaaagcatcttgaatgttctgggacagtaaaagaatgtgcctttgtttctgacagcaattataaaatcaattatatgtttatattctaaaaaatgttttgagtaatgctgacatcattggaaaagtgcatcacttagaaaatgtatctgtgtgtcaattttgtttgttcaaaatcagtttcattaatttgtgggaagatacaccttgtacattttacctaat

SEQ ID NO: 417278 - DNA, 578 bp, Homo Sapiens
gatgtagggtttgaaatcaacagacctgagcttctgtattgtgtgtacaattaatgcagagggtggaaggtagagagacggctgtcaagagcaccaggagcaccagatcgcaataacatgaatgagaagataccgtattaccagagtagatttacaccggtagcaatgataaaaatgtaagatagataatagaattaatataacgcgacaagaataatactacgggctaacgaccgcacataagaatcatatacacagccaccaaaataatatgaaaagaaaacgaaggtatcttaaaaacttagaacacattgtagaatccgtagtgctctctatacaagattacttgtagacagacaacaaagatagagtaaaaatggatctaacatttgttagatcgatcgatacggcgaaccagaaaattaaaatataacataaatatcttcaatatacactacagataaaagaaattaataaaaatcatcaatagcaactaattaataaattagaaagctaccacaccggtataaaaacagatatataatcagatacttgtacagaaacaccatagtatgata

SEQ ID NO: 417279 - DNA, 368 bp, Homo Sapiens
ggtcctcctggagggttcatggtctcactgacttcgggagtgaagccgcaaacctttgcagtgagtgttacagctcttaaagctggtgcatccagagttgtttgttcctccaggtgggttcatggtctcactgacttcaggaatgaagccgcagacccttgtggtgggtgttacagctcataaaggtagcacagacacaaagagtgagcagcagcaagatttattgtgaagagcgaaagaacacatcttccacagcatggaaggggacgagcaagttgccgctgctggctggggtggctgctggctggggtggctagctcttattccgttatttgaccccgcacacatcctgctgattagtccatttt

SEQ ID NO: 417280 - DNA, 595 bp, Homo Sapiens
ggaaacctcttccttaccagacacccagttttgcacaaaaacttaatcaattacagttgagattagagctgcaaagaagctgctcacgggactgtggcgatactaccgttatctctgaagacactcctgaaccattctctggagaggaaggtctgggcttgctgggatgtgtgctcatcctgcaggtatttcaggactagagactcccccgtaatactttcttccccctcttctcttaagtaaaagtattaaagaattaaccctcttcattctttgatatacatgacaactactactgtgtctgaataagtgaattaactttatattataaaactagggttctcaaaacaccagcaaagggagaagagaggggctgcttgatgcctgtgtgttactaaagtcccaagaaggtgatgccctgggccagaaagggcttcattatctactttgagcctgccagttattttgggtgtgcaaatggagctgacctgtaattgcccctcaaacaggaacaggagctgagagtgcaaccacaagcaatgatcctcagtcctggctgggcaggaggttccctgaggggtgcttataaaattga

SEQ ID NO: 417281 - DNA, 613 bp, Homo Sapiens
  misc_feature (295)..(533): n is a, c, g, or t
  misc_feature (577)..(577): n is a, c, g, or t
  misc_feature (587)..(587): n is a, c, g, or t
aatctttagggttttctacatatgaaatcatgtcatcttcaaaccagaggtaaggttacttcttcctatccattgtagatgccttttatttctttttcttgcctcattgttctggctaggacttctaggactatgttgaacagaagtgatgaaagcaagcacccttgccttgttcccgatcttagaggaaaaactttatctttcgccattgagtgtgatgttagctgtgggcttctcatatatggcctttatcaggttgacatcacttccttccttttttgtttttgagacagannnnnnnnnnnnnnnnnnnnnnnnnnnnnnnnnnnnnnnnnnnnnnnnnnnnnnnnnnnnnnnnnnnnnnnnnnnnnnnnnnnnnnnnnnnnnnnnnnnnnnnnnnnnnnnnnnnnnnnnnnnnnnnnnnnnnnnnnnnnnnnnnnnnnnnnnnnnnnnnnnnnnnnnnnnnnnnnnnnnnnnnnnnnnnnnnnnnnnnnnnnnnnnnnnnnnnnnnnnnnnnnnnnnnnnnnnnnnnntgcccagatacaggcatgagcactgtgcctggcatttcttctgntctagtttangcacactcttgccttcctttttcgtg

SEQ ID NO: 417282 - DNA, 616 bp, Homo Sapiens
ggagctaagggatgtcgatatgaattggttgcattttactgcaagttagggatgagtttctaaaaattttatgatttaaaacttgcataatttaaagaataattctgtcaagaatggccgaagtggtgccatggtggtggtagggtaagcgttgtttgtaatttaccttccagcttttaaattatgagattcttgatgagtatttaatgaggaatcccgttatttaagatgtgtgcatatggtgagactttattattaataataacttttatattgtacgatcagatttgtataaaatatcctgcttgttttgagtttctgtaagtgccacaaccaaacatcatcaggtgcccgaaaatatattaaggaggctgaagggagatttcgtagtgttgaggaagaaaggttgggttgagaatcacaacatgtaagttttaatcttggatgccatttgggctgttgtagaccactgaatgtctggttatgccttcctttaaaatttttcaggctaaaattttatgaatcagaattttgggggcttggtagtgattcccctggtctccaggtggaggtggaatagccttctttgcatttaggcgtccatcattactagatc

SEQ ID NO: 417283 - DNA, 628 bp, Homo Sapiens
ggataacatttttgtgcattctggtaacaaatttctgaatgtattcaaaaacattaccagcaaaagttcacataacttgcaagaacaacaatacctctcaatttttctttaaaataactccaaattaatatttacagatattgtaaaacctacaatttgggccttttaatagctgaaaaaaaatcttaatgttaaaatttaatttgtatgttttgtaaaaataatttatatttttctgagctaaataagattctcattttaacctgattgtcatggaattgcccactctctttctccatccataaaataacattgtaaatactcacttaaccaaaatatttcctgtgaagttaaaatgaggtcacacttacgaaagtactcagaagaaatccaagcggttggaatcatttttcaaataacattggcatcttctgggaacttctcagttaatttgatcaaactgatccactggggacaaaatgtatggagaaggcatgtcattttattacagtccaatcattgttatatacttataggaataacagaagcaaaacttgagatggtaaaatgaattgtcagagacgttcaaaagtcagtgtatcaagagtggtaaatgaagctaccctgc

SEQ ID NO: 417284 - DNA, 647 bp, Homo Sapiens
  misc_feature (255)..(264): n is a, c, g, or t
  misc_feature (601)..(602): n is a, c, g, or t
ggagttccagctctctgctgaaatcaccaatctgaccttgcgtggcatccatcttgtccattagtgtcttgaacatactaattatagtccttttaaattccctatgagatagttccaacatctgtgtcataattagctggttctgttgattctttgtctcttggaagtatgttgttttttccttgccttccgtatatctcttgtttgttgaaaactggacaccttatgtatgatagtagagaccaagagaaatannnnnnnnnngcctggaattttttgtactttccccctgctacggctttagtgtgggaagtggaattcatttttctagcctggagttgagctgtggttgagatttttttattgcgatggttaccttccatgtaccacaggcttcaagttttcctagcagtcctcgtgtgtagggtggaacagatctgcagaaggtgattcttagtgtcttctctaccttcagctctaggtctttcttttgttttgcaccttagagagggtctgtctttatactctcacagttcttccagccatattccactgtcactggtccttcggtgccttttcgccctgttgggagggagcaggnnagttagcaggactccatagttgtttaagctcagtcaggcagacct

SEQ ID NO: 417285 - DNA, 592 bp, Homo Sapiens
ggatagttctcttctgatcttggttatttcctttcttctgctgggtttgggtttgtattcttcctgtttctgtagttccttgaggtgtgactatagagtgtcagttagtgctctttcagtctttttgatgtaggtgtttagggctatgaactttccccttagcactgcctctgctgtatctcagaggttttgataggttgtatcattattgtcattcatttgaaagaattttttgatttccatcttgatttcttttttgacccaatgatcattcaggagcaggttaatttccctgtatttgcatgattttgaaggttcgttttgcagttgatttagttttattccactgtggtctgagagagtgcctgatataatttcaattttctttaatttattcaggctcattttatggcttatcatctggtctctcttagagaaagttccatgcactgttgaatagaatgtgtattctgtggttgtgggatgaaatgttctgaatatatctgtttagtccatttgttccaaggtatagtttaaatccattgtgtctttgttgaacttctgtcttgatgacctgtctagttctgtcagt

SEQ ID NO: 417286 - DNA, 415 bp, Homo Sapiens
  misc_feature (190)..(245): n is a, c, g, or t
tttttaaaacataaggaatcttatttaataatcatcatgggcattcttggaagccctctgcaagatcctgtttcaagttctgcaagtttggggtccaacctgtgtgaaccttgtttccctatgagtacattatttatgtttgtgaaagcttgacagctccaagaacactaatacttaatcgttggttttnnnnnnnnnnnnnnnnnnnnnnnnnnnnnnnnnnnnnnnnnnnnnnnnnnnnnnnnagtgaaatgtcttttgcactctgttatttcgagtttgttgatttttagcaacatctgggtcatcccttttcttcttctctggcaggctgcccctagggattccctgttcagccagtttgatgagagccctagaaacccatcagataccaaaataatggctatatctgctg

SEQ ID NO: 417287 - DNA, 666 bp, Homo Sapiens
ggacattcttctgacaagcttttaaactaataactatttattttttattttcccttcatacttgaaaaagaaaaaggtaaatgagccaaggattttatgttattgtaaagaggattttatttaacgttgcattcaatcctttttagaattgttcttagtcctgggcttcctagaaaagagagcttgaggcaaagattaaaatgctgacacttcctttgcaaggtgcaaacccagggcagcaaaagtgaggaaaaaacatagggggttcaaagaaagacgcaaagcaataaaaagtgacccatgactgtgctggctacagcttcatgatgagctgcaagatgacacagaaggtgacccagcaaggttgtcactcagtatgtgggacacttatggactctccatgtcaaggacagttgcttcaaagcagcccataggagggaggaatcaggggcattcttttgttcaggcttatctcagcccttatgattttctttggggcaaaattggccacatggaaagccaactctcccacacttccagcttgagtcatccaagtcctttggaggctggcttggatgctaattcacgccttcagtgcagtgattcctcaagtcagaactgtggaagagctggaactcaggcatgcgcctggctgcacttcaggca

SEQ ID NO: 417288 - DNA, 600 bp, Homo Sapiens
ggacctcagagatactacaggttaggtttcagaccacatcaaaaaagcaactattgcaaatagagtgagtcacatctagtttttggtttcccagtgcctataaaacttgtgtttatactacagtcttaaatttctaaaaaatgtacataccttaagaatactttattgctaaaaaatgctaacaatcatctgagccttcagcgagtcataatctttttgctggtggagggtcttgatactgctggctgttgactaaggtggttactgaaggttggggtggctgtggcagttccttaaaataagatagcgatgaagttttccaaatcaattgacttcctttcacaaatgagatctctgtaacatgtaatactatttaatagcattttacccacagtagaacttctttcaaaatttagagtctgtcatctcaaatcctgatgctcctttatgaactaagtttatagaatattctaaatcctttgttgtcatttcaactatgtttacagcatcttcactgtggaaatgactgtctccagaaaccactttctatacacattcttaagcaacttctcatctattaaagtttgatcatgagattac

SEQ ID NO: 417289 - DNA, 273 bp, Homo Sapiens
ggaaaccagctagtgttacagactctaaagtagaggcataatcttctagatcagaatctggattggaagtgggataaagaaatcttgaccccaaatctttggattcctatttggctcattaacgtttaaaaaagaataaagcctttaaggaaaacaatctattgttcctggcctgagatactacctggttcttttgtttaattataattgaaaacaccaagttttactttattttgtgaaatcaagtaaatacatggcctttaaatataagat

SEQ ID NO: 417290 - DNA, 427 bp, Homo Sapiens
  misc_feature (199)..(224): n is a, c, g, or t
  misc_feature (330)..(361): n is a, c, g, or t
ggattagtaaaatgtaaatgccaattttctatttttcttctccccatcctgatacccatatcagtgtgatcttaaggtgcctgttttccttagtcaccttttagaacccaaagtttatgtcttttttaaattaatatcacacacaaaatgatatcatttcagtgatggtattaggcagtttatctagaaaaccaaggannnnnnnnnnnnnnnnnnnnnnnnnnaaatagaggggttcagtttggtcttaaattggattcaaacaatccactcaccttggccttcctaagtgtcggcattactagcttgagccactgcccccatcctggnnnnnnnnnnnnnnnnnnnnnnnnnnnnnnnnaatttaatgacattatgttattggacttcttctgactttgctaagacaatgaaggctatgcaaaat

SEQ ID NO: 417291 - DNA, 653 bp, Homo Sapiens
  misc_feature (520)..(603): n is a, c, g, or t
cggccgcggtgacagtgagtgcctgtggacattctcaatcaaaaacgttttatagtagcttcagtaggtctgaaatttcaaagtattgagcaaggcctacactgagctagagcatgatctaataagattggactgtcaaaacaagaagcaccagtctgtggtcaaaaggtttttaagaaggaaatgttaaagctctgctgtgagaaactcaagatcatgaaacatgtaagctggaaggctgtttctttctcatttcgactatgatggggggaccctcatcctatgtaaacagagacactgaagcataattaggtgtgattaaacagaaacaacatatggtatctttctattgggaaactaatcgtttgagtaactggcaggatgaaacatcatataatacttgacacattttgctagagtcctaaagggcacctaggaagactgactccaaaatgtcgtaatacggaagatacttaacttacactatagtcagacagaagggagttccattcccagcccnnnnnnnnnnnnnnnnnnnnnnnnnnnnnnnnnnnnnnnnnnnnnnnnnnnnnnnnnnnnnnnnnnnnnnnnnnnnnnnnnnnngaacaatatgcgaattgtctggaaattccaagaagaattgattgcagaat

SEQ ID NO: 417292 - DNA, 255 bp, Homo Sapiens
gatttctcaacagctgcaatgattttatatatcacgtgtaatcgaattatgcattgttgccataccaaagtgatgtgcaggggggaaaataaatcagggagggaaataaattagaggcccctctcccatctgcagcctctgcattcccatagcggtcaggctggggagtgtctgttgcaaggtgaaaatgctggggagagcagagctataggctctgtcctcagctgactttctatgttgagttcaaagggaagc

SEQ ID NO: 417293 - DNA, 669 bp, Homo Sapiens
  misc_feature (43)..(427): n is a, c, g, or t
  misc_feature (606)..(606): n is a, c, g, or t
  misc_feature (610)..(610): n is a, c, g, or t
ggtgggcaggagatgcatgctggcaaccccaatgacagagctnnnnnnnnnnnnnnnnnnnnnnnnnnnnnnnnnnnnnnnnnnnnnnnnnnnnnnnnnnnnnnnnnnnnnnnnnnnnnnnnnnnnnnnnnnnnnnnnnnnnnnnnnnnnnnnnnnnnnnnnnnnnnnnnnnnnnnnnnnnnnnnnnnnnnnnnnnnnnnnnnnnnnnnnnnnnnnnnnnnnnnnnnnnnnnnnnnnnnnnnnnnnnnnnnnnnnnnnnnnnnnnnnnnnnnnnnnnnnnnnnnnnnnnnnnnnnnnnnnnnnnnnnnnnnnnnnnnnnnnnnnnnnnnnnnnnnnnnnnnnnnnnnnnnnnnnnnnnnnnnnnnnnnnnnnnnnnnnnnnnnnnnnnnnnnnnnnnnnnnnnnnnnnnnnnnnnnnnnnnnnnnnnaagctaaaattcatacccaagaccagggcccccagcattctctccctaaccactacattgtactgcaaattgtcacttggcaatgcagatttcttcattcttaaaatggatacatgaataatgcatacctgcccggctgaacatgcacatcaaggagctttgtagggcatttccgtatngtangcatacatccatctctgctgactgcaccagaggcccgaacactccatcagtacagtgta

SEQ ID NO: 417294 - DNA, 453 bp, Homo Sapiens
ggaaaacaaagaaacaataaccaaaaatgctagagatagataccatatcacaggctctacagaacatgttacttttaaaatgttattctttatgatcagcatttagtttttattgctgttgggctatcatacttcttgttaaccaataatataggcataaattagatcaaaaatagcattagtatttctattagttaaaatttaggcgttctttttgttttaaaggcaaactataggaaaaatttggacatttctaatctaaaggtaacccctcatagaaataaatgcaggatgtataattattccccacaaaggtacaggtaagaacaaaccatatagttcaaaagctgctgtaaaatagcatttaaaaatcagaagccaagagcaaagcataggagaaagcctatccatatcagttacaacagtaaacataaataggatgaaaaaatatgt

SEQ ID NO: 417295 - DNA, 649 bp, Homo Sapiens
  misc_feature (495)..(535): n is a, c, g, or t
ggagctcccaccaaggaagacccagaggcattctcctcaccaaggcattaagaaatgcatgggtgaggggaacagcggcgtgcctgtaaaggtcctgtggcgcctctcctctacaggctggaggtcatggcgggagatgctgcatggatttgccctccctgctgtcagaacaacaggattctggaagagtctcagaggacaggccgtgggacttggctgtctagagacaaggcgggagggatttccttgagaggcagggacatgtggtggttactaatcattgtgaggtgtctgggatgtaatggatgggaaatctactaagaagtcaacttatgtaataattagaaaagctctagttctgaggacagagacctgttggagtcaccatagtggaaatttatgacctggtatccagttcagatacctggagcttcttgactggggggagattggatcccttggggaagagtgaagccttcaatgctgccacaagtnnnnnnnnnnnnnnnnnnnnnnnnnnnnnnnnnnnnnnnnncgtgagccccatgccggcctctttttatatttaaaatacattttattatatcaggcaaagagaaaacgtagatacctgtctaccataaacattgcaaatgaattttcagatata

SEQ ID NO: 417296 - DNA, 415 bp, Homo Sapiens
  misc_feature (322)..(334): n is a, c, g, or t
ggaaggaagatgtcttttgcgtaaaagtgaaggccaattacacgtcacaaatgtccacatttttacatatcacacttgttttcatctgtacgttaaaagaatccatgaatttcatcagaaatataaattttctagggcaccaatcatcaagtttgttagaattggtaaagtgttggttaataataaacatgtaaaagagaaaggaatgcttttctaaaagttgcccttgttctttttagagtaatgtgatttaattgccattcatcttctgattgtcttaaattgcgtattttgggagagaagttgaatcccttttctttcnnnnnnnnnnnnnaatttggctgaggcatatcgttgacccaagatttaaaggccaaattgggaagatatcattgcagtcaagagtcagtggccc

SEQ ID NO: 417297 - DNA, 110 bp, Homo Sapiens
ggtactttggaataatctggtttttgaggtaggagttagaaaatgttccatgggtaactcatttgtgcattttagaactacttgaaactctgtaccttcaaataaaaagt

SEQ ID NO: 417298 - DNA, 549 bp, Homo Sapiens
ggaagtcactagttttcccacccaagtcactgtcaaagaaccagatgggacacaacctcagaatggcagccatggcctctgatcacctagttcaacaaccccttccctcattttacaggatagaaatgcaaaactcgtgaaaagcagaaccttgaccaaaatgtgaacccagaattaaaagatccaccggctactgactcatttgctactcacagtacttgctctcagcctttggataaaactggtgatttagaacttcggatatggaggacccaaacacctgagccaagactcctcttcagaaagagccaagaccccacaatgctagatgggaccccaaggacaccgaacagttacaacaaacccaccagaactgcttaatacagttactacacaaacgacccctgttcccagctaggctctttcccaaccaagacaagaattgcaacccccattaaggaccctgcccgacaactcccttcttccgggaatggtgctaggccccagaagtcgctgataaaaattaacatgccaaactcaagtgcccaa

SEQ ID NO: 417299 - DNA, 497 bp, Homo Sapiens
ggatttcttttcagtgctgaataatattgcattgtctgcatgtaccatggtttatccatttgcccactgaaggatgtctaggttgcttccaagttttgggaattataaataaagctgctataaatatccctgtgcagtgttttgtgtggacataagttttggagatctgtatttttaacaagtgatccagagacagagttggggccactagaccagataatcatttgtccagaggctgagaggggacaggaagactctctagtccagaaattctagggttccatgactgttgtatgtagctcttggatcaggctctggtttggactaggtgttaactttcttctctctgggatccttcccatcccccaacagcaaaatcactcttttggccaaatgttcagtgtcgatgtctattgctagcatgaaattgcctaatataaagagcaagttttctcgggctggagggagagtgggctgaccagtttttccaagtccag

SEQ ID NO: 417300 - DNA, 625 bp, Homo Sapiens
  misc_feature (146)..(158): n is a, c, g, or t
ggcaataatcaatatttttaatagaactgtacattgttaactgcagagccagctagtgaattagaattacatttgctttcttgttttgtctttcctagaattaacaactgccttgtttttctatttgcttaattttctaagtatcnnnnnnnnnnnnnaacacattctcggacctgtcagatacccatcaatattcttttccaaatggccaaacataccagataaactttccactcccttcccacccgctctggtcctggtgttctaagggaaaggggagcagaagaccatggcagaataagcaatttgtacctaatcaatttccagccctgcatctcaccctggcccaccaccatgcccactgtttccatggccttaatttccatggttccatttttccagagaataatggaaaatttccattctcctgccttgactaggggttggcatctgactgctcagggtggggaagtttcctgaggctccaacttctaaccaattcctcactttcaatcctgtcttgtacctcacttcctccctacctgctgtctgcaagccttaagtctttgaaagtgttctacaggatgaattttggctgtattttctttgcactgattttggctat

SEQ ID NO: 417301 - DNA, 170 bp, Homo Sapiens
ggagttttaaataaatatatacattgtttatataataaaaacagtaaggctgccattgtggtgagaaacaattcatggagtgtctgctatgtgactagtctctgggaattaatgtagcgaatattcacctgagttcttccttttactttgaagacacattagtttgacga

SEQ ID NO: 417302 - DNA, 218 bp, Homo Sapiens
atgggtgacagtgcttcttggttaaatgtgagtttctgggacagtttgtgaatttctgtgatgtaatagattatagtgatgttggatacatagagcaaccgtgagtcacaaggagatggctgcagaccctgaagactctacggaggcttacacaagagacatgcggcttgagaacaaaggcttatagaaattaaaacacatattaagggtgtttctct

SEQ ID NO: 417303 - DNA, 548 bp, Homo Sapiens
  misc_feature (86)..(159): n is a, c, g, or t
gggaatagtctgtaatttgacctcttttattaaagagcctccaggacagtaattccctgtttaaagcttccctcttgatgagacannnnnnnnnnnnnnnnnnnnnnnnnnnnnnnnnnnnnnnnnnnnnnnnnnnnnnnnnnnnnnnnnnnnnnnnnnagaggattgtaggaagatggcagagtagcaagcaccaggaacttttctccttacctagacaataattgcacgggcagaatctgtctgatacaactattttggagttcaggagtctattgaaggcttgcaaatttcagggacagcttggacaataaagtacagttaatttcagtcagtttcaggccttagcacagtaacagcttctccattcttccctgccaaccaagcccatgacaagcagctgtgcatatgtttccccgaaaaacttgcacacagcttataggagccagggtgagcaaagaggaacctttcctccaaataatgggatccatgctgtggtcactgagtgctgcttctgatcacagaagtacagacaaagaggcaggtgg

SEQ ID NO: 417304 - DNA, 558 bp, Homo Sapiens
ggccctgtaataggaaagagacataattagaaaattatcttttgatcactcttgagattggcattgtgcccagcagtcattatctggaatttgcttgagcttggttccttctttctctgcacattctcagcattacttacatgctcctgttgttctgtgcctgacgtcttctccttgcagatgccactaggccaagttgctctaacagccattgcattagctatttagctttccaggcagatgccagtggtactgggcagaggagattgtgaggtcctgagtatctgtgttcttgctctttcctcagagagctcactccgtcatctagcagttctcacacttgaccagatgtcctgatactgattataatgaccccatctctgcttagggcatttcctcttcctgcctctgaggggcagaagagtgccccgcacaagccacaaactgggtgccccatgccaggagatgtccctctttgaggtggaatgatcacctcctaaatagatattaagatcctatggtagctgccctggatttgctttaaggagaaaagcatgc

SEQ ID NO: 417305 - DNA, 626 bp, Homo Sapiens
  misc_feature (565)..(565): n is a, c, g, or t
ctggatatttccactttatattgttctctttcaacattttgtaagaagtagtatttcctattctctgctgttacaaagactatgaaaatacatgcaactcatttaaagaaacaggtggatgtctggaagttttccctacctaacactttcacatataaaatttatgatgtttggtttctatggtatttaacattggcaagaaaaaataactcccaatgaagtaactaagaccacttgttctagttcttcctgtagtggaaagagatagagaagagtgatagtaacaaagtattctcattactctagaacagagattggcaaacatttttctgtaaagggccagatggtatatacttttggcttcgtgggccatagggtctctgttaaaactgctcaactctgtctttggggtgggaaagcagcagtagacactttgtaaatgaatgggaatggctgtgttccaataaaactttatttacaaagataggctgtgggcagcatttagcctgtgttctgtagtttgcccatccctgctctataaaaagagtaggaaactatgccccanggccaaatccagcctgaagccctgttttgtttggccacagagctagaatggttatgtgttt

SEQ ID NO: 417306 - DNA, 594 bp, Homo Sapiens
ggattacaatgaagcttcctatctgcaataggtagattgtaactgacagcatgtagtcattggaaggaggttaatcccagagcataagaggacttctgatttatttttgcttaaagggatacaatccaaggccacaaaggctgctataagacttttgttttgttggggataataaagagagctgtttctgccttttccactttcttcttataaacctgctgaagattgaaatgttaaaatgtgattcagagaagagatttctttattgtaaacatgatagagagctcagaatgaatgccggagatagactctttatagaggatttcagggtattaaactcttaagccccttatggtcaggttttactgccaacccttaacaccccaccatgcctgggctactgcaatagtaactggtctttctacctttaggttcgctgcagtctctcctgcctactgctatgatattaatatttataaagccttactttgacttttctcatgcattataaaaaatcctcgcaaaataccccatcatatacaaggaaagttccaagttttagcttgtcattctggacttgtattaggattctcc

SEQ ID NO: 417307 - DNA, 430 bp, Homo Sapiens
acataatatgtatacatattcacattcattttcatattctccagcctccgtttggtacactacaacagtgtgtgtagttgaactaacagctggttctgctgtcatgatggctagaacagcaaagtcagccagagaaaccagcctcaaatggtacatctttctgtaagcagatatatatgatctatagcagcacgtccagtgattgcctcacagatactacttctaacctatgggggaatttttgcatagaaatccaaatcccctcctacctctcctctcagtgcttgagcaatctcttgatacatataaagctttgtaactatccttaagtttttctctggtctacatatggcctttatgcttaactcattgttaaattctcacaagaaaaaggctacatacatttccatattaacttcagcagcatctg

SEQ ID NO: 417308 - DNA, 644 bp, Homo Sapiens
  misc_feature (603)..(603): n is a, c, g, or t
ggatttaccccgttactgttatttctggccttcctgtggcagtattgccatccactgaaactgtccccataagaggagcattcgtaggtttttaggaatactaaaaatacaagtcactccccatctgttatctgttgtttcttcccccaaaatttgtgtgatccctgcaatggatgcttacattcattctttttatttgcaaatcactgactcttaaaatgaaaactattaaattgtagaaccactcagcaagatgtacaaattaaaattatattataatagggaacctaagctcagtgtacgttattaatgcagaagaaaagtatttaagaacaacttgagtggtagggggtcagtttctaaagtgagatgatgaacaaactgtgttgacctggaggttccttctcaactcgagatgtcacattcactagaaggggcaggaacaaaccccaggttggtcagaactgtctctccctatctcaggagattgcattctgggctgattctacagttattcttgagaattgcaagtgagaaagggggagaatccatctgatttaccctctgataaccagagaactgcattacattttaacctcaaanaagtatattgttccccattgtagtaatcctcctccactcat

SEQ ID NO: 417309 - DNA, 633 bp, Homo Sapiens
  misc_feature (579)..(579): n is a, c, g, or t
gggaggagcgaaagcagggagagcagtggaggagagacgatgtcgctctcagacaagcagacagcctctctcactgccgcgtacggtcagctcagtaagggcaagcctgcagagtgccgaatggactccccaaaagaaatcagtcaagccggattcgaatggcagaggacagagggcaaactgaatgaaattgggctgaatgtcagcatggacgggcaaccaaaagatgggcttgtgaagaatgccagcttcctggagcagaacaagctctgcttttttgaggggaagctagacaaagagctgagcattgaaatgcaggacaaggactgtcaagaagcctcaggtcaccttgagagcaggtatgtgatttcagagacctgccatcccttggaggggaactcggtacaccagaagacctccgagttccatctgggactcatagaggggccagacaaaaacaaaaccattccagttcaggggaaggtggcagggaagaatggactagagaccaagagccagtcagatctggatttccctggggctgctgacatccctaccagatatgttaaggagcagganaccagtgtttggaaacccagctttcatccagtggctcagggctctctgggctca

SEQ ID NO: 417310 - DNA, 639 bp, Homo Sapiens
  misc_feature (476)..(476): n is a, c, g, or t
ggagaaataacgcagttaccacagggatgagaggctccaaacaggatcctagttagtgctccaaaaatgcccccgacagacagacagacataccccttgatgagagccaggaggacaccagcggaggggagggaggggagtgatgagccagtgccaatgtagtggcttcttctgtggctggtcccagttaagattttgtgtccgttttggttccatttcacccttgcaaggggctgtgcatgtgtagtgggcactgagacctgctgacagcatgttttggtacctggagtgtgcctgcaggctctcatagagcggcaggcagcctgtgtaagcacaagcagagcaaggtgtgtgatgccgtgattgctcctaggaccacagagagccagcgtggcttctgcagtccccgaggaggggacacttgggccagcccatgaaggaggcgccgcacatggttccctgaggctggagcatanagtggaggcagggtggtgtgggggaatcgtttggaagcagattgtagactcctccacatagccacctaaggagggagagctgtagcctagaggtggtggactttattaaagtgagtgaggctcagttaagctttttaaaactttttactgggctgggcgcagc

SEQ ID NO: 417311 - DNA, 636 bp, Homo Sapiens
  misc_feature (624)..(624): n is a, c, g, or t
ggatcttgggggagatatgtgaaaaagacagcttaagaagcttttagggctaggcagtctgcttttatcacatgtcatctttgatgtggtgcaagttccaatccagtattttcatcagtgaacactgatataaaagaaactaacattttaagcgcataagttgtttccaaaaatgtgtgtgtgaggatggagaggaattagattccatttttgaagaagaaattcagtggggattacataaatgacaaaatgtatagtttgactaagggtctaagttttactgtcctcagatgaagagcataatgggatgcagaattttatttgaattaaaatgctggtgcattttatgagggaaaaacatcaataaaagagcattaggggtaccttggctctgtgattaggagacatacttctaaataagaacattatttatcaaggctggtaacataacaagaagaatgctggaatatggtttattgctcttggttattttggtcctttttccctcatttccttaaacttatcttcaatttcaaacaaacaggaaaccttgttagagggcaatgtaatatgccacagatttgagcgtacacgagtacttgttactttcgtcactaattaganatacgtatgtat

SEQ ID NO: 417312 - DNA, 633 bp, Homo Sapiens
  misc_feature (548)..(548): n is a, c, g, or t
  misc_feature (588)..(588): n is a, c, g, or t
ggagggagagaaatttctgtttttcaccgatgcatttctcacgttcatctgacaatgtgcaaaacaaaaagtctacattagaaatttatcatgaagttatactctacttcaactcacttcttttcagtccctgtgaaaacttaatactcttggtgttgtactgaaatacccagtggatttggggtgcacctgtacccttgatctccacttctgcgtgtttctaggccaaagggaaaaccaactctctacctaattggaacttctggttttattgcatatcctggaggtcttgcttcgtttttattttcccgggttgatggtctttcccatgtgcacctacgttagcccactatgtagaacgccttggcagttttcacagagtaagaggttgaaggaagccaccaatgtgaaaatcatatttgctgtaaagaaagaaccattgtgagttgttggaaaccagattaaaattccataattggagattgatgacttttatttcatgagttttacttagttaggtgttttatcttctgtgttttgtggctccnaattacgaagactgttggcctttgcagaaactgatcacgngcaagttattttccttactgaacacgtgtcctatatatttgctgg

SEQ ID NO: 417313 - DNA, 644 bp, Homo Sapiens
  misc_feature (528)..(528): n is a, c, g, or t
  misc_feature (633)..(633): n is a, c, g, or t
ggagtttgggggacaatcttgatctctcttagctgaatgggagtcttcgattctatgaagggccagacgcattgctggtgggtgggttggcacagtccactgcaagccttcaccaatggcactggtgccgccgctgacgcagggaggagagggctgctctgcggattgaccggttggaggcaggtgcaggttccagagacccccatgctccccaatgcttgggaggcgctgtggtttgacttgaatgctgctgtggagttattggtggctcccccaagcatagttcacaaatgaactgaggtttgatgttgttttaggtaccatacgtgttattttctcaaaaatatgtcctggaacgtccctgcctccgatggctttctttggggacatgagttccctggcatgtgggtggcaacactgccccctgctggtgttgggcagcatcatcaggcacccgggcaaaggctccagcctcagcctcggccgtaggtcacagccgattggacacagaacctgagattttcctancaagtttaagatttgaactgaataccatccagaggtgtgatcccctaagcatggcgacattgctactaggttcaagcagaacttacttttccctactgctcacangtataaatatt

SEQ ID NO: 417314 - DNA, 668 bp, Homo Sapiens
  misc_feature (106)..(116): n is a, c, g, or t
ggatagtaaaagatttattgcttccatgaattagcaatttggctgagctaatttgtaaatgatgtggtcgcttgaaagactctacacaaaagaaaattggtaagcnnnnnnnnnnntacaaaatatcggaagaattactgaattgagagaatgaatgctctccacgatcaatgtcattaaaaaagcaactttctgaaataaaagagaactgtctacttttttctttgtcccttttttagtaagcagtttgcctctggtttaacaatatgaacatacttcctttcccagctggaggcatccgatcctgggaatattgatgtatgtacaccccgtagattatacttttcagactagatggatttctaaattcaagatctaccaaatacttccacaattctaattaaaataagaagtttgggagtcagaaaccttttgccctagaggcttgccccaccatgtattaattttcaccattattccatttaactggggttactcatttttatttcctaaaaaattctatatctggaaagaggtaccattctacagcatttctggcgaatcatatattaacctacagtatatgacattaaggagatagctctgttctgtaatgggatagatacatatggctttgatgttagtgtgaagttatcacagcctcataa

SEQ ID NO: 417315 - DNA, 129 bp, Homo Sapiens
tcttgattctcctccaacttggcttctatagtgtttggattttcggctttagtctcttgatttggccaactactggtatttgattgtattgctttttcttgtttacttatcaatttcgttcaaaatttc

SEQ ID NO: 417316 - DNA, 649 bp, Homo Sapiens
  misc_feature (544)..(585): n is a, c, g, or t
  misc_feature (599)..(599): n is a, c, g, or t
ggatttctgactggggctttagtagacataaggatactgtgctgaaatcctgtggtcagcagtggaagttgacaaaaggcatggcttttcaagggtataactttgacaaagatattgctttaaaacatttcagaatcagcagtgacaccgggctctcagcttctgcagcagctagggtgataccttccagagcaatcagctgtggttgtgaccactgtgactcctaagcttatcaggggaaggaggttgagctaagaggggagaaggaaaggtctagattttccactaatctaggcacatgcagcttgagttgacaaatgaaaggcatccttatggtaagatgtcttatgttcctcagctgatgaagcaggatttactcattacctgttcttgaattgtatgattttagtattatattttatggaaacaacttttgactatgattcagagatgtgactagagtatctctgccactcccttgtcacttgtgtcatcttgggcaggttgatcttctttaaattaagataataagaccttgcctgtnnnnnnnnnnnnnnnnnnnnnnnnnnnnnnnnnnnnnnnnnnaaaactataatttnttgtaactagctgtataatctaggcatcattatatttgtagtgactaagt

SEQ ID NO: 417317 - DNA, 505 bp, Homo Sapiens
ggaatataaaaccagggagtcaaatgaagatagtattatgagaataatctacttcaaatgctgctgataaatcaagtaaggtgagaaaaataactataagattaacaaagtggaggacaggtttaattagagtagtggggggcaaaaatctgtatggaaatgaaatgattaaagagaaaatgcaaggagcaaatgacacggtgactataaattatccttttaaagagttttggtgaaaaagggatcaaattccctggtggtatctgacaatgaaaatggggaaaatgaagaatactggttgcttatttgcttttattttctagtatgacagaagtaatagcttatttgtatgatcatgaaatgacccaataaagaggaaaatttgattatgtataagaggggtaagtattgaaaagtatctgtctatagcctgtgtagtcagaaagagttgatgaacaagtaaaggcgtaagcttgaggtaggtgtataaacatttcatttctgg

SEQ ID NO: 417318 - DNA, 554 bp, Homo Sapiens
  misc_feature (168)..(293): n is a, c, g, or t
ggcaactaaattgtgtgttcctacgaataccttttaggtatgcacacatacacagagcatcttattttatactggtgaaatctatgttgtttaggatacagataatgtcattgtatttatcctatcagaataggcttttcccctatttcaaaatagatgctattggcnnnnnnnnnnnnnnnnnnnnnnnnnnnnnnnnnnnnnnnnnnnnnnnnnnnnnnnnnnnnnnnnnnnnnnnnnnnnnnnnnnnnnnnnnnnnnnnnnnnnnnnnnnnnnnnnnnnnnnnnnnnnnngacaccatgcccagccacgctattggttttaaatgtcagatttctttaagaattctcatagtacttttctgccgcagaatttatagcacatctgtccatcctttcaataggcactcaaggaaatgtatctattcatatgctcaacttcaattgattagtctcatatgatttttcagaaccccttttgctaacccctcttggccatttcattaataatgtatttgacagagattgaatcaggaaataaattcatgacatttc

SEQ ID NO: 417319 - DNA, 365 bp, Homo Sapiens
gggaatttaataccacagatttcccaaggaaatctgtatatgctgcttatatttcccttcaatagtatctaaatgacttatcaaaccacatgtcaactaacaacaaatatgaaaccaaatgacaactaagcctttaagaaaccaaaaatatcccattacatattttccatagaaaaagctaaaacatatgaaaacttaaccagttttgtcactttaaatatcttaaaacccattcattgttccagacaccataataatatgatcactgaagcattccttaagattatttcagaatagcccagtgaaaatagaaatcaattctatgcttattacttccctaacaactgaaaagggttcaagggtgc

SEQ ID NO: 417320 - DNA, 652 bp, Homo Sapiens
  misc_feature (601)..(602): n is a, c, g, or t
  misc_feature (623)..(623): n is a, c, g, or t
gggtgatgatattagaagacatggaaagagcattttcagtgtcctataagaagatcttccagtgatattgatgtcagcatctttaggtcaagatggatttacctctgggaacttacacttagatccagagacacagactgagtttcgcctctgtggactggcacatgacagtgagctgctctcaaggtaactcaacctaagacattgaataattagatatggagggagaagaaaaaggaaacatactgatgaacttgtttttctgtcctggcaaactggattatgggagcacctttgaacaggatggaggggagccatgtttggaggtaccgttgactcattaaagaagaataaaactgtgagaatgctattgggcagttcacagagtccctaggaggactggaaaatcaggtttatggccatccagccagacataacgcccagacacaacaaagggttggtctgatgaggacatattgccaatattggcaagcagcttttaccactcatatatttagatgttcatggatgctgcacgtagcaccatcaacattaccttccaagaacaataatattgattcatcgtccactccttttaggnnaaagtggtcagaagtataccnactctgtctttaaagtttgagggtagtca

SEQ ID NO: 417321 - DNA, 548 bp, Homo Sapiens
  misc_feature (183)..(467): n is a, c, g, or t
ggatttggggtctttgcccttcccgcaacaagatcctacaacccccacgtcggtgagggctgattctctactgtgagaatcagcatggggagtcctttcccttctggtgcttgagaggcataaacaagattgagaacctgacagcccctaagttatagcagcttcaatgccttcaaaagtctnnnnnnnnnnnnnnnnnnnnnnnnnnnnnnnnnnnnnnnnnnnnnnnnnnnnnnnnnnnnnnnnnnnnnnnnnnnnnnnnnnnnnnnnnnnnnnnnnnnnnnnnnnnnnnnnnnnnnnnnnnnnnnnnnnnnnnnnnnnnnnnnnnnnnnnnnnnnnnnnnnnnnnnnnnnnnnnnnnnnnnnnnnnnnnnnnnnnnnnnnnnnnnnnnnnnnnnnnnnnnnnnnnnnnnnnnnnnnnnnnnnnnnnnnnnnnnnnnnnnnnnnnnnnnnnnnnnnnnnnnnnnntctcccccaactccaaaagtctaaccttctatgagtgtattgttattaacaacctaattattgtgattattaacaatttta

SEQ ID NO: 417322 - DNA, 314 bp, Homo Sapiens
taattaaactaaattttaaaatgtggaaatccaggcaaagaagaggaatggcgttcgtctttgtttttcagaggtttagtgtcattcacctagaaattagtgccgctttagaagtaactacattggaacaaaaagtacttttttaatatgctttctctggattttgtcttaatggtttttcagtattattttatacacagcattttattcattattgggccaattctggagctaaatgtagtggtaagatgtattcaggagattttataattgtttctgcgggagaacacagtagagcataagtaattggaaat

SEQ ID NO: 417323 - DNA, 677 bp, Homo Sapiens
  misc_feature (99)..(169): n is a, c, g, or t
ggaacattttacagttttgtgcaccaaatagtgccatcaagaaaaccgaacagtagaacagaagaatgttttttgcaaatcatatatgtgataaggggnnnnnnnnnnnnnnnnnnnnnnnnnnnnnnnnnnnnnnnnnnnnnnnnnnnnnnnnnnnnnnnnnnnnnnnaactgtccattgctttgagaacgatgcagcctcaggtgccacggagctggggcccgcccactcctgccctgactcgctgctgtccacttgtactgagaagtcgaccaggaagccgcctcgtggccacggcttttaaagacaccgggaggacacctctggagcccgtggagtgattccttgaattagaattaccctgaccagctgcaatgtaaaatccctggaggtgtgtgctggcttatgaggggcacggagaaaaacaatctcaaagtgaaagaaccagttctgatgcctgccaagtctttgagaatcactaagagaaacacaccttgtggtgaaggttctcagacacaggatcacttccagacgagaatccataagcagctcgtggacctgcctggtccatccgggattgtgaggctgattgctctgttggaattgagctgcgagccgcggttgacttcaccttgccaatggctaagccaagtgttttataaagtgatatcccttg

SEQ ID NO: 417324 - DNA, 538 bp, Homo Sapiens
ggcaaggaggaagtattattctgccattctattagtttttatgtggtgtccagacccaaagggtatcctgttacagagagtgtgacatgagcactgtagttttttctaggtaagagttactgttccatgtttagtttgggtgtcttctatcagccaggactactgatttacttgatttgattataatgcctgtggacttgtttctttatagactattgcttcatttcacaatccacttcaggtttatttatttctaaacagatttgttgaggtataatcacatacatttctccattcaagtacccatccagggttttggtaaattataaattttaggccagtgggtgctctaccgtatcccacacttgggagcgaggcggcaatctctaggcagggattcaaacacctgccaaatggaaacccctcccataaaaacaaaatggtggagggggccccctgattccctcccggaaagggcaagaaactttaattggataaagtgcgtgctaaacccctccccccgggggaaaaggttttc

SEQ ID NO: 417325 - DNA, 399 bp, Homo Sapiens
taataattgttaaacaaatgatagagtaaatgatcccagatccttttttatttttctctgaaaacataccctttccccagagttcatccaaaggcgcaactctggtgttcaagctgatctgtttctgttcttactcttctggcttcctattcccagagcctttaaattctggaagaaatcagcctacattctttctagcaattttatgaccccagtttcattaaatcattctcttagcacttcaaaactccatctgttccccaacatgactttccactgagcctagctcaactgcatgcatttcatcatcatccactcctttcaacagcttcacagtgcataaaccacatatgtacctgtaagaccaccaccatattttttcttaccttttcttacatt

SEQ ID NO: 417326 - DNA, 561 bp, Homo Sapiens
ggaccatgaaactaatgtgaacagtttccagctccaggcaaaacatttacactcctcacctttcagtgctatcatttgttgcatttgggaacaaatgtgcagcttcagggtgagaatggaagaatatataggcaaaagaagagctatgaaatatattaataacgaatattctcacctgaaaactatgaatttcaagatcacacttaaggtccacttcaatttaaaaaatgtcctgaggatctgaataatgacaattggaaaattaaaagagcattgatagcttaagtgccaatgaactcaaggccaagatctcagttttcatgcaaactggtggctctgacttcgttccactgctatagccttggctgaggatcttacaagtgggtttttgaaatggattcgggtggaggctcagggagtgcacctgttacctccatggggcaaaggctcaatgtagggaacttatgagagttggagagcatgatgtgtgctgtgtagacagcacagcatggggacccagcactgccctcatcgacatttctcttagaaaatgtgattaca

SEQ ID NO: 417327 - DNA, 155 bp, Homo Sapiens
ggggcaaagggccttagctaagaggcagagaaacctgcagagtctctagcagtctcagagggctgaaaagacaaaagttgctgttctgtctaccaaagtaactaggacttttagatccaagatttgggagaaaagccataaagaagtgagtagct

SEQ ID NO: 417328 - DNA, 660 bp, Homo Sapiens
  misc_feature (249)..(532): n is a, c, g, or t
gggaacagaatcagggccttgtgcagaataagagagagatggaaaagtctctgggaagtgaggtgatggattgattaaaggtgaaggaaagcagtgagcatcagtaaacccaacaaagaacagattcagggtggatccagttaaaacagtttcacaattttctccaataacagtttgcaaccattcttgaaggctgcagacttggcagacttggcaaggtggaacaggagaaacacaaagtatggagcnnnnnnnnnnnnnnnnnnnnnnnnnnnnnnnnnnnnnnnnnnnnnnnnnnnnnnnnnnnnnnnnnnnnnnnnnnnnnnnnnnnnnnnnnnnnnnnnnnnnnnnnnnnnnnnnnnnnnnnnnnnnnnnnnnnnnnnnnnnnnnnnnnnnnnnnnnnnnnnnnnnnnnnnnnnnnnnnnnnnnnnnnnnnnnnnnnnnnnnnnnnnnnnnnnnnnnnnnnnnnnnnnnnnnnnnnnnnnnnnnnnnnnnnnnnnnnnnnnnnnnnnnnnnnnnnnnnnnnnnnnnntggagctgagaagccccgatttccactttctgactcctagactcagctgatttgaaccctcagtggatagcagcagcccatcgcagctttctagaagtcctgactagtagctgaatgcatctatcagg

SEQ ID NO: 417329 - DNA, 676 bp, Homo Sapiens
  misc_feature (563)..(563): n is a, c, g, or t
ggcaaggaaagcacatctcagcagaggcatgaaccaggtgcatgtgcccactggctccagtgctactgggggcttcgtatgtgacagtgatgatgaaggcttatcagcctgcagagacagcagtccctgccactgcatatcagagcccagtgaggacagtagggtcaaggcatattccccacacacgaaggctttcacagcagctccccagaattctaaaaggcatctcggcatctccggggatgggagacagcctgctgtccctgcccttcagctccctagtgtgagtgatggggacactgccaccaccctagctgctcacacttggagaaataaattgagttgtcggcgtgatgttgaccaggacagaatggcatcctgcggtatcaatgtggtttatttgttgttgttaacattaatacaattgaaattttggacattgtgataaactatgaaaaaacagggtgaaaacatcagaagcaattacactcaagagtttagcctgattctttccagtcctgttttctaaacattattctctatataggtaagattaaattttnaagtctgccttttttgtatcaataccatgagcattttccatgtaattagcacttgcctataagcataattgtctgtgattaccagatatctcaccatatggacacaacatgat

SEQ ID NO: 417330 - DNA, 293 bp, Homo Sapiens
gggatagttaaatggataattctccaccttcttttctgatatcttactgttggaatatcatttttgaaattttactgaagtgtgggacttccatttttcttcccccgaccaactgaaaataaatgtttcaaaacatgacagttttttcttagtgccattgtgtcaagagaagctaatctcaatgcttattttttatgagtcggatcttactgcagtcagtgctgtcataggttaagttccaaggttgtgtattttctttgtttgtgtaaaactgtggcattgactacatcctt

SEQ ID NO: 417331 - DNA, 409 bp, Homo Sapiens
ggcatttcccctgtgtctcagtggcctgaccgtgctcacttctgaagcaatcctaatggctaggagaaagccaagggcctattggccaatgttcttaaaccaattattgcaaaggttatgggattatccttagggtcacttttggggttgtaggctgggtcagattcttatgtatcactgtatgaagaagggaatgatactcaaaaatattagagttaaattttgaataatagtagggcactgatgaggcatcaaagtgacacctatatttaacctgtttggggccctattccttcacaccaaagaaggaaaccaaagcataagtcccatctgagccaattcagttcatgcgttgaatcacaatatgttggtggtcctaaaattattggcccaaagttgagtatcttgg

SEQ ID NO: 417332 - DNA, 587 bp, Homo Sapiens
  misc_feature (362)..(403): n is a, c, g, or t
ggagagcaggtccatttttgtcttttcttaaattaggactctgagtagtactttactgggagacagggtttcgaagctgctctctatattgcttttctaggtggaaggactgtaaattagagtagtaatctatacctctctttttgttattgcagttgctagaagtgatgatcaaagttatatgctgctttttctaatggcatcgtggatatagaaataagaattacactcttggcagtttactttacttttattgctttccaactaatagtttctgacttaatactgtacacaggatatacaagttactaaccttttaccagggccaataacaattggtctttaaagagtagtatagtttnnnnnnnnnnnnnnnnnnnnnnnnnnnnnnnnnnnnnnnnnnctgtccatattaaacatagcatgtcttgggcttaaaatgacattagtaaatatcctcattctttgtacagcttaaaatattgcttgaatttcataaccccaagcctggtatttaattaagtacattggttgttaaaagtaatttccataagctattgtctgtttatagaactttgaaaattcta

SEQ ID NO: 417333 - DNA, 435 bp, Homo Sapiens
  misc_feature (62)..(72): n is a, c, g, or t
agtaaattaatgggatattgtaatggagaatcataatgtgtgtgttggctaaggttttcagnnnnnnnnnnnttcatggtgacatgaaatttaagcagaaatctaaagtcctaaagaatgcgagggaatctggggaagcgtgctctacgctgatggaacagcaagtaaaacgacagggaatctgtgaacagtttaccttgcatgaggctctgaatgcagcacgtgataagggagggggtggactaaatgctggaggaacagaatgaggccaaaacacacaggctcctgcaggccaagatctgggtttgattgcaaacacaatatatagctcaagtttactttgtactcaacaaaatccattctgtctaccactggaaataataccaaatactgcttgttggaaagtccgtgtgtaacttatctcttattattgct

SEQ ID NO: 417334 - DNA, 200 bp, Homo Sapiens
ggattcaatgatctggatatggcgtttgaaacaattgtgtatctgtacaaatatatttagtttaatacacacttgtctgtgttgtccataagcacacatttgaatatggccacgagaaagattttgggtgaccatgtggataaaaaaattatttggtacagttatttctgctaatggatggggaatgtatagtaatatgg

SEQ ID NO: 417335 - DNA, 275 bp, Homo Sapiens
ggatttagggatttatttatccagtccccttccctctgcaaaaataggacatgctttcatgcattttttttctttcccatcatgtccaacacttacagcctgacctttctcttccttctgggttgggacgaaatcgttccctgatgttaaccccgcagcatgccttctggggtaacaactccggtttttccaatggggaaaaaccccctgtggttgggggccaatccccccactctttggtggagaccctgggaaccccctgggcgccctccccc

SEQ ID NO: 417336 - DNA, 627 bp, Homo Sapiens
  misc_feature (183)..(196): n is a, c, g, or t
ggttataaaagattttgattccttaagctcaggatgccacagctgtaacacacaccctctccacgtgcagcatctacttggatgcctccacttcacccctgtgccatttgggaggcataggcagccgatgtaagcatgatggtaatgctcatgctatttggtgtgcctctagtaataacatcnnnnnnnnnnnnnnctgtgattcagaagtctgtggcttgtaccagtatccataaaactgtggcagactaagtggttaacttgtaagtagggtaaaatctcagatcttgcacagttcttgacaatacttatgtttttctagtcaattccacacctactaaaaacttccaccttatagatgtatgttcaatgattttaaaaaattagctatacaagtgtttggagataccaaccatgagcaccttctcagattttcctgattgcatctgtctttctcttggttagcactacctaggctgagttgtccctccacagcacaagatgtgacatccagctgtctaagcatctgtcaaaaagctacatgatgaaacctttaagttaggttgagtcagctccccttgccatggaaaaacttcagctgtatttcgtcaaatacttttttctgcc

SEQ ID NO: 417337 - DNA, 628 bp, Homo Sapiens
  misc_feature (552)..(562): n is a, c, g, or t
  misc_feature (579)..(579): n is a, c, g, or t
gatgaaaattattttatttagtttacttaactactctgaaattggcttttattattaccattttagaaatgtaaaaactgagacttagaaattaggttacatagccaagataacacagtgggaaagtggcagaacgttcatttaggacttggtccttggtaactccatatctaaactgtttggattcagtaagtctgaggcccaagaaatgtaaatacttctggcgaggaggtcacattttaagtaacaagacttgactactttgcatatacgtccttattggaacctgagaatcagactctgagttaagtagtttaagtgttatcttaattatggaaatgggaagagaaatagtagttcattgttttcctttggttgtcttaattagtaatggagctgggactagaacccagacttcctttcctaactccaaattaagtgctctgtactctacatcattagataaagttgtcctaagttgaattttttctactctacccttttgagcaatcttaccaatgaattgctgcctttaaaattcctctgataacnnnnnnnnnnnaagcttcaggtttagcnaaaaacatgactgaacctgacaccgaacggtgctagaaagtggctatca

SEQ ID NO: 417338 - DNA, 522 bp, Homo Sapiens
ggagtcagaactaaaattaaaagaaagctgggtaatatccagtaaagaaaacataaactatgcttcgtattatttaaaatattagaggcatgttttaattcaacagctatttttgcatttcccaaattaagataatagaccttactttaaaagtattatttgcttagatgggcaaacatgattataatatatgaattattcatttggttactgccttcacccgtgctaaacagggtattcatgaaattgaggaaataggcccaatttcatggatgaacacttctttcctaatttcagctgcctgtcttgcagatatttgcattctaattcacaaaggtaatgaaatttgtaatgaatgcatagtgttccattttattcttatacataattcatttaacagttcctctggtcaagaaatttagtttatgtttattttttccattctatagaggaagcccagtaataaacattctgatgtctatttgtgcatatctgtttccttcaggaaataggtttcattct

SEQ ID NO: 417339 - DNA, 639 bp, Homo Sapiens
  misc_feature (525)..(525): n is a, c, g, or t
  misc_feature (550)..(550): n is a, c, g, or t
  misc_feature (557)..(557): n is a, c, g, or t
  misc_feature (564)..(564): n is a, c, g, or t
  misc_feature (621)..(621): n is a, c, g, or t
ggagagcatgtgggatggaatctgtattggagtggccacctctagaaaatatagtttgtcacaaatgtaaagattttgtgggtatgtgtggtttgatttgttggtttaatttcagttaaatgatttatggtcctcatcagtaatatgagggtttcaaccagcgtagttctctaaagcttctttctagctttctcattctctgattccaccgatagcgcaggtgtggcagggtgtgttgagctggcagctgctcagcttctgtagacatttctgagcatatcatcagaagagtcagctgggacattgaggggctgttggactcttgctggcctcacacactgaaagacctggcgcttcagtcaccctttgtgttatgtttctatagctaatcttaactgggggttgctagtggtggggtgatggaataaaacaatgatttaaaccaggagctgtccattatcatgatactcatgaactgaggagggtagaacagccaggcaggattatattagatctaccttcccnagtgctccttctcattctctttggncctttgnagattangaaaagaggaaaagaaggaaacagaaaagagactctttggtatacctctctgtgtcnctaaacagctgcatattt

SEQ ID NO: 417340 - DNA, 661 bp, Homo Sapiens
  misc_feature (558)..(558): n is a, c, g, or t
ggggaatgaaataagtatttataaatggcagctagctgctttattattacagaattttctattctaactcaatggttagttgcctaagatgaactgcttgtcttaaaatattccggctttgatattcagtccagcagatgtttgttgagcacctgttatataaaaggcatcatgccagcccaggagaatattcttaccagcaaggcacatttgcagtccccgagaagtggagacgtcagaggcccagccagctaggcagtagctgccagtcagtgctgcagtaaaggtataaaccaagtcctgagatagcaccgaggaggaagctgttgcttctgcatggaggagctggcaaaggccacatgtgatggttgtccaaagatgagagactgcacaggcaggtgacagtgtgagggaaaagcgcattccagcatagatgttccatcagcaaaggcatggaggtgagaatccacaggcaggctcaggtgtgatggtaatagtgggtcatttgggtgtggtgaggctggaaagaatgaatggggctgggctgtgaaggcttanggagttctcagccttgtgggctgagcctatgatgtggaaagcttacaggagggcagtgtgagcccctgactgcatggggcaagctgtccggtaaaatataatg

SEQ ID NO: 417341 - DNA, 442 bp, Homo Sapiens
gatcccctggtatacatatacaacgttttctttatcccatcatctgctgatggatacttaggttgattccatatctttgctcttgtgaattgtgctgcaatagatatacaagtgcaggtatcttttggatagaatgatttattttcctttaagtagatacccagtagtgggattgctgggtagaatggtagttctatttttagttccatgagaaatttccgtgctgtttttcatagaggttgtactaatttacattcccaccaatagtgtataagcattcccttttctccacatctgttgttttttgactttttagaaagtctagccctggtaatatgtgtacagatttgaacagctgtttgttcttttggctcatctgttctgttacaataagttaatgttactggtgaaataaaaacaggttattaagaatcaatggcaa

SEQ ID NO: 417342 - DNA, 590 bp, Homo Sapiens
ggagggagagcaagatgaatgatcagagattcttgggtaacttgaaaaaaatcaagcctgaatgtaaaaagcccagagaagtctttgaggtaactgggaaatgacccctgttgccaagacagtgtgaattcgctacaatggggcaaaccaagcaaaggtgcccttcaggccaccgtaggtgtaggactgacgagagaacagagatagaggcagagattcacgagaaaagacacaagctctttcctgggtagtgatggtggggaaaagcattcgataagccatcactctaagggagaatacaaagaaaggaggaccctgatcttgttagacatctgcattcatgggaataaacaggtcttggaagtccagaggaaagaagtttcaagggagcagtgaccagctgtcgaaggctgcagggaggccagggaggaagtgctgagaaagagcctgtggatgtggtgaccaggtggggtctggattggaggatcttcgaagatgtgggttgcagagatgaaactgaggcactagggatgagttggtggtccctgggtgggaacgcaagcaggaagtgcgggttgcattgatgaaaa

SEQ ID NO: 417343 - DNA, 466 bp, Homo Sapiens
ggattgtgatttgttcttttggttaaagtatatgaagaaaatctgatctcacattgatatgtagttggaaaatcgaggagtatttcagtagcattttccgttaaaattacatattctttgatattataccaaaacttcgaagctgtagattttaaaaattagttacaatattaagtcttaaaccacatcaatgaacttttcatattctattccactaaaatccactggtctatcttgtactttcagtggctctttcagtcatatgtgcttttgtaacttcatgattggatattaaggaaatactggtttattgaattatgcagattttccaaatgttttcacattttattgtacaataccaatcatgtttattactattgccactgatctcatcagtaaagatttttagatattgggagaaacttttaagcccagtattgagaagctttcaaccaattcaaatcaa

SEQ ID NO: 417344 - DNA, 676 bp, Homo Sapiens
ggatgaaaacaacaaaaagctactactaatttaatcagatttttgttagattagaatgatacagttgaactttgggattttaaattcctttaaaatgttaatatttcaaagcattatttcacaattgccattaaactccttacagcatgtatttctgtaggtagagagatttctgctgatgtgctggaaatatgtaaccttgtattttgcagcctcactttcctctttagtaaagccctgatttcccaaaggggaatgcttccttcaacacgaggtttgggcttaggtaatagttgcagttctgcaggaacatcagttcaaggaatgatgagctgaatgccaaaataaagctgggatgactttatgattattgcgtatgaacaatctaatatgaaggagatttttcattgctaatattcaactactggatagaaaatatggctatgttactgagtttgttaatgtcaagatctcaaagagaagtacatggaagatagggtcaccagaactgaatctggaaagggtgtgtgtgcccccaggaatattccaccagaggcagcagtgttattagtaagtctcctcttatattaactatgacaaaagccagtgatggctagaaagcagagcactggcaaacatcttggtcatatgaagatgagcatcattgtctcctatt

SEQ ID NO: 417345 - DNA, 668 bp, Homo Sapiens
gggggatctgacgctatctccaggtacacagtgtcagaattcatttggaggacactcagctggtgcctgctgcagagttgattgcttgcatgttgatgacaaaaaatctcccacatttggtcacagaagtcttctgtgttgattgtagcgtggtgtgagaccacaggaaaagcagtttgagatttttcacacccagaaactcttaagagagaaactatgtgtccctgtgcttaggcagtgtctagtaagcactcaatgaatgaatttaaaaaaatggatgagtgatgcaagttctggccaactggacattctttccttttgattcattcagctacatttagatttagggaaatgaagggaacttgtgagatcatgtgagatcatgcggacagattaaaagggaaatattttctcaaatttaattagttatgcatgttgctgcaacaaacaaaaagaaatgagccttatgatgcaaaacacgtttgataattcttactccccttttaagttgtaccatttgtaagaaaatagggtagcattccatgtgcctaattccactgttatgtgtgatgaatgtcggaaacactcctggcattaaaaggagcctaaatgtgtggccagaatggactttatgttccactggacatttttctgacctcacaacaaat

SEQ ID NO: 417346 - DNA, 584 bp, Homo Sapiens
ggctgctccttagattgtagggacgctggcacctcactcatgctcctaagtggccattttgcgccctggctgggcgagttaggcagacaaaatgagcccccaaaagtttaaaggcctccaccaaaggagtatttcttttctgaggtgtcattgtattccatccacgaacttcagttcccccgggtgctctggatctgacatggagtaggatgctaacatctaatcccttctttccctttggaaagatgcatgttttttctcggagtcctagggaataccttagaatactttcatggttgtcattggtacacccatcccttgaggagccctgccacccgtaagtaggactgcaaggaaatacaaaattaagagaagtatgaaccctgatacccaggaacttaaaatcaggtgtataaattttgtacacctaaaaaatatggtacctaaagaggcgaacagcaaaacaagcaagaatgtgaatctttaaaatgtttctattcttcagcgcagcccaggaattctacctaaagtaacatatcctaaggcaacaaccaagaagtgtggaagaatgcatgtaagaagac

SEQ ID NO: 417347 - DNA, 243 bp, Homo Sapiens
gggcagacagtgagggggcacctctgtgaatatccctgctcattttatcagcaaggctcgccaaaggcctttcgtcattgggctgcctgagcctcactgcagagctgagacttcacaggagacaaactacagctaatgcagcttcgcagcccccacccagtgcaggacagctacgcccagaaatgcctgttgcagacccagggaagccacacttgaaacaggagcaaaaactcaataataagg

SEQ ID NO: 417348 - DNA, 391 bp, Homo Sapiens
ggatgtcctaggtttcccaggataattccacttcacaccttatatttttgtctaataattaattgcatgtttttgcattctgaagtgtcttagacagcctagttttcagtggtccataaaaacctgttgctaacacagtgattaaacatttttctgccaattacaaaaggagcacaagtgtgtgaaagaaaagttggaaaacaaaaaatggaaggcataaaaatcactcacagacccaaaatgaaatacaactttaacacttgaatatattttcttccagtgactatttaaagttttttattgcactgtgcttataaaaatgggtgtaacttcagtaaattagcacaggctgaagtcaatataaacaccagccaagtcgagaactagcatg

SEQ ID NO: 417349 - DNA, 462 bp, Homo Sapiens
  misc_feature (220)..(232): n is a, c, g, or t
ggatgtatgtatacatctgaaactatcacacaaattcagcagaatctacaaagatgtggtcaggtacaatcggcagcattcgcctgtccttcgcagtgatgatagatttttctaacacatacagaccttctgccacaatctcaataacagtgatgagctttataaagactgatgtacttttctgaagttgttattcattcttcaacagatatcaattgannnnnnnnnnnnnggtgccaggctctgtttcagatgccaaggatacagatgttttacatgcgctcacatacacacatgcgtctaaaataacaccagtgctatgtttaaacagtgactctctttcttgggtatgtatcagtttttccaaagtacccttttctagaaccgttgcatcagaatcttgctggtagaacttattttggaaaaagatttccaggtgactggatgcccaccttgaagaac

SEQ ID NO: 417350 - DNA, 678 bp, Homo Sapiens
  misc_feature (545)..(638): n is a, c, g, or t
ggatagatgcagattttggaggcagacagcctgggatttaaaactttgctctactactttcgagccatgtgatcaagctaatgaaactttaaaaaccttactttctttaataagtaaaaaatgaaaaataatacctgctcttgagattgctaagattaatgaaagaatgtatgagtctgtcaaatgtcctggtccacagaagggactcaatgtctgtgttccctttgttcttgctaggatgtgcattagtttacagtgtagccacttgatagcatctgaagggatcagtaccttgctatttccaacaaatgtgttttgaggtgctgatatcgtctaatgagggtgtgagccatcatttaaaccattagattaggaacattgcagatggtcccagcacaatgtgtatatgtcacagatggctcataatagctagtctgtattaataagcaagactagacatatcagttttaggtctgggtttttgtttccttcttaagtatactattgtataaagtcaatgtatgcacatgtttgcttctctctcnnnnnnnnnnnnnnnnnnnnnnnnnnnnnnnnnnnnnnnnnnnnnnnnnnnnnnnnnnnnnnnnnnnnnnnnnnnnnnnnnnnnnnnnnnnnnnttgttttcttataagaccgagatcttatgttgccagctgt

SEQ ID NO: 417351 - DNA, 302 bp, Homo Sapiens
ggacgctactttaataacacagaaacgtgcattcatcgtaagactagaaagaataaaacaatgcatgttcaggaggtcagagtctactgagttcagggaggtagagctggaaactggagaaagagataagtggttaagatcaggatgatcaatggctgttagatggaaggaaagttggatgtagctactatttattcagtatccaagatgggccagtcagtgcattatgtaatttaattctcataaaatgttgcaaagtagacagctctactctatttgatacaaagaaatgtgtacctcag

SEQ ID NO: 417352 - DNA, 455 bp, Homo Sapiens
gggaccaaaacttggaatagaatgaggctcttgaaaaatgctgaaggggtaggagcagaaaaagcagcttttacctagaaagatcagttcagagggaaaaggacaaccggggagaatcagcaccttgccgggggacatggtgaggtgtgaagagacatcagggggaactgggcagtgcttccctctcacctggctttgggggaaagaactttaaatgggaaaggctagagcagaggagaggcaggactgagcccaaggtaagtgacacagtggtcagagagcctctggttcccgttggatgagtttgtctccaggcccaggtactgggggcacagagagggcaggggccatgcctgacacatgctgaggactgcgtgaatctgacgaccctgtggctgggccctggaccccctagaactcccttgagtaatggatgagcagaggagaggggttag

SEQ ID NO: 417353 - DNA, 664 bp, Homo Sapiens
  misc_feature (580)..(580): n is a, c, g, or t
  misc_feature (611)..(611): n is a, c, g, or t
ggatctgatagtgtttccccctcttgatttcattagaaattgtttggatgttgaatgtgttctttgtgtggtaaccatcactgtgtgactaaatatttccagcccactgctttcagggtacatgataggactgtaccatgagtctattctgctggggcagagcctcaggactgtgggagcagaagtgatatgtgccacttccaagctaaagtattcaaatgcacattgtagaattttgctagctccttttccctcttgtgctgtatgtaatgaatggaaatgcttgtgatggccgctccaccagccagtgtccctgtgtgaccacagggagcccaacaccactgcatagctgccatggatatgacatgtgagcaaaaaattgacctttcttgattgaaggccctgcccacagccatatctagttgattctgagtgctgcattcaatcttcctcttgtgtgaagaagacaatgaggaacattggtgttttccctgtcacaggtccctcccaagacatccttttgatgatagctttcctaaaattcgaattgagcctccactgtccttttaagtgggacttntaatgaaatgtaggttgcacttgaataatangcatattccaccaaataggcagataccaagaatatgtgttgtttctatggctg

SEQ ID NO: 417354 - DNA, 495 bp, Homo Sapiens
ctttttgccaggaaccatttataaattattgactggctgataaattagtgcccacctcccatccaattagctaagatggtggtgcccttagatcgcaaacatagctaaagatggactagttctgttgctgagggcaagcaccctatcctcatctggttacacacttgacacagatggactgaccaaatgagtgaatgaacgagggctcaaaagttcaacacgtctctgagtatttctgctgatgtacagtgagactttgaaagaagagctgagtgtacttttttttcttactccctgtatttctcttctaaaaagcattataaaaagcaccagagacacactgtttatctggctagcagcatttggttgaaaattgaagtgatttttaaaactacagaaacacatagtcatctggcaccagtgatgagcctgagttagggaggaattcacattacattttcatttagtcttgcacaacataaggaatttacattc

SEQ ID NO: 417355 - DNA, 311 bp, Homo Sapiens
ggattttccaaaatcatatttgtttaatctttacagaaatactggaggggaccagaagggtaggaaaaggggcataaacattgtaatatttcatgaacttttatcacagtctaaaataggggttactatttctgttaatattttctctagaatcactggtccgtggcatattggctttgtttcttttcagtactctttactgcagagtgggagttggtttagctttgggctttaggctgagattccgcttgttttcctttttaaaagttgagaaaatttggttgggattatgcgttagctttttctccaca

SEQ ID NO: 417356 - DNA, 692 bp, Homo Sapiens
ggatgtgccagcaccataacctttctaggttctgctatttactttagacagtctgtgattttcctaaaattacttgccaacttgtgtaggtgtgaccgatttccataattattctcatattctgaaatggatctataaccggagaagacaaaaaaaaccctagaatagatgatactaggctttgcagcaacccaggagtatatgcctgtaaaaagagctgcttctgacctacagaaacctggaatctggagggaacttaaagactcagacttgggcaggaaggagtaaagaattctaagcaagcacaaactgatggggtataaactgatgctgagagaaggagtatcagggagttacttcttggtatgtagccatgtggggctatacctttcaaataaacttgtggccaagtacgcagcatggaaatcgtgagagataaatggttgatgtggcaatttggtctatttaacaaccatgtcccattagattccttgtcgatctcattgattgtgcagaaatgaggcatcaggatggccaaaacctaaataacttacccatgataattagtttattgactcatggagatatgggcctgtttatttttagatgattgggcacttctatctcttccaacactacctaaattaactctctttgcactgcaaaaagcttttatgtcctcattattcaaa

SEQ ID NO: 417357 - DNA, 445 bp, Homo Sapiens
atagatgtatagggtatgagtacagttgtgatacacccatatgttgcttagtggtgaagtctgggcttttagggcacccatcacccaaatagtgttcattgtacccaataggtagtattaatatctaaattttactggataccaaatgaatgtactataaccttttctgagtaaaaatttttgaaattccatgttatcatgccaacccctggaaaactactaggttgcaaaagtgtcatcctttaagttttagtgtgtgctatgggactcctagcaacagcctttggatgtccatagttgccacagggctttagaggactaatagggacaagtctttcctattatgagtcatggcatagaaatctagtgtggggtttccatgagaatggcaaacttgaaacaacctctcctaattggaacaatattcaatttaaaatttaggtta

SEQ ID NO: 417358 - DNA, 676 bp, Homo Sapiens
  misc_feature (121)..(364): n is a, c, g, or t
gggagttccaaggagtgtgtgtgccaagagaaggagtcccacacagcagtgcactgcaaaggctgagggagaaagggaagttgtgctgaaggaagaagaactccagtaaaaggggactggnnnnnnnnnnnnnnnnnnnnnnnnnnnnnnnnnnnnnnnnnnnnnnnnnnnnnnnnnnnnnnnnnnnnnnnnnnnnnnnnnnnnnnnnnnnnnnnnnnnnnnnnnnnnnnnnnnnnnnnnnnnnnnnnnnnnnnnnnnnnnnnnnnnnnnnnnnnnnnnnnnnnnnnnnnnnnnnnnnnnnnnnnnnnnnnnnnnnnnnnnnnnnnnnnnnnnnnnnnnnnnnnnnnnnnnnnnnnnnnnnnnnagaggaattggacaccatgcacaagttatttcagatataaaccccaagccccctgaaatgttctgcatccccttagtgggtttttttaataacctatatggatcccacacgaactttgggaaccctcaaaacgtgctctgtttatcaacatccctcagagcccagtcagtgccatctgtattcttacgctgtcagaaaggcagctgcatgtagctaaatggtcaattcttgtctttattcagattgaacacatttaaaagtccataattttacatatatatcctaaatttagcagttaataaagaacattga

SEQ ID NO: 417359 - DNA, 449 bp, Homo Sapiens
ggaacactcgaatgaaaatgtttttaaaatgcaatgaatattaaatgattatgttggaaaactaacttctgtgacttaccctgtgatgttgtgtagatgaggtgttgctacagaagttttatatggatagttaggggaggtgtagcacatcctgttaaacaattccatgtactgtcactttcataattctgacacattttaaatcagttcttcagggatatatttaaaaaggaagaggtataggaattttcagtcaatattctttggcatattttcccaccagcatttggagaggaatgagggtccactgtcccacggtggttgatgccctgggaaatttccaggcccagtccctgattgtgtgaatgagaataatcctttcacttcaggctgagtttatgcatgccccaccaatctatgggtgtgagctcatgctttagagcaaacta

SEQ ID NO: 417360 - DNA, 705 bp, Homo Sapiens
  misc_feature (603)..(603): n is a, c, g, or t
ggaaagtggactaacaactgctgcacctggtccaaagcccacagttgttgtccatcatctctcttctcttccagcaatcttagattttcctcactcttggacagctatcaggctggccagaggtgaatgtatggtagagcattacagactctgatcacccagggatctaagccattagttgccccacatttgttggcatgtatttgttatgtttgctcattggcagttgttatcaagcctggtcattctaagaggtacttttccaacaaagtagccatactcatttatccttattatgtagtgccaattctggctcctcatgtaaacaagatcagttaaccctacctgttacataaccttctgtttttcctgtttatccactcaaatgagaagcccaaattaacaaggtgagagttgcaccctgttagtggaacatttaatgtatcccctggcaaaactcttcaattctccacatgctgtgagcaggacctctacctcagcatggctcaaacttgaagagacagaaagcagaaattctacaactaagcaacaggtatgatagtgagaggaggcattcctgtttccaactcttacttcctgtgntcatgaattatggcaattggagatacagaaacatatattggtgattgatttacacatatcaaatcctggagacagcaccacactgctggtacttagttgagt

SEQ ID NO: 417361 - DNA, 202 bp, Homo Sapiens
  misc_feature (60)..(74): n is a, c, g, or t
gacagatctgaaaacagaccttctgcctggcgcaaactcctctacccccaaaagaaggcnnnnnnnnnnnnnnngtaattaaatataatcttaaagtgtgtgacttactgtcagaaaattgaaaatttgcagatctgcttgtgttagacaaatttatatttgcagagataaaatgcttagtaaaagtttcatatcacatcta

SEQ ID NO: 417362 - DNA, 457 bp, Homo Sapiens
ggaaagaaagtgactttttattccaaagctacgcttaagcggaagaagtataggcttcctgccttaagagtactgcttacttttggagcagaaagcaggcacttttaaaaggcatcttggcatgaatggctcacaggggagggaaatgcaggtggggtcatgtaactcactgcagtgcctaatctactgcgtggttgagctggtgacagctggtgccttcatgggcagaactaggttgtaaacgtggccaaaactctcctggtgggagacagttttgtagcaggcacttcaggttgtacattgactgttgtctctcgaggtgatctcctggtgagagggagttctgctctggagcttctaagcacatagttagatgaacttgccctgtagggagtgtctggaaaaaggaaggtaaaaggttataattgcatgtctaaagagctaagtaggaagtagg

SEQ ID NO: 417363 - DNA, 273 bp, Homo Sapiens
ggagccccaacaacttgaaattctttgcttcttgcttgaggtgttagggaagaaagagtttggtggattgtgcaaaatgttttaagagtcaggcctggcttttagccaatgtttagttggctaaaactctgtcactttgcccaaactactgttagaaagactgggatcatgtatctttctgtgtgctcgagaagaagacaagggtttggtgagaacattgcttttgccataggcagaaaagtcactgaaataacaatgtaaagatttagggga

SEQ ID NO: 417364 - DNA, 356 bp, Homo Sapiens
gggcggtgctggtgcatgaaaccaggaatctatggctacttggaggagaaacacgtaacttgttgcccaaatcagactgcggaatgcttgggatcaattcagatgcttgtagctataagtaaaatacaacccaactaaaattactttttaaatgccctacaggtaggccattccaggatttcttgatacagtggctcaaccggatcactgaagccatgggtggtttctgcctttgttcctgagatttttggtgatgtttctttcacgactgtgtgcttactagggcagttcccggaatcccatgcagatattagagcgtcagtgctgaagacaaactattttcaaatctctctctc

SEQ ID NO: 417365 - DNA, 430 bp, Homo Sapiens
ggagaatcagatgaccttccagagttcatattacagtactacagttaatcaaagggggaagctataagagctaatgccggctgtatatatttggccttgtgctaatcactttactcatcatgacagccttgtgaggcaggtgttaactcctcattgggattccatttggggaaaacaaagtgctttgaaatcacacagctggtatgtgatagagaccagattacccatatagaagtttttaaaagtgtctgccctatgacaccagtgaattttcagacatttacactgaaacgttagtttacaaactgctgtgtttcatcttgctggatctcttgttgctcatttataaattaggatgagagagattaggtagatttaatctaggtggtcccttcatgctcagcactcttacagagatattaacaactta

SEQ ID NO: 417366 - DNA, 546 bp, Homo Sapiens
ggttttgcattatagtcccagaaatatctagtaaaactgcggtagagcattttgaaattaatatagtccaccatctgcattttatcattagcagattataaattatcctgaaagagtataattgaggccatttaagatgtcttttgaatttcccctgtattaattgcatttcctttagattgccttttatgtgcagaagcattttctaagctctggtcttgcagtaccagttgcatttttgtcagtacttttagagaccatcttttagctggagcagctttttggcaaatttatatttctagaaaatgtaaattgtgcttgctacaaatgaggcatgaacagaacacttagtaaccttgatgaggaagtgagccattctcggtgggggtaatcaggagagttagagagcaagaggagaagggcatgaaggcattacatgtgaaaatgaaacaaagccaggagctagcatggaagggcgaagtgccatcctgtcctttctgtgcaggaagggttcttggagctggagcacagggtacaggggtgtgg

SEQ ID NO: 417367 - DNA, 714 bp, Homo Sapiens
  misc_feature (315)..(488): n is a, c, g, or t
  misc_feature (554)..(554): n is a, c, g, or t
  misc_feature (589)..(590): n is a, c, g, or t
  misc_feature (599)..(599): n is a, c, g, or t
  misc_feature (607)..(607): n is a, c, g, or t
  misc_feature (622)..(622): n is a, c, g, or t
  misc_feature (684)..(684): n is a, c, g, or t
  misc_feature (695)..(695): n is a, c, g, or t
ggagcgctttctcacagacacctgccagtttggtgcaggccaagaggctgttttcctcatggccaatcctcccagcagaaggagttttccgtccctccttattcaggcaaaagacaagtccttttgccccagacacgagaaccaagtggtttcttttgtctttgctttaaggctaagctctttctttaaaccatgggaactctgccgttgcccatgaagttcggtttgaaggtatcggggcttctctggtctgacgtcagcccttgcttaggtgttcacgcagctcagtccctggagtcccagtgaggccctggnnnnnnnnnnnnnnnnnnnnnnnnnnnnnnnnnnnnnnnnnnnnnnnnnnnnnnnnnnnnnnnnnnnnnnnnnnnnnnnnnnnnnnnnnnnnnnnnnnnnnnnnnnnnnnnnnnnnnnnnnnnnnnnnnnnnnnnnnnnnnnnnnnnnnnnnnnnnnnnnnnnnnnnnnnnnnnatcagtccgggctttttctgtcatgacacctaagcacagcatcctgatggaaggtgtttagtgtanggcatggagggtgcaaagtacaggaatggaagatnngtattgtanggcatggnaggtgcaaagtatangataagtctctactagctttaattttctaataactacagctgttctaaaacacactttgttngaaatatgaangatgggagatgctgcatga

SEQ ID NO: 417368 - DNA, 723 bp, Homo Sapiens
  misc_feature (373)..(385): n is a, c, g, or t
  misc_feature (447)..(515): n is a, c, g, or t
  misc_feature (520)..(520): n is a, c, g, or t
  misc_feature (576)..(576): n is a, c, g, or t
  misc_feature (587)..(587): n is a, c, g, or t
  misc_feature (604)..(604): n is a, c, g, or t
  misc_feature (630)..(630): n is a, c, g, or t
  misc_feature (635)..(635): n is a, c, g, or t
  misc_feature (641)..(642): n is a, c, g, or t
ggaggtcttttgcctgttgtttaattgggtatttctgattattgaattttaagtgttgtctattttggctaacagtcctttatcagatgtgccttttgcaaatattttatcccagtctgtggtttgtcttctcattatcttgacagtggctttcacaaagcagaagtttttatttttattgaaatccagcttatctgtgtttttcatggattgtgcctttagtgttgtattttaaaaaatcatcaccaaacccacagccatctagattttctcctgttatcttccaggaattttgtgttttacatttaggtctgtgatctactttgagttaatttttgtgagggtgttaaagtctgtgtctagattgatttcnnnnnnnnnnnnngcatgtgcatgtccagttgttcaccatttgttgatgttgaaaatacttcttttgagacaggnnnnnnnnnnnnnnnnnnnnnnnnnnnnnnnnnnnnnnnnnnnnnnnnnnnnnnnnnnnnnnnnnnnnnggctncagtgatccttcccctggtgcatgccatcatgctcagctaaattttaaaggtgttntgtgagatgangttcactatattgcccnagctgtctcgactccctgactagtgnatctnctcttnngctccaagtgctgggatacagatgagcatgcccagcagatgctttctcatgatgcgttgctctgcaaatcatgatattggg

SEQ ID NO: 417369 - DNA, 662 bp, Homo Sapiens
  misc_feature (44)..(92): n is a, c, g, or t
  misc_feature (573)..(573): n is a, c, g, or t
tgaaatgacatcttctaagagttgacagaaatcaagtatgactnnnnnnnnnnnnnnnnnnnnnnnnnnnnnnnnnnnnnnnnnnnnnnnnnttaggaaaatgcatgctagagatcactgaccactatcttaaggactcaggacattcgcttaagagcagcagaaggtaccaatggagtagcatgatcaaactcaacttaaacaattgggggccagggaggagtggtagattatagaagagtgacagaggaggatagaggagagggaggagaggggtataggaaagggaccctatggcaccagcctgaataactctttccactgtgagtgttgagaaaattatttgaaattaacaaattatctactccaaatccatgcttgtggagtcagcactgacgcttagaaaattgatggagacaacatccagtaaagttgctcttgccaatgacatagaaagctgtttgtttattgtggatcgacatgcgtaatccttagaccatgaggctgaactatatagcaatatattgtccaggcacgctggctcctcctgtggtccggcacttgtgggagccnagacgaacgatatgaagtcacatatgacacattttgctacacatgaacctgtcctctaaatacaaaatagcagcgtgtgtggactgtgt

SEQ ID NO: 417370 - DNA, 429 bp, Homo Sapiens
ggctataatgaatgcattcttgagaagttatataaggcatacaagacataagttacaacttatacagaagtttaagatggtttcaaggacattttggctgttaagattccttttccttatttaggcaattgtcagttaaaaaccatatctcccttcatttattatgttttaggagagtaaggagtaatagacactgaatgtttgatatctttgaatttttttcaaaattgaacaactctaattaaaactaagaaagaaaggaccttccttaaatacactcttgatgaacatagttgcaattgtttagttcttttatgtggttctggccatattagtccaaagattttagccacattaatgcaataagattgaatttaagaaatagtgtatagcatgccatcataacaaagtgataaagaagtgagctaa

SEQ ID NO: 417371 - DNA, 645 bp, Homo Sapiens
  misc_feature (41)..(92): n is a, c, g, or t
  misc_feature (153)..(287): n is a, c, g, or t
  misc_feature (299)..(316): n is a, c, g, or t
ggtcttagtcttttttttggagacaaggtctcactcttatnnnnnnnnnnnnnnnnnnnnnnnnnnnnnnnnnnnnnnnnnnnnnnnnnnnngctcaagcaatttctccaccttagcctcccgaatagctgggactataggtgtacacccctnnnnnnnnnnnnnnnnnnnnnnnnnnnnnnnnnnnnnnnnnnnnnnnnnnnnnnnnnnnnnnnnnnnnnnnnnnnnnnnnnnnnnnnnnnnnnnnnnnnnnnnnnnnnnnnnnnnnnnnnnnnnnnnnnnnnnnngcccttcagtcnnnnnnnnnnnnnnnnnnaatgatgaaatggtttggcatttttggcttgtgaagtaaagggatcagttcatttttgtgactgggatttataaaatcattaaataagtgatcatacactagatatttttaaacagattgtaaacttttgtgactatcaacaatttcttattttgtaggagctggtaaaaatagagttagaagagttagtcacccatttttggtcagagtagttagtttgtgctctttggaattgaatgctgaaagacaaggttttcgtatttattgcatctgaatccctcattctctgtattgatgatatggtcgtaagtgtattggggtgggcacat

SEQ ID NO: 417372 - DNA, 431 bp, Homo Sapiens
ggctggaaaactcagctctgaaatgagatctagggaggctggcatcagggaacgcagccaaggtcatggctgaaaagcagtctggtctaggatgtcatcaccagactccctcagtgaacgatttttcagctgtccctttttctttgtgtcactctgaggtttaaagttgtgggtgtgggcatctgattggccaagcctggtgtctgacccagctgctgaaaaagatagctttggcttctacagtggaaatgaggcccagcccagtgccatactcaatgcccctccccaccaactaggcaaggtgttgatgctgggtggccaaaaccatgttgtgaaattgtccttggaacccactggtagaaatatggctattggcaacatggagacaagggctgaagcctttcatggacttctcatcaaaggttactgtc

SEQ ID NO: 417373 - DNA, 649 bp, Homo Sapiens
  misc_feature (158)..(214): n is a, c, g, or t
  misc_feature (598)..(598): n is a, c, g, or t
ggaactctaaaatataacaaaaccaaaattatttccatgagctgaaataagacaatatagagtaaataattcctaaagcataatttgccaaagtttggttgacttcccaaaattaaactcttaatttcgctgggctcacgttttaaaaagaaaaaagnnnnnnnnnnnnnnnnnnnnnnnnnnnnnnnnnnnnnnnnnnnnnnnnnnnnnnnnnagagactagtttcatctaccaaggaaaaagttattgagggcagtcttcatggttgaatatccttttgtcataattcagatgcattgacttctgccacattttcattgcagcatgggctctacattttctgaagtcattaaatttctcgttacagcacaggaaaaagaagataaagtaggagagggatcagtttcacattcagtcctaagcagcaacacggttgagatgtaatcataaaagcaaatatttcacccaggacatggaaaagcggcggatcaccagaaagcagagagtcaaacgctgcaagcagaagcagtaagaagacgccacgtttggagcaaggtcttatttacacctgccatggtcatcggctcgctcttttangtctcccccacccggcccccaaaaagaggtatatgcagaggtaatataata

SEQ ID NO: 417374 - DNA, 203 bp, Homo Sapiens
acaacaataaataaaccagcaaaatatgtacatctatgagtttcctctgtatcttaagcatattaaaaaactataaataaaatggtatctatgataaagatgtataactgatagtaaatatttgaagaagtattagaaggaatgatacaaataaaaaatagactagtatttatcaatctaatataaatagactagtatttatc

SEQ ID NO: 417375 - DNA, 441 bp, Homo Sapiens
ggacgctgagtctctcttacagaagtggtcagaagcgggacccttctgccccgattggcgcctggggtgagggtgtgagtctccccaagttaaattccagaagctctggcttggtgaggaggagtgaactccactctctaaagaagaggcaaggcttctgggcaatggtccaaaaggaggtaaatcattaagaggccattttcaagagttaccaatgaacgacgttaacactgaggtgaagaagaattttaaaaatcaggtaaaatccaaatacatgtgagtaggcagatcttttgctcagagacaacggacctgtcaatttgcaaacttgttagttcaaggatctgcaaaggtttgactgaatctcttttcaaaaatgtaacttacacacaacacaaagactcagcctaccaaattgtaatgtcagagactcctaacgtc

SEQ ID NO: 417376 - DNA, 420 bp, Homo Sapiens
  misc_feature (385)..(385): n is a, c, g, or t
ggaccctggatttgctataatttttgttgtggaattcagatatccagtggagttttctaactcctggggcttctgctgatgagaggaagggcatgaagctgattcagatttaagggtacagtagcagagtaattacaaacagagaacctgcaatcggcatggccagaaatatacatttcaattatggtttctaagggagaatttcataggacctgcctatgatatatctgactatatgtggcctctatggtacgttctttctttcttgggttcatgattcacatcctgctagaaaataccagaactgcacaatactttatatttgttattggcaaagtttctttttaatgttccgttggtgtagtctttacataatacattttgnggggaacatttgactcatggctaaagcgaaactcc

SEQ ID NO: 417377 - DNA, 429 bp, Homo Sapiens
gacctgtactcagggacccaccactacacagctgtacagcaagggaaccacagtacctccttcaactcaaattgcttccccaacaacattgtcaggatgttaaataaaacaatgtttggaaaacacagtgcttcatgcgtagtaacaatgctaaatataacacttaaaatgtgcaaacctcatgatttacctaatcagcctctaaatattatataattctagcccagaaacttacattcctcagtctccaaagggagacctccacaaaacaataatttactataatgtcagtttctatcagcatttcacataatcacataaataaaaactcctgtatcgattataaaactcacagttcattaggtttttaaatatctctaatgtaaagattctcaacatttattcaaccatgattacaaaaagtcctgg

SEQ ID NO: 417378 - DNA, 529 bp, Homo Sapiens
gggctacaaattttttcaaatgtttacccaccaccaccagcaggctatctgcattcttgtctactctgcgtcttccttcccaccttagccaaagaggtgtcccaccttctgctcaaaggtacgccctaacccacaggtacctaactccactaatgtgtccatgtgctctcttgtattttcaaaatcacttctttggccattttctttgaaaaaaggggcatgctcaaatctttacatctttacaataatttcacacaattgtacgttccttgctgctggtcttatctccttccattgcttcataatccactgaataaaagagtgatctacagtcatgatttgcatttccttattttcttggcacccttcaagccatggcagcttcccttctttatgtgcctgctaattcatatttcttccattaaaataaaaaatggtctcccaattcccaacctggcactcatctgaatttacatctctctagtattaatgttagcaactattccttctctgttctcgtaaaacctga

SEQ ID NO: 417379 - DNA, 611 bp, Homo Sapiens
ggacctcagagtgatttgagtctgattattttcttcactcacagatgtgtatcgagtatctgtcacgtgcaatgaagtcagataatgaagttaatagaccatttgtacttcagagggagcaactgtaattgcttcttttaaagtgaagaggagtttgaatttgggtggtaaaagcaaaaaagagggctccctttacagaatgtctgggtaggaagtcaccttgtaccctatgttctttgtgggggtccggttgcccaaacccaacatattctagagctggaccagatcacagatgtctcattcatttgaccacaaggactctgaggccagagagggcaaagcacttattccaggttacacagtctagagttacataaaatgtcatggatgtgaaacacagtcatttgtttctgccccttcactgtagaaatcggaaaactgagacccaaaggcatggtgtgactgactgtatgccacaaaaggaattctgtggccaagctaggccttggttcatggcctccttacctcaatttagggtcctttgttgggtacatttttatacctttaaggatatttcctcagtacagagcaggtagaggagatggagtgat

SEQ ID NO: 417380 - DNA, 251 bp, Homo Sapiens
ggaagctcaggtaagttaactctgtaagccttcttctaaattttatacagattgtccttttttattatatgtctaaatattttgacaatatgtctaaattttatacagtataatttatattaattagaataaatgaaatagcacaggacttggtgtccagaaatacttaactgtgacagtttgaatatttcttttactaatgcatattatgatactaaaatattaacacccagtgagtggaactgtagtgg

SEQ ID NO: 417381 - DNA, 697 bp, Homo Sapiens
  misc_feature (560)..(560): n is a, c, g, or t
  misc_feature (572)..(572): n is a, c, g, or t
  misc_feature (641)..(641): n is a, c, g, or t
  misc_feature (652)..(652): n is a, c, g, or t
ggaggtgttgccagtagcacaaatggaatattaatcttatctcctgtgctgttcttcctcacccgaagaagacttccccagaaataaagaggcagagagttgggtttttgcccttcttacttgcagggctgcaaaactgggtgtccagtatgtttcccaacccaggacccacatgtccatgtgtctgagaccaagtgcagcctccttgccgggttgctgggagcaaaagcggctcatccctggcccagccaaaccccaaacccgcaggtttcgtggggagcagccagctggcccctgaatgaaggtatcgacgaaacccagcgccagcaaatacagaagagagaggagctggttttggctggcccagccaacgaccgctgacaaatatttgtgaatggccagagcagggaagcctaggtctccattgctggggaacgaggcctaactccaagtctgttccagtgcccttagcagccctcttggctccttctcaggcaaagaatttggacctcatgcagttatcaccaccgaggtctcagtggccattcagccctttgtcntcattactacangtcactgcggtccttgtcctgagtgtcatcagccaaggagctgtgtctaaggcgaatggaacagatggnaggtgctgcangtgctgtgtttagtgacggctagctcactctgagccctggcagcc

SEQ ID NO: 417382 - DNA, 307 bp, Homo Sapiens; identical to SEQ ID NO: 301946

SEQ ID NO: 417383 - DNA, 105 bp, Homo Sapiens; identical to SEQ ID NO: 301947

SEQ ID NO: 417384 - DNA, 127 bp, Homo Sapiens; identical to SEQ ID NO: 301948

SEQ ID NO: 417385 - DNA, 387 bp, Homo Sapiens; identical to SEQ ID NO: 301949

SEQ ID NO: 417386 - DNA, 379 bp, Homo Sapiens; identical to SEQ ID NO: 301950

SEQ ID NO: 417387 - DNA, 101 bp, Homo Sapiens; identical to SEQ ID NO: 301951

SEQ ID NO: 417388 - DNA, 183 bp, Homo Sapiens; identical to SEQ ID NO: 301952

SEQ ID NO: 417389 - DNA, 399 bp, Homo Sapiens; identical to SEQ ID NO: 301953

SEQ ID NO: 417390 - DNA, 539 bp, Homo Sapiens; identical to SEQ ID NO: 301954

SEQ ID NO: 417391 - DNA, 521 bp, Homo Sapiens; identical to SEQ ID NO: 301955

SEQ ID NO: 417392 - DNA, 119 bp, Homo Sapiens; identical to SEQ ID NO: 301956

SEQ ID NO: 417393 - DNA, 252 bp, Homo Sapiens; identical to SEQ ID NO: 301957

SEQ ID NO: 417394 - DNA, 410 bp, Homo Sapiens; identical to SEQ ID NO: 301958
  misc_feature (190)..(199): n is a, c, g, or t

SEQ ID NO: 417395 - DNA, 206 bp, Homo Sapiens; identical to SEQ ID NO: 301959

SEQ ID NO: 417396 - DNA, 127 bp, Homo Sapiens; identical to SEQ ID NO: 301960

SEQ ID NO: 417397 - DNA, 506 bp, Homo Sapiens; identical to SEQ ID NO: 301961

SEQ ID NO: 417398 - DNA, 226 bp, Homo Sapiens; identical to SEQ ID NO: 301962

SEQ ID NO: 417399 - DNA, 554 bp, Homo Sapiens; identical to SEQ ID NO: 301963

SEQ ID NO: 417400 - DNA, 109 bp, Homo Sapiens; identical to SEQ ID NO: 301964

SEQ ID NO: 417401 - DNA, 561 bp, Homo Sapiens; identical to SEQ ID NO: 301965

SEQ ID NO: 417402 - DNA, 181 bp, Homo Sapiens; identical to SEQ ID NO: 301966

SEQ ID NO: 417403 - DNA, 112 bp, Homo Sapiens; identical to SEQ ID NO: 301967

SEQ ID NO: 417404 - DNA, 146 bp, Homo Sapiens; identical to SEQ ID NO: 301968

SEQ ID NO: 417405 - DNA, 411 bp, Homo Sapiens; identical to SEQ ID NO: 301969
  misc_feature (297)..(349): n is a, c, g, or t

SEQ ID NO: 417406 - DNA, 482 bp, Homo Sapiens; identical to SEQ ID NO: 301970

SEQ ID NO: 417407 - DNA, 772 bp, Homo Sapiens
tgtctttcaaactccccggcgttattttgtgaggtatttgagggaggatgttcttgtgatatggcttaatttttctaccgtttatcaaggaattttcacgcttaatctttagagccaagacctcaaatgcaaatgctaaagagactaaaacacaacataaatgaatgaaattagctgggtggaaactgtggaaaatggagatcacagagtttgtctagaaaaagacatcactacacggctcctgtgaaatgttgccatgttggaatgtggccaaggcttaacgatttttgaagagaagctggaaattagatttttaaaatgtgatgttaaatgtctctatttttaagaattggtgactagtttaaattttagaaaatatactgaaggcaagaaataagagtatctacagatctggatagagtgggcaggctatcagtttcctttggagaatcgacttcatagagggttaacttagctcctttggtgctattgtaaggtagaatggcattttaacctagatagaaaattctgatgcagttccacaacaacatacgaacaacaactaagcaaaaccggtaagtcaatcagagaacagtgatctaggggtaaaggctcatcgtaaaacggagacatgaatctgtacttctaagacaccatcaatatcgtccgctcatttcttccaggtaattacctgcctctggattggctagtcaaggcgggatttaagggccgcattcttctccgtctatggtgggttgacccagtcatatct

SEQ ID NO: 417408 - DNA, 845 bp, Homo Sapiens
tccaggaggctgctggcggtaatcctgtaccgggcgtgagacctgcgaggaacctccctctcccctaccctgcgctgcctgtgcgatccccaggagcaggcagcaacataccaggagacagtgagaactaagcaaactggcactttatggctgacgatcctgactctatcccaaccaacacccaagaatattcaggtgcgtctacccgtccacgctagactcgcgacactaggatagcagctttagagataacacccgcagctccggtcctcgtggcttattccttcgatttcccggtacggacacccgtcccctatcccaggtcgggaggtgcgtggatggtacttcagcagggcagcctaccatccggcgttgttgagtctcatgggtccccgtgctcggtacacgggctcgtcaacgagaaactgggctgtaaacgtagaggaggcctcaggacaataaccccggaagtgtgatccgcgctagtcatggcctaccccccgtttgtgagccttagggcggacgcgccgagtggttcgcgacatgttaggaagccaattgggatcacagcaatcaacgaatgcctagagcgccaagggggtacccatcgagacgtagagctccagttgggcggaaacctggatcccttttccgcgttttcgccatgcaagtcccctttaagcgagagtcggtcccaattcgggccggccaacgggaagttgggacccgttgggtcttataggggcgccatttgtggcctaataggtggacagtttggtcggccaattgcccggttgaaacatcgcccaaaactttcccctcattgtaattattgagggggcacc

SEQ ID NO: 417409 - DNA, 740 bp, Homo Sapiens
  misc_feature (404)..(448): n is a, c, g, or t
ttggcatgatctcggcccagtggtaatctccgcctcccgggttcgtgccaattctgcctgcctcagcatcccaagtagctgggactacagagcgcccgcctaccacagtcagctaattttgttttttgtatttttagtatgagacagggtttcaccatgctagccaggatggtctcgatgtccgtgacctcgttgatcctaccctacctcggcactccgctaaagtgctgggattacaggcgtgagctcaccgcgcctcggctcgttgtaaattatttttgtcttgagttattttttgttgagaacggagatctcacgttctatcgaagcacgatggctggcagcagcgacagggcatctgatactcggctctattgctaacgctccggcctcccgggttcgcnnnnnnnnnnnnnnnnnnnnnnnnnnnnnnnnnnnnnnnnnnnnntgcatcactaccgatgcctcggctagttttggtattattagtagagatggggtttgtaccagtgttggcgcaagttggtctcaatagctctcgtgacctcatgatccgtccaccttggctcacccaacagttctggcatttgcggggcatgtgagctcactgatgccgtggccaagcctcgtgacattgcttaggggcctctttatttctctgcttggctctgggctgcctgattaacggccgggggttcacttgttcgcttgccttgttttgcctggccctctgccttggc

SEQ ID NO: 417410 - DNA, 1036 bp, Homo Sapiens
gctagctctgcaagatgctttataggaaagagacgagaaggctgtgccctcacccgtgtggagagctgtgtgaaacggagtggcctccagacacagcttttattgccagtattcatccactgatggacatttgggttactcccaccttttggctcagctgtgaacatgggttacaagtgtctgttccagcgccttatttcagttctttccagtatatgtcagaggcaggatcgctgggtcgtttggcaattctgtttagttttgtgaggaactcccatactgttttccccagcagctgcgccattttacatccccaacaacagtccacaagggtttcaactttcttcacatcctcgcccacatttcttattttttgttgttgtgttatttttaaaaaataacacctaatgagtgtgacgtggtatctcattttagctttgatttgcatttccctaatgattagtgatgttaaacatgttttcatgagcttattggccatttgtcgtgtcttctaagacatgtctatttgggtctgttgcccatttttctaattgggttcggattcctctccgttgtccgagttgtcacggaattctctatctttctgaatagtaacctcttctgttccgtatcgtcacagtcaagtaatcttctgagatggagtctccactttgtcgcccaggctggagtgcagaactctgtctcaaaacaaacagaaaaacaacaacgaaaaaccgaggccaccgtcgagagagacaggcagttgttccatgaaatcggtctttctctttgaagtccgagactataacaactgtggcctcagctcaccgatgaaagccaccgatggtagcgcagcctccaggccttgggggagaaccggcagatcctccacatctttgggttcatgcgtgacgttaaccctgtgagtccggcctgcgttccggactccccggctaggaaggtgggcgaaattcctcagggcgcctctctggagttgcctccttgacaccacatggccctgtccgctcgctgatac

SEQ ID NO: 417411 - DNA, 1491 bp, Homo Sapiens
  misc_feature (1169)..(1169): n is a, c, g, or t
gcgagtctcaccttgtaggtccagagtagccgggattgcggtgtttgttgctgtggccttcggcctcctattccctagatcagtatgcgtgagttgcagtatgccactcttacggttgtcacagagatggatgtccaggacttaggacatactgactgggtggaaagcctctagtggcctggaacgacgggagagtccagcctcgatggacagagtgtccatgatgatgtgagccattggtggagagagatgaactccttcaaagatgcttcttcagtgaggacggagttggctgtgcagaagcaatgttgctcgcgcgggcgtagtcgtgtctgtaaggacctgtgcgcatggcgcgatccacgtgtacttggaatgaaagatatctgcatcctgggcgacgctaactcgtcgagcatcgtatcacaactcattgaggcaagacgtcaatccagctagggtccgaagggacaaggaattggctgccgaaattaatcgtaattgccccgatggggcatacgtaacacccatttggggcaacgtggagagattccattgttgaaccgttgggtggattgggggaacctgatcactattcgggccaaaagcgtcgggggttgggaccccaggattgccaacctggggtgtgttcaggggggcatttccatttgcggttttcctcccaacaagggcttctacgggattgcggggcgggcaacacctgggggtgtcctgagggtcttcaacccgttgacccgtgggggtgcacctgggcataccggtccattccttcgaagttatcggcaatgttactgggaccagatgaaaagttcgcgaatgacttgaggaaggtttcgtccccaaattttttacccccaaggcaagtccccaaagggtttctcttcacaaaacaggccttgtgtcaggtctccgatatcccaccttaacagaaatgttcatcaaggtacgcttcaaacgaaagacgccagttgagcgcaaccctctttgtggagggaccaccattccttgaatttctggtgggcgccttctccgattgggagttacagcaacaacaacttggagggcgacccaagttgctaacttgaaacatagtccgtagaggcgggttcaaagagaagaggcgtttccggagctaagtccgagaattncaaggcacacagaaaggccctgttaagctaacgttatagagcaccgtttatacgaaaccggcgcgcatttcaattttaacggcgcacacgacagtttgagttgtgtcccgttccccagtatcaacttggagttccaccgatcggaagcgacttttcggatagtggagaagaccccatttggcaacattggcgttgggaccattggacacagcggaagagtttccaaatgaagcgcaacacacagtggggttggaccctcttaaaccaccgcacgggacatttacagagtttgcccgcctcttggcggcgagcagataacttg

SEQ ID NO: 417412 - DNA, 1323 bp, Homo Sapiens
gcataacgcttcctttcctgagcgccctcccgaccgatgctgactgcagcctgtgaacgacagcggtgcggaacgaggaatgagctgctcagatcttgcgtgcaaggagctctcacactctgcctgtggtgttacgttggagcagcgaaagtcatctcccaggtgtactaccgtgttctgaaaatgctcttgcccacctataggagaccccatctcgcaaggaagttccattagctgggttaggaatgattgtacttgcagccgcgcatcactgaagcttgcgacttagaatggccccatgtgcctggtcatggctaagtggcctgtggttgtgtggccggattcaacaggcgcccagggctcctcaagacagagcaaaagaactctgcttccagggaggagtccagggtaccaaagactagtttattacagccatagtagcgtgcagattccaggatagaccttccttgtcgttgggagacgtattgcaatgaaattcttaagcaagtccaaggatgatttcaagtatatgcttctccaattgggtcctgctgctcatgcatatcaggttcaccgtgtcctttaattcccaaggctttcagaggaatggctggcccgtgttctgcaacgaagaacattcttgacgccctaggcatggttgtggcccaatttggttactttgagacaagggaaaccatactggcggagtacaactttgcttttacagcgaaatgtaagagcgtcaacccgttgtcttctcctgggggttctcttagaggccccctttatctagggtatatccgttccatagttaaccagccgtttgaaaaagcttatcctttggcttcaattatcttcccctttttcctaggagagccatatagggggatatggccccatttcatagcgaacagcgcgcgaagggggcgagacaacgcattccaatccgtatttgctataaacacacttttaactccttcgttatatataggatagagcggagggataatgggccgttggcgttaatatccatacttttgccgagtggaaccccggacacccactactattggcccaaggagtatccatccgcgatcctatacaagccttgggcatttgccaatgggccccttttccacgataaggcacacacggcggtttatggagtcggcagcacaacacactggatttacccaaaaaacaatttctacacaattttctgggggacatttcataaaggggatgtgttccaaccccccctttcatgatttcttggtgtaaaaaactcggctataattataagccacaattgttagtttcagc

SEQ ID NO: 417413 - DNA, 1339 bp, Homo Sapiens
ggtctacattggactcgtgtgtcctgtgagctgctgcctggactagctgggcgtgctatatgatgaggccctggaagtcgtgcacagtgacgctccaagttgccactgcaagagttcgatccgtggtcatgtgcttcttcctggtccgtggatgatggagcgagatcgactactggcattagcaaatggaagctagtcaagggcctgtcgccatcatggtcaggaaacaatgtgctcttgacctgggacacagtcgcaactggtgcgcgtccgaaggaattggcgatgtagtggaggcaggagtcccaacatgtctacgttgtggcctcgctaggtcaagcccgctcatgctcgttgcagtgccgtgatgttacctgtgtagtatctccctatggacccttccgactctcggtgttcagataggcgcgcttgcgccgtgtaaggcgggcttggatagtgaccgcatcggggtctccgttgcctactgggacgctttgttgcacattgtgccatatttgcgttagctcccaacagagaggtgcacttcccttgggctgtggaacaagcacattgatacccattgactgtggacttagttcaggtaagaatggcaacccgttaaaggaggcataaagatgctgtggtagcgcttgggattagaaagggcggaatttcatacttctcaattgcaaatgaacaacccttcttaggggccattcagggggcgttggggtagcatgggctccttgtggcaagaaggccctggccacgtggacccttccttgacaagccaaggattgggccccaagagacttggtgcttaaagacggggcaattgggactgcttgggcacccatttgcttcctaatattcagccctttcctgggaaattccttggccccaaggaagacttgggccaagtatcttgacggcaaacagggacttccctcaaaaggtcaaggtatcgcgtggccatccctaaagacaagggctttttgggcccttggtttccaagctatggagcctggcgtcctttacattcccgagagatcttaggggggggaccatttcacaacgaagaaagcgtcggcacaggggcgcaccgactttggactatcgacttccgggtgttgaccccccttgatttcattagcccttttaccctttccccccaccaattttggctgtcggggaaaattacggccaacggtaccacacaggtcgacactggtcacaatcaatggacgaggagccagcagagagattcattccgtgtgagagcactgacagagactatcaaatcctatggtgagaggacatattgggaagcataaatgtc

SEQ ID NO: 417414 - DNA, 1280 bp, Homo Sapiens
  misc_feature (149)..(149): n is a, c, g, or t
  misc_feature (590)..(590): n is a, c, g, or t
gatagctgaagtcaaagcgaaggacttaaagcacggctcactgacatgcaggtgttgagaaggtgtccatagccacgataagatgaagatcgcgcacggtacaaccctacactttccgagccggtgcgaccagaagcgaactgccgtantctcctggaagtgataattggccacatctatgtctctcgtgagatgagcgcgtctcgcgaggagcataacaatggcttgatcacgtaatgctatcatgtcatggtgttgccgctgtaccatggtgagatctgaccactgtaatgaatcatatgaacgaccaactgaacacacattgtgtcgctacttgtggggaatgctttaaagaccaaagcaaggcaaccatgattcactatccatggctgatgcaaaaacgctgtgatgcagcgatcttgcagtgcgtggccagggagctcagagcgagcctgaattcgagtccatgatgcgtccaggaagaaagagcatatgttcgtactggtgtcctgagttgacggattgctttggggcactgttggcgcataccagaagacttagggagatgcactcctaaaatctaggacgtnccaacgcttggcccgaatactttcttttgacatatttactcatttacttataatactaactccatgttggtccagtcaatgaggggagaacccccactgagagagagaagttgccacttcgagttgcggctttggtaccagttgcagcggacggtcgggaggaaagccatcgagatgcccaggtactaacggtggggcgccaacaggttgtgttgcgacagacggggtggctttccgcgctggagaactcgcttaacattttgactgctgtgcttccccacagggggtggtcattcaaaactcggatcgccacttggccaacgctcccccttcacataggcgaacgagtttggacctcaattagtttttcggtggaaacccaggccggctagcgagatagtagcacctagcggactaagaccagaagaccttcttgcgggacaaggagactttcccaacccaagcgttcctttttgaaacccaattccagaaaaagaacttttttcccgcgaaacaaagaaaacggttcccttgctcagaagcttcccaaggttatagacccttcaatttcacccaccaaaagtattgaccccagatgggtggggtcctcttgggggcacggggtgagcgtcaacgggaaaaaggccacatcgtgcactttgttaaccccacacaaagccgttccaaaag

SEQ ID NO: 417415 - DNA, 773 bp, Homo Sapiens
  misc_feature (516)..(516): n is a, c, g, or t
  misc_feature (532)..(532): n is a, c, g, or t
cctggacttagggctgcaagctccggggtggcccttggcctccttagaagtccaagctgctctcttggagcagtggcacctggttcccaaggttactgtgcctgggaggtcccttcccagtagcaaccacagcctagagacactgcccacagcctggccctctagaatggccccgcccagctgctttggatctttgttgaactaaagtcagctgagccccgctagggagccaggagcgccaggcccagaaaagcagcagccgcagccgtagacatgtccaagatgttttctggtggtgcatcttcagcagggaggcgggaagggaacaggtgtgggcaggcagagctgagcaggggtgcaggaggccgcctccgggccccagatggcatctcaactgtgggaagagtccccctgccccggtcctgcccagcaggctggtgggccacctgaagcaactgtcaggctctggccgttgactcttcctgctggactgaactcatggccaagaattcgttntgggggagctccattntgtctcccccaaaatggcctcctttatttccaccctcaagctgctgggccccggctggcctcacgttggaggggcagaactgtagccacagtggcacctgccagatacctaagctggggctggataccaggtgaagctcttacacatcgtgtcaaggcatctttggagcaccccagggccgtccttaagtagccctcgcttttgcagattgacggaaaccagtcacatgctcaagtcacac

SEQ ID NO: 417416 - DNA, 581 bp, Homo Sapiens
ccccggccaaaccgggtcccttgtccccaccaaaaaagcccccccgggttcctcccacggacctctcttctccgcggagacaagtcgccttgacaggggagacggggccgcagacgacaccctctccccaagatagaaaacacaaagcaccacagagagtgtggcccgataccccagtgttagaggaaagaaggtgttggagggcggtgggttctacgagcgcacccaccaccagcggtcacaagcttcggtgcaacctctttagagttgctgccattacaaaatactgatgcgcacaaaagagagaagagctatattgtgacacgagcacggagagagagacacatatatatgtgatgtataacatatacgggcgaaccagctagccgaccgacaccggtcggccgccctatctctctagcgagagagaaagagaacacaaacacaacgacagagagaccaactaagcgcaaaaagagaaaaaccacaccgagtgatatcatatgaataggggaatatggggccaccatcataggaagtaacacccaccctcctaatacaactggaagggacacaccaag

SEQ ID NO: 417417 - DNA, 696 bp, Homo Sapiens
  misc_feature (393)..(567): n is a, c, g, or t
gcaagacagcctgtctcaatggctcagtccacacggacagagattgaggtgctaggggagggagtcccgttaatccacacactgctcacactgtggacagctgcgtctccacttcaacccagccagctctgccctgcatgagcttggccatgtgagattcagctgcataccgactgtgcgtctgttgcaatgctgcctctttcttttgggctctgaaaagaccgccccctgaggctctatgattgcccgttactttaacagatgaggtcaagcacatttggccgtcactcaggagatcctcgttgtctggtccttctaccaagaatcgttgttctgcaccagctgttgcaaggctcacgcctaattaaataagcccgcgttctgttttgcccnnnnnnnnnnnnnnnnnnnnnnnnnnnnnnnnnnnnnnnnnnnnnnnnnnnnnnnnnnnnnnnnnnnnnnnnnnnnnnnnnnnnnnnnnnnnnnnnnnnnnnnnnnnnnnnnnnnnnnnnnnnnnnnnnnnnnnnnnnnnnnnnnnnnnnnnnnnnnnnnnnnnnnnnnnnnnnntgtgaatctgtagccagctggccagcagtgtaggtgctggggcccctccagtttgaaacatttgttttaaagatgcagaacacaggcaagtactatacttaaaattgcatttttattagaaaggatacc

SEQ ID NO: 417418 - DNA, 1072 bp, Homo Sapiens
  misc_feature (65)..(75): n is a, c, g, or t
ggaagcaaaattggcttaaatcaaggggtgaagtcctcaatcagggggacctcatcttaaccttnnnnnnnnnnntctcagcctaccccccaaaagcccgtgaggcccctcaggaaggagggagcagttgaacaacaaatttagtggcagaggccagggaatgtgggaggtgggggaacccgggctcaagggtgaaggggcaggacgcgtgaaagggtgggagtgaagctgaacggggcaggaagagcttaacccaggttttcataccgtgggggcgtggctgagggtggctggtgcactcgggcaaaggggcaccaaagggctgagggctccaaggggacagccaggggaaaggaggtgctataggagaatgaggcaactgtgaagctgtgtagcagttggctccggggtcaggcaccagccgggttgtccgctggtccaaaaccaggcgcgcaacatagaaaagggtcacttggccccattgtaaactggtggtcatcctgagatagtcctccttgggcccctgaagagaagggcctgaacgacagcgcgcaaggggggcccaacagctcaaggggggtatacggggggccctccaaggggcgccatgaagaacaacgggggcctaccgttgaagagaacctcaaatcactgtgaaagacttcctcgacaacgcgtgggttcacccacaagggagcactatcaaagcgtgcagagacccaacttgtgggcacccacactaagacgattgggggggcccgaacagcgggaggacacctatgggaggacaagccaaggggactgggggatgccgacaagtgaatgtggaccacaaccaaacggtaggcgcggtaggttgttaggcgcgacaccacaattagggaatccaaaaaggggtgcacccccgagcaacgattggagagagggccactaacaggaacacgcagccggctcccacgcgggcaggagaaaaacccacaactttgccccagggggcccccatgccacgggggaataacggctcacggcaaacaactgcgacaaaaggggcgggcaagaggatatagcccag

SEQ ID NO: 417419 - DNA, 159 bp, Homo Sapiens
gcaggaagtcagcatgagccctcagtgaaagtactacgttggtcgtcagaaactgaggaggagtggacacgcgtcccggcctttggaggctgcgtgccaagctctgagtgatgcgtgtcagtgggcacaggaccgcacagtctccagcgaggtacacct

SEQ ID NO: 417420 - DNA, 394 bp, Homo Sapiens
  misc_feature (169)..(184): n is a, c, g, or t
atcaagggggcgccctttttaaccccaaaaggccaattgatgtctacaaacaaatggtggagaggttatatttcgtagggacatctccttcctctccagaaacccccaagaacttgtgatgacaggtggatcgatataaacacattaaggccacttgtagtttttttgnnnnnnnnnnnnnnnncacgcgctggtcccaaaaaacgcctcacccgggtggctcttaaccaaactatagaacaacaattctacaaaaatatttttctcacacaaaaaattaccaacaaaataaacaaaacccctttgccctttactttctaaaataacaaggaggaatttgatttcttacaaaaagcggccttcgataccacaaaacaaatcacgcaggcaacat

SEQ ID NO: 417421 - DNA, 183 bp, Homo Sapiens
ggaaacggggcttccccttcctgtgcctcaccccctcagatgggagtctgataggttagaactcatcactacttaacataatggccgcactatcaatctgccatagagtcagttgtcacccccgtcggattggatcacaccttataacatgcttgacgttactcaatcagttggcccgccctg

SEQ ID NO: 417422 - DNA, 691 bp, Homo Sapiens
gccctctttcatggatttacccagcgatgtggggtcccgctatgcatgctgctaccttcgtggtacagaagtggctcatcctggacctgtgcatgatgctttgtggcgttggagtgttcgtcgactaacggacttgtccgtatacccgatgataacgacccggacgtcatgtaggtcgcgctcgtgtgagtcgatactctcgttaatgatcccctctacacgtccggatagtattctacgtcagcagctccagtgtgttacttctcaaatatggcgctgaactgctcctagccctccatgggactcatggcttcggatgtgttgacgcgcagaaacactcggcgaagcactatcgcaccggtatggttcccctggggatctaatgaatcagaacctagttctgcctttaatgagctatggtactcttgcgatgtcgtgcactgcaaagcatcatcggtgcacgtgacaccagtcacgtctttggcgactacgcgtgggcatccacggctcgtggttcatcctcggagacgtatgcctatacctggggcgcttgagtcctcccgcttgagtggttcccttcctcggattgaatgcgctctaggagagggctcctgctagccatgcgcctgtgcgtgaagtaggttcacttgggggtctcctgtgttaccccttcccttggctcgttctacct

SEQ ID NO: 417423 - DNA, 616 bp, Homo Sapiens
taactcccaagccggggggcatgcgatcccggaagacccattagggagtgtggggagagtatatcggcgctttcttataaaacagactcaaaggccgagaaaactttgagaccccggcggattttatatataaaatacgacatataagaaaaagaacacgagaacctactctaaaagggttaataaccccgctagaaatctccaccggtgtggagcccacaaaaggggagtgagcagcccatcggccatgtagagacaactccactgtggagcacccaacaaagtatgtcccctctcagttgggggaggtggggtgcggggaaaaaaacgcgcgcccacgtgggacggcgtccactgtgagaaccatgtgtggcggactgttaggacgaagatctccagggtgtcttatataaccacgtgggcgtgggggagagcaatactcagtgtttgggcagctggagacatccacacgccaccgttgttatcaacccccaagagagatacctctctttgtgagtggcccccacaagggggggaggaaatatgaggtcaaggcggacagtacgatcaatctcaacgtgtgggggcgaacaattctggcggagaagcctacccg

SEQ ID NO: 417424 - DNA, 1211 bp, Homo Sapiens
  misc_feature (246)..(246): n is a, c, g, or t
ggggtctggagcggcactagtggagaggggggctgccggtggctaaggccgggcggcgcagaggaatccacaccaggaggaagaagccattgatgcaacgcatcgagcgcgcaagatcagcgaaggcgcaaaggtggagaagccggagcgagttcagagctacggtcgaatctccctacggcgtctctcatggccagacttggaagcatggaactggtgcacgctcgacagggcttcatgtcctcnagtggcagcttggaagatccttactgagtccgcttcaaggtaacattgtagggtaagagtgggccgtgtcagagtaagagccatccattatgctgtacgtaacctcgttagccttcaaccactgatgatctctgtgccaaggtagaccaactccgagaaggcctcagacgtaggtagcagcaagatagctttggatgagcaaacagtggcgaccgtgggtggtaagcggcagtggttgcctttccttttgatttccaacctctatgtatgcagaaggcaaattttttctagctcttaacacgtctcggtccactcagactccagagacggcggtgagcaatatccatagatttaaagcggaacaaagggcgatgccccacgaggaggaacccgatcactctcagttggcaccacggggctgtatagctatcaagaattgcccaagtcttgatctcgcagttgtaactctcttgtgtacatttatcctcataggccatgcacattgctatgttttgcggtggaaaaggacgatatacccgtaaggtgcagacactattaaggactgaggtgatcaccgcgaagtccattggcattgggtatccaggtatagggcacctaactagggcgactagggcaacggagaggcggcaggtggtcgaattcgaaggaaaggggtgtggcgaaattcttttatctcacattgcgttggtcataaattatacccgataagtccttcacacgcgggcgacagtgagtattagggtattacaaggttatacgggaaaagttgtcccacatggaaagactttttctaacattgtggtgacaaccatcggcataaattgatgtctcacataattgcacaacatccgtatattagtttattctcctcatgctcacaactcatcatacaattacaagacacactccctcatcacatccctatgattatagggacaatctat

SEQ ID NO: 417425 - DNA, 639 bp, Homo Sapiens
  misc_feature (22)..(22): n is a, c, g, or t
ggaaagacccagaaagaaccanggaaatacagagtactctaatcacttctgaggctcagaggggacaaatgacctgtcccatgtcatgtagccctcttcttggcagagccaagagtagagagcagattctataatcctcagtctaaactcttgacattacatatggcattgcttctccaagtggggcaggaaggggtggtaatgcaaactgccatttcgggaagtggttaaaaaaaataccttaaaatgtggttatcctttacctagtagttctaaaggagtccatgtttgggatccaagaaattcccctgccaatgctattaccttttggaaaacagctagcagtctgtcaaatatgctagatttggggttgacgcccctcaaggtaatcagtgacctgttaaaccacagtatctcaagccttgtaggcaaagcaaaatgttacctgtcctacccctgctcaaagtatccatcatttctctaatgtagtctcacagccatatgtaaagcctctctagcactcctttccaaaatctgtagcttaattatgctaatgatcttcatttatcatgtaggtttacttatcaggacattttcctatttctggtcagatgtttttccagggattcaaggcatggt

SEQ ID NO: 417426 - DNA, 1314 bp, Homo Sapiens
  misc_feature (610)..(610): n is a, c, g, or t
ggtccggttaacctgtagccctacatgcagccataggtatctagactgcagggttgtcgtacagcgttatgttcgcagagtcgaaccggaatgccgagagcgatcgtgagagtggcgcttgtgagagagagaagcgtgatgcttccagatacccggtcgtgagtgttgacaggttccacttgcagattaaccgaattcgcgtactcatttgccccagcatgaacggcctcctcgctagacaccttacaatacgtactctgtgcgtggccagtgcgtgaaagcacagagcatacgtttcgcgtagagccgaatgattctggaaggacaatcccagggaggttaggaagcgtgccgagacatgctactagggagcctatgctcgatgaatctcgtgtctgaggaggaacgctcgagaaccctcagtcaactcgcactagcctctctgagtgcacaagaaaaactcaaggtatgccatctagtggtgacacctgtgcagagacgcagagaagccactctgcaggctcacacactgtcatgtcttgccacaaagttgggcgagctcgtgttgagtatggtcccttcggcgcgaaagtatcattgggcctcctgngtagatgtcgggttttcttcctacgccaaagaggtcctcgaggtcagacagtgagggtcgatacgtctcagtgcgaaaggtttaccacgaaattggtaccacccatgggacattgggcaccaatttcgtaaggtgtacagggcggctttattggtaaagtcaccagctcctatcttagaaaaaatttccagccgctactaattagtaacctttcatgaccgggggaggcaagtggctcatatcttaaaaattatccaatccacaggccaaggcgaatttctccccggggaatcgaagttgctttgcgaaattttggtggacacggagggtttcagggcgcagttagagggacctaaccactttccaccaaaagaagcaacgtttgtgtgaacatagggatggaacatatatcaccacaatgagttaatatccttggataccatatttcactgggagcccttaagcatataagaaatatcatatcattccaatgttcggaggacgtatcccccttattatccgtccacgagacaaagtgaaggatataaaagcccgaaaggcaacgagcaatatcaggagaccaccattggggattattcgcccatagtggaccatgtgtatccacctgtacccattaaattccactactatagggcacgtgtgcctaaaccaaggcgttggcattgttccagacacacacagac

SEQ ID NO: 417427 - DNA, 1176 bp, Homo Sapiens
ggtgaagtgttgcccaacagcgtaaagctctggcttgttctgccaaagttggaatactagttaaaaactgtcccgactaggtcttgaactaagcactgtaaacattcctactagtatccgaacatagtcgtgtgatcatcggatgcataagcatggtaggacgccatattgtgaatcacgcatcatgatgtgcagaggatcattcgatcgctgagaccatcgacctctgcttgctgagctcgaatagtctgtggatgattcaatcctgtgaagcatctggaattcacgagagtgctcgacggaaattgtgaccatgggctggtaggtgttggccactcttgccaagagcctgtccattgctctactcggatgatttggtcgaatctagaggagtctgacgagaaggcaccgaatcggtaagtctacttcctgtggatttgtgatgatgcttgagctagaataagtgatcaccgtcgaacaaagtgcacccgtagtgtatagtagttccaatcggaagacttcgattcttgactgtccttaagctgcttcatggccaagcgtttgatatcccccacatgccaacgcatcgaagatggttgatggcggcttgcggtagtccgtgggttaacatattctgaaagatgagacacacactgtgggatcgtctcggatagaggctccgcgttgtgaagactccatgacccttgtgcacgtaggagcgtagttgtgcgtcgccatcatcgtccccgaagagcccgacgagatgcgtgtgggacttctattgtgggctactaaagttcgcaatgatcgggtcttgggtccgcggtgtcatgctcgccgtgtagggttatcggcagcgtatttctttgggcctcctttggcgtttccgaggagtcgcacttcctcgactcgtgtggcgtgagttccattccttcgtgacctcccggtcgagtccccagtttgggaaagatttgggatttactcaggtagcacaatggaatggcatttttcgcacggcgtgaggccccaggaagaggggaggtcttgggtccaacctgccctgcggacagggagctagtcctcattgatcgcgctctgcggtgttccccttggaccttgtatgcgtaaagctcgtcatttggtgatggcaatgaccacatttcggggtcgtaccat

SEQ ID NO: 417428 - DNA, 1086 bp, Homo Sapiens
  misc_feature (44)..(63): n is a, c, g, or t
  misc_feature (610)..(610): n is a, c, g, or t
  misc_feature (687)..(687): n is a, c, g, or t
  misc_feature (971)..(979): n is a, c, g, or t
ggtatttcgcctgctgtatttgtaatccactcgtggtggtggcnnnnnnnnnnnnnnnnnnnnaaaataaacagatgctctcccctgggaagaggaaacgggcaggggacccaatttgaaaaaagaggagaaaagttcttagagtgtggtggaaaaggcacccaggtttggccgtaaggtgccgtgcgtgaattgtgcttgtgccctccacacgggttcgtgggcactccggacgtgattaaccagccggccagacgtgagggatgtggaaggcacttgagagtggggcgcccgtctccaaggcggaccacccgccaaaaatgtggacgcttctcgtggtggctccttctttgccactctcggtggcttgcctctctgttggccccctcctcgtggtgttcctcctcttttctctgggctcttcttccccttttcttcccctcctatacgagcccgtggctctttctctctcgttggggggtgcaccactttatagttatattgtgttgtggtagacgccacatgtgggaaactgtctcaaaaggaggaacctccccttctgtcccaagctctctttctctgtggacatctctgttgtggagaacaaccnagcgtccatataaaacggggaccacacaagggttttaggaaggagacacagacgccgtttgagccagacactcctcngagcctctccgagggggaggagccttcacccgagagagaaacacacacttttggcgccacactgtgaagtgggtgggggctcgctatatatatttgtattttttttcataaaatgttgtgtggcaaatcttaaccagacgagactatttttcacaagcgcggagtagttgtctccccttttgttatgtaaaaatgtgtggcctattttatctcccccccctatttcgcgcgcgtactaaaaagggtgcctatgtatatccctctctttccccccttataaacannnnnnnnnacaccacggggtggtcttttaaaccaccctaaaacgggggggatttgtgagagagctctttcgtgaaaacgacggaggggtattctcccgcgtgtaaacacccgcag

SEQ ID NO: 417429 - DNA, 1165 bp, Homo Sapiens
gcgcggtccgtcggcgcgtaactgcgtggcggtcgcgatggaggacagagatcgacgcgcgggtcatggagaatggttccgggatgtgtaaagctgggttttgctggggacgagaagctcgtccggatgccgtgtttcacttccgatctgtctgggcgccccaagaaagcagggcgtcgagtgatgcgggctaagtcggagtcaagaacggactccttacggttgggctgagatgagggcccaagagctagagctgttggcatcctttgaccgctgaagataccaccgatttgagtcgatgtgcaatctgtgacacaatacttggtgacgacagtggtaggtaatgatcttggacatcgctactagtcttcttaccacacaggagtcattgctgccgttggtcccctcggatggggagtcgacccaagttgctgtctgaaccgaagggtacctcggcctgaaagacccccgaaggtgtcatagctacgaggaggacatgactgaccattcacgacttaatggtctattgatgaccacgttccaaagaaacccacagggcccaataagtacggtagggccaataccaatggctctgattgcttgttcccttcgtacgcctcctggaggggcatcacaacttggggcaatattgctacaattgggagaccatcttgaggaatgaccagagggggttcagaacctaccaaacggatggaccacaaatacttactcagaagggggattatcaggacgctttctcccacaagtggcgcattcaatagccgtttcattgtgaccttctggggtttgggaccctgggttgaccattgaatccgggaacttaaccgtcacttgaaactggagtccttcccaacttggacgcctggaaggggttttaactagggctatctagacccagagccagatgggaccaggatgacagtgtgaacacgaataccggttgcgcgctggaatgcattccaatagtggcaagaacaccgcttggtgcctaaccagtctcgcccccttgggaactctttactggaagcaatgcgaagcattgggccaccctggcccgaattcctttccttgcgtacctcttgtcgatcaaacgaagcttaagatacggcatggccccggactggggcaaggggtcaatccagaa

SEQ ID NO: 417430 - DNA, 722 bp, Homo Sapiens
ccattgtggatattgggctttagtgttctcattccattaagtatattaattaggggtcatacaagaaatttataatatttccattggactgggtgagaaacagggttttaaaaaccattagcattctctaaaatcagtatcttaaaaagtggagtgacattcttataatattcttaagaacatccagtctaatgggcaattttcaaaggtaatggccacaaaatataacacgggtcccattttaataaactgtggtgggccaatccttaagaagtcagtaagaaatggctggagaataatcagtgggtaatcggtggtggcgcaacgactacgtatgtagatgggtaaaagacacaacggggacagccatcccctgcgcactcttcccgccggtagcggagacacaatggcagccacacgtgcagttcagcaccgagagttccacaaaaagacgacaccaaaaccctccacggggaaacagactcgacgtactcttggggccaaacaaggacatcaacacaaaacgaaactcggcaacaacacaggggaaacatctcgcacaacaacgcgcggccaccaaaccgtacgacaaggacacaaacccggatcaaaacaccagcacagaacacgagaacaggtggatgaggccacccacacaaagggccgctgaacaacccgcgcctcagcgacagcagcagacctcgaggatcagaactacccca

SEQ ID NO: 417431 - DNA, 1292 bp, Homo Sapiens
  misc_feature (318)..(331): n is a, c, g, or t
cgtgtgtgcacaacctggggctccaagggattttcgaaaccccccaagcctctaagtgtatcccctccaccctctagccttcccttagtaacctgtgagaaaatatggcgcctgtgaaaagctcacactggtggctatatttgtggtggttttgaggggtttacggatagtgggctttgggaaaaagagggggtttggggtctatagtgtgtggcccacaggtggtggttcttttatacctctcgcgggggtctacaacccatcttgtgccgcgccctggtggatctctccacaagtgtgtgctgggcatatctaccnnnnnnnnnnnnnnaccccacgcgttgttttgtggccgcgaaatgtaaatatatctttttataacaagcggggctccacaggttgtcggcgcttttcacaaattgtgtgagatatatattagtgagagataaaagtatatttaacgtgggaaacaccatcttgtggggcagagaacctgtgtgtggacatcataaacacaaaaagagaaagatatatcttctctacaaagagacaaggtgtgttgttaaaaagcacctcttgtggggtgaaaagccgagaggcggaaataaacgaagagcagcaggtgggcacatcagagaagaacacttcatctaccacgagagacaagaaccagcgcgctgatactcctaccacccagccaggagacgacaaaaaacgacacaacgagttcgagcgaacaagtcgtggtggggtcgtccacaccacacaagagacaaccccaccgagagcggcggcgagaagtcgcaacgagccgaagacacacaatgagacacgaccaggctccgacccaaaagacgagagggacggggtgctaccacccacagagcaactccccaaccaacacaactgcggaggtgaggaggagcaataactgatgggcaggaaaagccagccaccacgcaggagaagcaacatactccatgtcaaccagaggagacacggagtggtcgatccacacccaacaaaacgtgtgtcgaactgacgaggagatagggtgttgcaagaacagggaagtgatcatcgccttagcgatgataccacctctcgggtggcgcccaactaagaaaagagggagccgccactagtgtgggagatccacacctcctcgccgccgcgacgcccccgaacaggatgaaagaaaaagacaacaacagacaaaagaaacatatcagtgggtggagagcgacattcattacgcgcgaaagaagaacgagcaccccccggagggaggg

SEQ ID NO: 417432 - DNA, 1378 bp, Homo Sapiens
  misc_feature (536)..(536): n is a, c, g, or t
gctctgaccagtgaccgatggcggttggcgggaaccagcgcctctagtgagaggcgtctacaaggtgagccaagaagagagtggttagcgtccaattctcccgtaagaaaggatcggtatgactgttgtagcaggcacgctgtctattgcttgcatgtataaagaacatatttggagatacgacgctcgtcaatccattggacccaaaggaagccatgcatgtgcactctgtatggtactcaccgggtcagtgtgcttgtgacagtgtatgctcttgactcgtagttcgcgtgactcgactgtagacgttcgacaatttgacagcaggaatggtctatacgcctggattcactagagatggatagtccccaaaggggataagaatggctagccgtgggactccagaggtataccacttagggctatcgcggcttctttatccacggtagaagctagagaatggtggtatacccttgtgggtctctgccaaacatagcgcgaggagcgaactctgacttagtcaccgggtccttccnaccgcattgtgagagtcgctttctccattttacccttagaggcggaagctgaggaacaacagccttttgggacctagtacgctccctagttatccctagcctgcttattgggatcccatatgaaacctacactagacacacaagtagtcgtgctcaaaacgcacatctcgagagcacataggcgacggagaaggggaagcgctttgccttatttagtcggccataccaaacccgaaggccagaacgagggaatcccggcccctatatgaagtcccctgcgggaccattgacaacggcactcggcagctggtcgtacaccagtaccgagttgcaacctcggcctgaacgcaaagtggttgccacagaagcccatagggatgggaaccttctcgaagcaccggacaacgcatagcggtccccagtcaaagacttcatggaccttgcgcaattgagcacggcgagttttgagctagacatagggacgccagtatgccaacgacgccgtgtttgggccaacgtacgtaactcttataatacgccgtgggtccccactcgcagtggttcgtttccggatctaaactcaacaacagtgtttcgcaccacatcctgccgttgtcaaagcacaaccgccccccacaatggttgtcttgacaggctttgcggccaaaacagccctccacatgtgtaagtgaccttgacccaccgggttttgcaccagggggcacacggcacaccagttttgtccgttcgtccaaataaacaagttgtctagaacatgcaaggtgaatctgcgtagtaatccaccgcggtgtgtgcgtgtacaccacagtgtcgtcgacaac

SEQ ID NO: 417433 - DNA, 1007 bp, Homo Sapiens
ggggcaccggcgccaacggttccttcaagctcaaccgcaagaagctggagtggccggcggggagctggcgcggagccccgtgtggcctgcacctgcccgtgcccccacctgtgcacaaatgcgaagaaggcagcccctgttggcgcggactggctcccggctgctgctggacaatgaagcccgccaggcgccagaagcctggagcatgctgctctgcacacagaacgggctgctggcgccaaaggaaggacaaaagggcggcaaagggccaacgaagactggcgcgccggccgcgggggcaccggaaaggtgaacgaacggcggccaaagcccagacgtccccccaaaatggtcgcccaaaggggcccaggcaaggtttgaagccgttgtcagggcccgggctccacgacgccgtgccggggcggtgcgcgcttctatcagggagggtacacacgggtatctatctcttaatccgcccaaagaggttgagccagtctaccgacttttcgtgtaagcggtgagacttccaactgcctcgggcgcctggttttgagccttgcagaaggtgagcccttagcggagtctttcggacagaccctttctcagtgcgcgaatgtgtgtgcggctccccccgtgagagctccgcattccctcaccatcggtaccttttatacccacaattccacaccgcagatagcgagcagtaggtacagccggattattagtatcgggcttcggggatcacgtggacgtattgtgcaagcggctatttaagttgggaaagatagtgaaggcctcaccccggtggactggcaccgtgcccacttcacttaattgagtgacacatccatccggaggccccaatggtgtgcccagatccgactcactggattccggtttgacgagtggcgttattacctttgggaatcccacccttaacgagactggccacggaatgtgggtgcgcggcactggttctcgtgcgccgacactttgctcacgataac

SEQ ID NO: 417434 - DNA, 808 bp, Homo Sapiens
  misc_feature (568)..(608): n is a, c, g, or t
ggggccggaagggctcctgcgcaggcgtttgtagccacttttaagttttatcagctagttcatgcttgcgttgaaagagtggtcgtttgcgctgggtcatcactgtgtagtattggggatacttaggtgagaaaaaaacttaacgctagagacgttcacgcactaggtggagaagccaggattgttgccctagagttacagtagataaaagtacctcagagaactgcgggggctcccaacctggacgcttgcaccggagtattaaatccagctagagaatggcatgtgcaaagatacagaggtgacgaaacattgtgttttagaactctgagcgaggctcttggctcacctcctgcttgagcggaacccattctggaagcagggtagaggctagtcctaacgcttagtgtacaaatagcctacggttcatgttaaaataattcggattctgattcagtaggcccaacaaactcgcagattgcgtaatgactgaggcacatgcaatttaattaggctgtctcattattttactgtatgatcttggacaaagtaaactctaaacctcagnnnnnnnnnnnnnnnnnnnnnnnnnnnnnnnnnnnnnnnnngaaaataggagatacacatggtttctggccggacgctgggagctcacgcctggtgaagcccgagacactgggcaggccggtgtggggcgaatcgagcatgagttcaacgaagtctcgaccatcaagcctggacaaactgggtgaaacccatgagtcctagtacaacactaaaaagacaaactaaaccgagggcatggaag

SEQ ID NO: 417435 - DNA, 922 bp, Homo Sapiens
  misc_feature (97)..(158): n is a, c, g, or t
ggggtgtgcagtgcacaaccacaaccacaacgtgccggggtgaggagaaggctggcagctggctgattctagtgctgtgcccagtgctggctggtgnnnnnnnnnnnnnnnnnnnnnnnnnnnnnnnnnnnnnnnnnnnnnnnnnnnnnnnnnnnnnnctccttgacgtgagtttggctgtgctgtgctgctgaccctgtgggaacctgtgcattgatgtccagctcgccgctgtccaagaaactgtctgctgtgtcctgtggcctgatccaaatgcctgggttctaactgctcccctgcccagtcctgtgtttgtcctgaagtgccctctggtgccaaccaactggaatggccaatgaacggcatgttgaagcagacatatgactgattggcctttactcccgtgcagctgtatgtgtttgggccactgaggcaattgaagctggctccagaccatccatgtgtccttggtatcaggccttgctggttgcctggtgctgtggatgatcgctaaggaacatcatccttggtgaggtgtcaatggctgttaccctacattgacccatgtgggcacttgcccatggtggggctgatctttcctcccagttctacctgctgggaggaggacatctggtaaaaactgggcctgatgtatcacatgccctgcctcgctgagctccacagctattgtgcctgtcacttgcctacactggacccctcgttgagtgacttccttacgtggtattccagggtggttggtgctcaacaaaaagctccccttgcagtgaccatgctttggcgatgttgggtgacgtcttggtcaacaacctgtgtcaatccaacgcttggtagtgtgcaagaccactgcgttgggcctagtgtgggcaaggctctttacttgtgaacttttggatagatgcac

SEQ ID NO: 417436 - DNA, 940 bp, Homo Sapiens
gagcctctccaaagaatcgtgacaatctatctacactttggtgtgctatctagttcagcatctccgtattttcacccagtaggcatgctgactccttcattaccgtctacctggggcgggttagtctctccgaaaagagtagaatcatcagcgctttgttgaagcacagtctgtgaagacacaagccatacgttcatccgatggtagtcgctctggagagctccggatatgcacttgctcctagagaatgcctgtgtgggccaggctttgccctagttggagtacgtgaagtatcgactataagaggaaggaagaacaaaagtgcttggctgagtagtgaaagcagagagagactgctctccttgacgtgtgagtatcgtagtgaccaatctgccggtgaagagtgcagatgcatatgtcagtcgaggtgtcctgtggatggaacggccctgtgacaacagtcatgcgaactcaagcatgtgtccattttggagatcaaatcagagggtttacacctatgaagcgtcgtagtgagaaaggtacagtgaactttggctcgtagagtatctgggtttcgaactctggggtgtcgttccgacgtcttggagatgctataggggtggacggattcgtccttccttcaggtggtaaaacttcgtttccttcaccgggggtttcccccggccccttgtcgtccttggccttccaacttgccccaacggttatcatggagacctctcgtggggttttatacccgtataggcttaactttgactttactggggcctaatttcggtccccgctgtgggaccctgagagccttccgatctgggggctgagtgtggacgttgccggtgtccaaaaggcaccggctcgatcagtgtggcctggctgggccctgccgtgcggatggcggctcccttggtcgctgggtattcgg

SEQ ID NO: 417437 - DNA, 1251 bp, Homo Sapiens
  misc_feature (1042)..(1042): n is a, c, g, or t
ggtagtccgctattaaataaggttcttaaaacttttaaaaccccatttggtgaggataaatcccattctcgctcagagcaaacacagattcgcaggttaccccgtggagctgaggaaatagcttggatttggggtaaacattgggtgagtctccacagctttccgtgactcaactcttgcgcgtgcctccgaaatctcactaattccctcttatccgggtgctcagaaaattcttcaccttctccgtggtggctcggggcttcccagaagcttctctctcttctcttgtgaagataaggcatctcagataaaagtgttggggagaatttacaccattggcttgaatactccgattgtgggtcgagaacgtgggcaatgtgacaaatttctcggtgggggggtgatccttctcgaatagagaggaaaactctcgaagtgtggaggtcaccgaagagaggtctcccgagtcttccaccagagttttattagaagcccaattttagccgccaggctgtgcttctcgagcgaaaaaaaccaaaccctctttttttgcccccctttttgggggggtctcccaagtgtaaagaggatgtgtatctccagcaaaagggggtctcccgcggaggggatataacatgtgctgtgggcactcgacaaaagatttttttctctccacagtgtgcgtaaaacctgtgacaagggcttataagtgggcccggagggggctccacatacagaggcttattcccgaaggggccaccaatatctttaccagatagcggaggataatacatacttcattaacggcgccaacattttggcggcaaaacacatttttttaaaaaaccccaaccccccggggggtatcacccccggcccaaggtattctttagttgttacacacccacaaccacaacacttgtggggttttttgcgtggtcacaccaagtgttttggccgaagaaaaaaagaccactattataatccccaattatacacattatattatctcctttattattaccaaaaccaccgtgctggngaattattaaaaacgcggcgggcagtaggagagataacacttttcccccttctgtttgtgatacacacagtgtggggccccttttatttcttgggaggcaaatttaaccctagttgtcggcaacacaactccggggggaaaaaaatacaccgttatgccccaaaaatatgttcccccttcgttgggacacacattggagaccaccgggg

SEQ ID NO: 417438 - DNA, 1442 bp, Homo Sapiens
  misc_feature (1082)..(1090): n is a, c, g, or t
gagattaacctgaattcttactaagtgcagtggagtgacgtgactaccgcgatacactgtattatggaagggtgtacggtccgtgagcagtaagagtgagacgacgcagacgagcaaatattactgtgatcactcgaccagacatattgttgggtatgctgaaaaacaggaagtcctcgagctcgtttcctggtgcgctaggattgtgccctaccaatgttgctgacagaccatgtattgaccacgcacgatgtgaatcttatccagataacagacgtcctgatcccgcatcgtgctctgaatggtgatacgaggaacggcgtagtgattttggggcataatggagattacgtcaagagccgagtcattattttcccgaagacacgtatctgtgatggtcgaaaggcagatacgagttgtgcttgcgtggcgatcatccgggccatcgtagataggcctttgcagctacaggccttcgcttcaaagttgctacatagcagccactgacagtctctccgggcttccatgcttaaggtttataagctagcatactcggtagagcattgcgcagagtttgccacatatagggccaatcgagaggtctatccacaggtctcacaactgtgcaagactacggtccgagtcgtgcccctaggaggctttacataccgctctgaccttttgcatcctccttggacgtcgttcaaatgacccttccccttagcaagggtaacagcgttcgaggggaacattagtactgcggaaagcggaaaacccgaacacatatgtggccccctaagcgttttatgaaatcggccacgctaagttgttatacaaagtcacgcgagcaaattgcgcacagttcgtccctacggcaggtggattatggcccccaatgggacacgtggggacccttggacggtccccgtatggtactcgcgttcaattgccaaatagcacaaagcacgagggggcatatgtgaggacacatttcccacgaaaagagggttggctatggggcgttgacttttccccacggacgacttgttagagaaaggcgcgttacatcccagcgagggagnnnnnnnnnggttgtgcccccaggcttggactttgtgggggttttcacgaagaggaactcttaacattcgcattcacaaacggaggtctatcggccttacaccagcattttgcctagagaatcaattggttcgccttaaacaggtatcccccaaagggaccttagggcgcgtcagcggcatgtcatcccgttcgaaggcaaaccttcattgggtagttaacgccatttggtggatgcacctataccagaaggcaaaggaatttttcgcttagggcgctctaggggaaggcgacaccttcttcggtggagataattaaccctaggggttttatggtaccccacaccaacacacacgcaaccg

SEQ ID NO: 417439 - DNA, 1698 bp, Homo Sapiens
  misc_feature (95)..(95): n is a, c, g, or t
  misc_feature (147)..(197): n is a, c, g, or t
attcatgggcggaggaagaaaccgacgagcaatccatccgatcaggactgcaacgaagagacagagaggaggcgtgcgcccccctcgaagccccnctctccccctctctcactgagagatggagggttcacccaatcgacgggcagnnnnnnnnnnnnnnnnnnnnnnnnnnnnnnnnnnnnnnnnnnnnnnnnnnncactagcgagtgagaggatgaaacacacctcctccacggtacgaggcgagagtgtgcttcatctctctctctcatctctgtgcagagtgtgggctcaactgagagtggaggagagcgagagcgagacgcgcaacagaagcgagtcctaaacctgtctactgctgtgtgtgagaagaggcaaccccgcagggcgtctagccgaacagagaggagcgcgagccacacccccccaccccgagagagctgaggagagaagcaagacacaaccaacagaaatcagtcaggggtagacgccatactatccgccacagaagaagaccagaaaagcagaaacagtacacacgacaaaacagagtgagagcgatacgagagagcagacgagcactaaggaacaacaaacacccgacccacgacaaggcaacaacaaagtatgagacgacgcgaagacgaggagaagcagagagtagcgtccagatctcacatgacggtccagcagagacacagacagcgagcagaagagagagccacaacaacactccgcgagcgaagctatgacaccacagacaataagagatcaacacgactagaagaacgacagaccacgcggcgagatgtgcagcgggcagcccaccgccaagacaagcagaccagcacacagggcaccacacaccccaacgccaagactcaaagtcgagaacagagagaacagaaaccacaaacaacatgacgagacgagagagacgagagccttgcaaccaacacagacgagacgcgcgacagggaggatccaacggtcaccccacacccgcacaagcgagcaacagaaaacgtagtaagaagaaacggaagaggaacaaacgaacggcaacatacaacacacgcaatcacacagcaacgtaacgaacaacacacgcccgcacatacgcagacaatagcacactagaggagtaagtagaatatcaacttctggtcggcaacaccgaacgagccaccggatgcagcgacatgaccacacaccacaagaagagcaacaagagacctcgcgcagcaaccatagatatcgaaacgtagagcaaaaacgacaacacaccactgcatgacacgaaataaacaccatccacaacaacgtgggactaaccatagacaacaagaagagagaacagcacacacgacacaaacacaaggtgccatcatatcccgaagtcgagagaacacgacttacgaacacacgtgaagcaaaaacacgccctcaacgagttggggtcaggtacgacaccaacatgcgtactcgtccgtcacacaaacaagaacaacagcaccaacacacctcgttttgctaacaagatagaatgactgcatccaccactagacgacagaaggtcgagcatgttagaacaaacacaacaccaaccgccgatcgcgtcggcactactatagagaagcacgtagacaacgaatagctacaccaaaaactactcaataagaggagcgagacgagaat

SEQ ID NO: 417440 - DNA, 1126 bp, Homo Sapiens
ggccagactgtctcagaaaaaaaatagggatacataattcggctagtggtagcacattaatgaagaaagggtacttgctaaggtccaagtgattcttagaaatccatgggttcttgaatgttcatcttcatatcggaagagggtcgagatcttataaatttctatcgcaagatacggatatgtgggaggggtatcgataataatgacaaacactaaggtctgatctgttaatagtcctgagtcatgactgagataggcatgggactgaaaagccaacatgcccgggctatcgtagctgagtcacacaaaagcatgggtcgagtcaataccacatgcaactggtcatacccgcaacgaggaggcgccattgaacaataatgagacaacgggtattctataagtaggagcggtattccgtatgtatcttaaccacctgccatgattgacccaaatatacttaccccctcggaggctaaatcaacctagcacttaacggggagcacccaggcggcgccccaaagctgtacggggttcgcaggagttccgggcacgcccaatatgcccctagacacggtcgtaatacgcgtaaagcatataaggccaacggggggttgggctgtacaagggttacgagggatcccgtggggaactgggatcctagggcatcacaaagaaccgcaggatttccccgcctaaatcgttcatttgacctttttatacacgaaagtagtataatctgaccgcttggtcacagctttaaaagatacgtctcgtggaaattgaaatagagggaaatcgataaaaatttgggaacctaatttggacgcctttcccagggaactgtaaaccatggcaccctgtggcttatccttgaacggggatcccacagcagtggtccctccagcgctatccattaacctttgacatttccccaagtggtccacgatagggttgcgaagccatttcgactgacattaaccccaaatttctacgaagtttgttcccctaactagagacttttcaaccgaggaccaaacacgtgcacttcccattgtctcacagtagcaccccttgtggaccgtgtaaccacagaggcacagcacagtttagcccgtgggacatatcg

SEQ ID NO: 417441 - DNA, 1403 bp, Homo Sapiens
gcggcagccggagcccgtgtgcaccggatagcttggccgatgccagtgaagacagcctcgggacgcctagtgcctctgagtgagtgggcgaagcccagctccctacatgttcgagatgcgatcacaggagaacttcagcatcagagccacgcacggcaacagcttatggtgggtgaccgctcgtggagaccgacgatcgctctttggccacccgctagtggcatgaccacatgtgctcacagctcaacaggagtctcccgcctagaacgatgcgcccaggcctacctaagcggccggacatgcgacgaactcgttgctcccattattatgtgttatggagcactcgtcagacttgacagagcgggtaagtgatgcgactgagctccactgtacctgcaagacacagtgcccaagccctccccaattccctgatcccgtagggtgggattgcgatggagtacaggacgcctattggttcaatcgataacctgggtacctttggtgccaagtatattgccacccggggtcggcggcttggcgcaccctgggggaaatggcttgagacggggcgcgctttagcacatgccctcgccccaccaagtaggcatcggagcgactcttatttggactggcacccaaagaaagccttggggtcccacgcgtaacttgggacttccattcatttgccgcccctaggaacacccaggcaccaacgcgggtggcgctactcattgcctgccgccttttttctaacaccgtcgcacgacgtccgttttggacacaaatccgttgcgtgacccaagggtatgacataggctcttgcaaacgaataaacccaattccttaatccaccctttgaaagattacaatatcaaaggtacctattcttcgccgcccccattagccccttttggtgcgtccattttcattaaggaaatgcattacgttcctaatttggccgccgctttcaagtgtatccggtggggacccctaattgtgtggttcacatttcggcgaaaaaccccagagacaggggtcgtaagaggacgaagaaaccacaaaaaagccctttttatattttgcgtcccctttgggagatactgaacccccaatctccccaaaaaaggagccttaaacagcgttggactaaacgatcaagacctttcacaattcggaccttgggttatggagcgattcccttgggtagggagagagtttacccccacggataggtcagaagggcgtctcacttaggagcagaatcacgcaacggtggggaagcccttcatccaaggtgttcacattgtacgaggccccacaggagatggttagcccacaccttcgggacacgcagccgtacacagttagcaacgcaattatatgcctctatctgccgatattgc

SEQ ID NO: 417442 - DNA, 899 bp, Homo Sapiens
gtgcggctctttttattgaaacattagagaaaagtagattcaaacccatgatcaaaacagtcaccacgaaagacaaaccctgctcagcccgtgttgtacaaaatgaaaaggtcagccctctcccggggcacagggtccggacagctcggggccaccctgccaggctgtgcagctctggctgggggcttttttccggctgtgttagccctgctgttggaaaccaagtggactgtcctgcagcccagacaagcccagtggcctttgtgcttttaattgtgataaatgtgcctgctttagaaaatgtttaattatgttggaagcaacttaaactgttggatgcctacggctctctcagaagtttggtgaaagtggctttggccctgactttgtggtagcgtgtgtgggttagtgagtggaaccttcagctttaggttggaaacggtggctgtggagaagctggactttttggctgtggaggtcacgtccctgcccaatgtggtgggtgcctccgagtcactacggtttgtcttccctgcgccctgccaggggatgcgggagagaacgggagacaaagggcgcccccggacgggctgcaaagaagtcggcccacgggacgaaaacacggagacatgggggaccacaggacagaaaggcagtgtgggtcgtcatggaacaaacttggtccccatgggctctaaaaggtggacaaacgagattccggtgaacttaggaacccctggtcctaatggagaaaccaggcctcccatgtacgttgccgcccagctgcgcaagccatggggagatggccaacaaggtctttaagtgaccagggaccacggtcctcagaatgcttcgcggttgtgcccgaaacgggaacaaactacctgttgggaagagcc

SEQ ID NO: 417443 - DNA, 1516 bp, Homo Sapiens
  misc_feature (1282)..(1282): n is a, c, g, or t
ggcgaggcccagaagaagatgacgaggctccagtatccgtaagacgtccgtgtaactgtgagatccggctgcgtagttgtacacgtctaccccgtagatctgccacggctgtggcagaggattggccagtccgacagcccacgactctcacgagtcagccaggaaacgtcgagccatgacgtggtagcgagtacgccgtcacctccgtcgtgtgttgaagcagaaaacggccaggggccatcaatggctctgcgtcgcgcacttggcatgcatcattcgctcttcgccatctaggacgttgcacgcgtgctctatgttgcccagaccctctagtgagggctccataactcagcaaccggggccgtactcttgccccaaagctccctctgttcttacggattcataattcgatcgctagatacacgttgctcaccatcgtctcggtgtgcccccgaaaggacctttttccggcctaccggatctgcagtttgggaatccgaaagtgcaatcgcgccattgagagacggtgccaaagccagatggtactgccaagctgggtgttggcaaccaagtactacgttgaaacgatagtggtcccaccgggagtcaccatcggcttggtatgcctggcggtgctggggcccctgtctggcccagatgtagaaacgcgcccattcctaccggtctacttcatatttacaacaagttgggaggaacctggcgctgttagaggtgacttggcagaaggtgccacaattggcgccacgggtattccaacgagagaatgtcccaccctaccattgtgttcgctgcctaattgaacctaccggagccggcacatttaaattttagacggcgccgacaagcatgcgccaagtgttgtgcccaacttgtcctcaatattctagccctatggggaatgcgtagccgctacacctggcaactttggggtaaccccggtgttgcaccatcgagaaccattttctttgaaaagacagaacctgccggtttgtctttgttctgaaaggctagagtttaaccgggacaagttccagattagtggcgcggtgtcacctcccaaacatgaagcccagtttggcccacataatttggaaaccccgcgttaacacttatgcatcccatgttacgaagttctgcctctcgtggaatccgtcagtttccccaatttcaacttgttccagccaccaccaagaatggaacttcaaacgcccaccagacaattgttgtgtgtgggttccaacaactctatatctgtgtggcncccatgggtgtccatagggcccagggtgtgttgtggacctccacacgtgtgcatattaaactttgacctggacaagcggcgtgaccttgcgtgaattcgaacgactgggttagcgtgttgccgcaaatgcgcccttcaatacagcagaaaaggtatcccgtaatgcaaaaccgatcactgtacatacgcggtccctttacgtctttacagtgctcggagagcaaatgtatcccc

SEQ ID NO: 417444 - DNA, 1299 bp, Homo Sapiens
gcgtgcgccatatctaggtccgcatggtcggaggtgagtgctctcagtgacagaaagcggcctgtgcaacgattcacacagtggagcggtcccatttggtgcaatgcgtacgattctacggtggaagagcgtacaatctattatgcagcgcgagttgctaatgcttcatggcactgtgacatcgtagctgccatctaacccgccacggactgacggttgaatcgaaattcggccgaaggtgcggagcgaccatgatagagtgattccatcatggctggttgcacgctagctggtaatccccagacgggacttgcgttagagcaagcgatggtacttgtcaacagacctgacgcaaagcccggcggtttgtcagtcagaggtcatctaccgtgggaaccactcgagtaccactagttcatctcctagtgggcccccaaatcggtggatgctgtggttccctttatctttgagagcagacttctgaaaccatgtgcatatcctggactccgctatgcttttccgcaggtttccaaagcgcccgtaaattactcgagggtgggtcacgcgagcttggagattgccattatcccgccttggccaggaatgctgccacttagcgaaaaccagattgaactgggtgccttccatctgggtgtttatttgctttgctatgtatggaaggatcaacgttccagcttgcctattacggggcctccgaaggggagcaactccggaggcatgcggcctggaagccatttgtcaattcagtgcccttcaagcggaacagaacacaagatttcagacatgtcatgcgccgggcttggtacgcatcaaaccgggtcctctgtatcgccagcactctcggtgtttaacctacaccaagtttactgccatttagaaaatcctgccttgctcactggcaaaaggatacgagtgggaaccccatggcgtcgtgtaagagatcaaaagtcggtaccccaacctcagatgggcaggcaagcccgttgaagtgtcttgccccagtagggcgcaacgcggacattgctggactcattgtccctgtggcctagaagaacccgtgcggcctcgtgcgtgcctgtctttgccccaacaacaatcctgtatgtgcaggcgggaaagctttccacgttcctgtaggaaccgctatactgtggacgcccaaggatcaactacagaacgtccctccagtagaggcacattgctacctgtgcggcaagcacggcagagcccatgtccccaaagggataaaagaatgtggaggcgggccctgagcgtcac

SEQ ID NO: 417445 - DNA, 1683 bp, Homo Sapiens
ggccagactgtctcagtaaaaaaataagggcaatacataattccggctagtggtaacacattaataaagaaattggtactttctaatgttctcactttttaaagaaatttcccatggcttactagacatgttcatccttcatatccggatagaatgtggtcagagtcttatacatttcatactacgcaagatacgtatctgttgacaggtggtatagaaaaataattacaaaacctacgttgcatctgttaatagatcctgacagtctggacatgagatagcacatgaggttgaacaagttcacacatgacccggctagtgctacctaagtacaccaagcacgtgtgttgcagtccacttacacccctacacctcttatacatacccacgcaagaggatgaatgtgccacatgttcagcaattataggtggacatacgggtgttatctgtaacaaaaggtagagaataggcgaaaatctccggtacatgaatatcctattaacacgcgcggttcatgatttatcacccagagaatagtctattcacccactcgtaatggttagatacaacccttatgtgctcaataaagcgagttgacttatcccaggtgtcggtggagctcaaagctgtaaccatggaatggccaggtgtaatactgggtgtacgggccgacaatgagccgcgttgaaaaacgcggctgtttaataagccgatagagcaattgagacctccaagtgtgtttgggcgcgttaaggattacggcgatacgcggtgggagaattgatagctggcgcgtaccaacgagaacgcggagatttccaacgcccattgatatcgtgtacattgtcaccattgttcatataccaccaacgatatgataaacctctgtacgccgctgggcccgcgcgttaaaagagaacggtccggcgtgggaaattgaaacctgcaaaggagatacacgacatcgacatgtgtggggaaccgcctcatttttgtggcaccgacatctccaagcggtaatataatgacaaaccaatgccaacacgaggtgagagtaaagcgcgttagcaccgggagtatcccccagaactaatgttggttcaccttcagagagtgcataagtcccaaatcagtcctggacacttttttctcgacagctgtggttccaagacaaggtgttgtgcagaatgccgtctgtggactgtacagtaaaacgccccaaagattcctaccaggaagatttaaggtatctccacttgtgacatagaagcaacattgttcacactcgaaggaatccaaacatggcacgagaatcttaacgcctattgaccatacgcaacgttatgagccccctatgtgtagaaccataggacacccacaccggagaaaaacgcaaaagcattgtgaacaccgtgacacggacacaattcatgccagggcgcgcgacaggcacgcgaaacaagcgtgaaggaagagtcagcacacaaaagtcgccgaccccacgtggcggggcgctctatacgccgacagcctcgcgacagaggaccgcgcgatctagtggcagccgatccccgacgaagtgagtggacacaacaccgcgcacgagcacgacgcgctctccggagatgggtcagcacagcgcaatacaacaaagagtcagcctaacgaggagaccgcgggaag

SEQ ID NO: 417446 - DNA, 594 bp, Homo Sapiens
  misc_feature (184)..(185): n is a, c, g, or t
  misc_feature (194)..(194): n is a, c, g, or t
  misc_feature (196)..(197): n is a, c, g, or t
ggaaaggtttgagggtgttgcattgatctcgcataggctgtatgaataaatggaaggaaggaaaccaatctagagaagatactgtttgactccacgctggcagttcttgaactccggggtgtgagaggagccagggtatgtgagcattggagtactgaggttcccagaagctatacatgtctcnncctctgagntnntctaaatttctaggagcttcagggttaaacaagaataattatgttatgggaaggggaagctaagtaaaagttaaaacctaacagggggtcttgttgctggactaactttaacaacgaggatacttgcgttgcgctaaagttcttcaaggtgggacgactacttgacctgggcttaattaagatggggcaggctatcattaactattggcttggacgaggagaaagacacagttggtctggaaacaaaccgtggaagttaagaaaacagagttaaagaaacagcaagtatgttcctttttatagtattacagtttttttgggtttggtttttaaaaaccaaagtatttgcttcctttcagtaagaatgttaggatgacgtgtagtgtatttcactgaa

SEQ ID NO: 417447 - DNA, 1421 bp, Homo Sapiens
  misc_feature (101)..(101): n is a, c, g, or t
ggccagactgtctcagtaaaaaaatagggcaatacataattctggcctagtggttgccattaaagaagaaatcgtacttgtctaatgttctcactgatatnttagaaatttccaatggttacttgaatgttcatcttacattcctggataagaggggtcgagatcttatacatttctatatcaagatacgtgatatagttggagggggtaatagatgaataattgacaaaaaccactaacgttgatctgtaataggtcctcgagtctgaatgagtaggattgggtcttgaacaacgtacaacttgacccagagttatgtagctgagtacaaacacaagaccgtgtgtttcgctcactctcaacacctgacacctgggttactaccccgcaaaggagggaggtgccacattgaacttcatatactgagacacacgtgtgtactatacaacacgtaaagaaggcgctatcttccgtaatggatatttctaataacactgcgtgtgtctatggtttcataccccaaaatataattctttacacccactttcgtgagggtatatttcaccctcaggtcacttaaaccgagtgagtatccacagtttgggcggcgccaaaggctatgaacctgagttacggaacgagtttctgggtaccggcgcgaagatgggaccgtaagaacaccggttgttaaataaggcgatataaagcaatttaaaagtcccatacagtgtgtgcttggcgcctttgtaaaccggaggttaaccgaagcgaactctgtgtggtgaactggattacctacggggcttctcacaacgcggaacccagggaggttttccaaccgcctttagatcttttgctttcgacccttttttctatacgaccgaaagttagataaaatcttctgacgggctttgggtcaccacggctttgaaaaacgcatgcggtctcgcgtgggcgaattttggaaaccgtatggcacagggccaattccgcaaatcaggcaatgtacggggcgaaccccctcattttctcgtgcgggacaggccattttcccaagagggggtgattatggtatatctaaccatttggcgccagcccatgtgtgggaattaaccctctgtggacaaagcgggatatccccccaaggcaagttggcgttccacgttgacaagtgggctaaatcctaaaaataatctcgtgaaccaattttttctatacaccacacggagggtgtgtgccgacagacgatcaacgagtttgttgtgccaggaaaggccagttctcgctgtcccatgacatagtaaaaacccccaccaaaatttcttttacttcggaagtgtctcagatgttacccccaatgtacattagaacagcaattttattttcacattcgcaggaggatcctacaccatcgccgtgta

SEQ ID NO: 417448 - DNA, 570 bp, Homo Sapiens
  misc_feature (270)..(270): n is a, c, g, or t
ggagagaactagtctcagtttattgatggtttattattcatttttaccagggcacactccttaatttttggaaacaaatgtcccttgaaccttttggaaagaccacaccacaccaccaataacagtttggtgctgtggcctcccaggaaaaagaatcgtgcgggccctcatttaccacacaaagttatgaaaatttgtacgcggggggtgcgggcaaacaaaaatatggcaaaccagacaaaacgaaacggagaaactatctcgccctangtcgtttcgcgggcctgtcggtgtgagtagaccccacacaccaaccggacgtgtgtctgctggggctcgcttgcttgccaccaatgagcagggagggggcgccaataaggtggaaattacaccagaggggtggatcaaaagacaactggaccagacggtgggacttggtggggtgctgcaaactacggctagcgcacgactgagggataacccattccacgagctggtgagacgcacctgattgtcgactcgacacgagtcaggagggagagtgaaaatccgccctccgcgccgtggata

SEQ ID NO: 417449 - DNA, 1326 bp, Homo Sapiens
  misc_feature (123)..(123): n is a, c, g, or t
  misc_feature (340)..(340): n is a, c, g, or t
gcgaaaacgtctaatgaagctacccatggctcccttccataaagctgaggccaaagcagagggctttagaggtccatgaaggccgtgttgaagacgggttgtccagcaggcctacattataanataggatatgaacgactcccgttaacgttaatccaacacttaccggacggtacgaacggatacctgctaactccggagacagccgaagattactccgtcgcgtacagagcgctcccagtgagaaaacatatgcttgaacacagtgtatgcataatcattcaatgttatctcggatagaccagctccgatgttctagctcattgtgaattgaagcgantaacgaaggactataggaaagagtaccctttgtggtttccaatagtgtgagttgttaagaccgcacaaatcaaagtcaactctgatgattaaatacacgagcttgtagaaaggaagtgcctgctaattggaacacctttgcactcgtaggaccattacggtttcaaatgcaaccttcatgaggtatcggggacgcctcgaagtgtgcacgaatgaaagggagaggcgtcgagtaagttggtttctgaaccctgtgggcctacactgtagacgtctatcggagatggccatgtggtcgcgtagttgttttgaccccaaaaagcgaacctggaattaggccgagttcaactacttaaaaaactttgtacgctttcccaggacttggccccttataactttccttggaccacttacttacctactactagttacctacttatttcatttatatgcaggcccaaactttggagactaacacacagggaacggaccaaaggttcgcttctaatcttattcatttcagcctacccagatagttcccccccaaggaacagaacagagcagcggatattccaaaataggggcccattgggggaagccgaaagttgtcgtcgcagccgttatatccgccacgttatggtataagaacgcctttgggatgccgccaaaataggaacttcccctctcacagagaggggtttgtaaggtaaccctgtaaagtcaacttacgggagcgttaaaatgctgggtaagttgtgcaggaaatgccaagaagtgtgcgtagacatttgatgattggccatttcaggggtgtgaccatgtggggaaaccccaagaagacgttgggttatgttgtaaaacgttaacattacgtataacaggggcgggggttatggcaaggaccgataaggaaggcgcctgttaacggatataacctggtgggaatacaatctattgtgaatagtggatatacagtgtgcgtaaaca

SEQ ID NO: 417450 - DNA, 1156 bp, Homo Sapiens
  misc_feature (160)..(160): n is a, c, g, or t
  misc_feature (310)..(310): n is a, c, g, or t
  misc_feature (509)..(509): n is a, c, g, or t
  misc_feature (514)..(514): n is a, c, g, or t
gccttagatgcagaatttgtcaccacgcttcatcatctaggtcatgcctggtgccctgcgagggacggtcattatactcgaaacagcgttcatgcgtgatcatcgaccgcaccgtagcaagtccaacggggagatacagaccgtagtacactttctcagntgaacgtcaatgtaatctcacttacaaaggaggggtgaaacgacggaacattgtggtatggagcctttagcatagtagtcccacgtttccgcgcacctaaatttatcgtgctagggtcgtggtccatagctgtgcgtagcctaccaaaancgcatgttcgaactgatggtcctatgcgtgcagattcgaagtggtcttctcctatatcgccatgactcagtacgaccgtctagcagatagaggagcatacagaagatcatatcaccatgacatgagtaccccgagagaagcgagctcggaaagaatcgaatgtcgactcgatggtccatctataggtcacgtgggaatnaagcngcatggggtagcactgcagcatatttgcaacggagtgcctaagcgattataatatattgagagcggtcgagacgtagaaatggtgtacccgcattttcctcttgggttcaatcgggccagcacaactgcatagacactatgggtgggacctacatgtgggagtgagcgtgagaaagatccccagccaaagatcacaagtgtatccgagaacaattggtagccgaaataggtgtagcctaacttgtgtcactaggtccttggataggcctttgccttttgcgaatcaaccacgtttggagcagcgaagattggaatggacggatctcgcacttgaatggcttttatgggctgcatatttgaaggcaatcttaactatacgaatggggcttggtcccatatctcctaactgaagggggggtcggttaccactttacgtcgtttcgaaaagaacaaacccccaggctggagtcacacgaaaaccatgggttcccccgtggtggccttgttctttatcactttccacacgacagactagcactaaggaggggaggttagatggtcccaccaagccagacccgctagtaattctaggacgtggccaaccaattttggcatattaggcagtcttgtaatttcacacag

SEQ ID NO: 417451 - DNA, 1218 bp, Homo Sapiens
  misc_feature (377)..(377): n is a, c, g, or t
gacgacgtgtcgcataatcggcttcttcatgggccaatgagaacactcctgactggaatgcacctacatcgaaaggcgactttcgcccctgataccaggccaactcagaatccctgggagccctgaaagagtactgtgatgacattcgagatgctctcgagaagtacgctcggcgtgacttcgtagctgttgacctgactggacgctaatttcgtaggggtaggaagacatacgtgtgcttggcatccaccgtttcgcatgcgacgttggactggtgttcgcaatataatcatatccacgcatatgatgcctagagtctgctggactaagaacgcctgtcatcgtctcttgagatccaatctcacagacaatctcgntggggcccgcaatgaacgcactgtgatctctgtcgattgaccctgcaccatgtttactgacacgaacttttggtgaggtcgcgatgagaaactcgtgaggggcacgttgcctaagcttccaacggcgaaagttcacgaggcggaacgatggtcctggggtctttcgggactccatcgagattgcctaggaagcatattcctttgtggtccattggcgatcataaggcatttagtgttcctattctgaattgtgggcctttcccaccgaattgcgggctccatataccgctttcaaaacggtgcgtcctgtcaaaagtcttgcccatttctactccacattgtcgcctagtgtttgtggtaccccaggcttcccaagttcgcgtagggattgggcatctacttttgtcactttggatccaattacgtttgcgaacttgcgcgtacaaaacacgtggcaaggaggttgtcaaacccacccagacaaactagacacagagcggttgcgacatggggacacagacttggtagaggagtcgcctccttggtgtcttggggggaaactaatcccatagcgaggtaaaaaccggtataatccttgacacgtgaccgcgcctattccaattcgagtttctccgcacaaaaaaagacttatctcaaggcgcattttatcttaaacaacatccttgggcgggagctttaaagcatttcgcagcggcgggcagaaagaacatattgcgtttaatctccccagaccggacgcagagcgcggattaaaaccccataaggttgccctatggccaaggcggaaacacgtccttgggcgcgcggcaaattggcattc

SEQ ID NO: 417452 - DNA, 1224 bp, Homo Sapiens
ggaggatagagaattattctcgaagtccgtgatctaccttgaccacaggcagacttgcatgagtgctccgagctacccgggactttagtattagcctttgcgcaccttccatctggttcctctgcgacaagaggctgtgttccggaggtacgccctcggttgcaatgccccattaccacaggtatgagtctcctatcgtgtgatcgtctgcgcagatggacattgttctgcgattgtccacgtctcaaatcggtccgagacattgaggacagtgccaatgaaacaaaggctcttcataggtagagagatggctcggaggtgcttcgatccataggattcacgcagtacgacggcttgataagccgcgtgactgggtgtgaagtattcgtcatgtcatgcaagagtaagagaattggttccatcgtgtaatcgctatatgggagcccatgcattggtaccactggggcgtgtccggaggaagctattcctctggcatccaccataggggagcagtggacatggtgcgcccctggaatcaagcgtgaataacctcccgtgaacgattcagtcacctcagaagtaacgcaagggagaacgcttccaaacggtccatccgaaagaagggtgccccccaaatgtcacctgttcgatttgcttgccagtaccaatagagagcggctagcgatttgggcgcgacgtgtatgttggaccctatgtcacactgccttgtagacgataccagtgatgacgtgtgtccccagggattggcttttgactttacccagggttgaaagcggaagggttgggaaccggtagggggttaagggaatggcacgagtggttaggaacactcaccttgacagaacggccttgaaccccaaagggctacgataacggggtggaaacacccactttaaaggcgcgtttgtgtccaaaaatagaaagtcccttgagacaccattaatcaactccacgtcccaccccgtcaacagtgcacattgtcagttgcggcgcttggaaaaccaggaagggtgccccccatgggcggccccgctttgaggagacaatgcggttccagtgacccggaggggttgttataccccgaggtaagcaaccaccgtcagtagtcacactagccgtggggaattgccatgccccattgaggtcagcgtttctggtgtggtgactgtaacaatattctgccaggagaaagagagaccaccg

SEQ ID NO: 417453 - DNA, 388 bp, Homo Sapiens
ctattggctgcgggcactctcaaagggaatctggggacaccgaggtactttttaatacctgattttccaaagggatttggacgatgctgaatcatcttataggcgggaggacaatctttagggtctttcgacaaataagtattgcattgctggtggccaatactcctcaggggtgccacattgtgggaaaacttgtaaaaacagctgacagttgggaaaggccatggtgatagggttttgcggacaaattctcaaatcacaggataattattcagaagacaggatttattccccgagcataaatctgtcaagaaacttgggacagggctcacagacaaaggacagacgtggcccggctcgaggatggcccagtgccctgaaatcgcaa

SEQ ID NO: 417454 - DNA, 991 bp, Homo Sapiens
  misc_feature (601)..(601): n is a, c, g, or t
  misc_feature (607)..(607): n is a, c, g, or t
  misc_feature (669)..(669): n is a, c, g, or t
gggccagacaagagtcaatgagcgacgagcatcgggcacatgtccctctacttggagctatccagaagaaggttgcggacctgtatacatacgcatcgaatggttgaccaaatccagtagcatgtgtgaagcacgcccgtacaaggaatggcttggttcgattggccactggctattgcataacacgtagatggatacgaagatgtgcacagtggcagatcggattattactcggccaggaccataagacgtgcacaggactagacatatcgagtgattgtcagtaccacgtgtctggctctcgggtggacaacagacggattgaggatcgtgccaggtacccatcgagtgacacgcagcaggcgatcacacgctgatcaatagcgagagtgatagagtaacatcgccatccgacgctcgactcaaacttatggtccaaggaggcgcagcccctcgtgaacccttggaaaccacgcagacaaggctagcatcgtagttgctacttgggatgaggcgtagattatctatacgcttggtaatccttgctgtttccttcccaacttgggcaccaagggttagtgtaatacccacgatagacacncggtcncattttggtgtcataaaccacgtaggttcgctttatacagaggatacataacagggcatgtngcgtacccgaatcgcatttagaggacagaaagaagacaaagaacaggataccccgagcaatccattcagaccacggctgaattaggattacaccttaccccgctcgaaaggagggggcagaatcctaacaaatgtgcaaccataccggggagagtgaggtcccgcaaagaggaagatttcggccgccgaaattatcggacgctatccgaggcagggccctatcggttaagaagggttcctacttccgttgggagtgaatcggtcgaacggccaccgcttcagcgccagtgcgatctttggtaaggcaccccgccatccaaag

SEQ ID NO: 417455 - DNA, 1093 bp, Homo Sapiens
gccaccgctccatgtgagcaggtagctgcttgtctgtctcctgtggaacactttgcctgttcgagctgggaggcgttgtttccaggacgcgtgatgacgcttcctcgtggatgttgggatcggccagacctgcggttccgggttctcgtgccagtgcgagagacgcccgtgagtcgcgatccataagcgcttgacgtgccctgtccttattcccgagacaagcactctgtatcaggacctctaatggagattctacctgtcgctggaagatcttaacagtctactggtcgccccttttgaaccggatacgcacgatggctaacgagcgccaatagaatatgtggtaagttgtcattgggtgccacgcgtggacctggaattaggttttgtagatcgaaatagtgtctgcagccgtgaagatggacctctctacgtgttacccaggacctgaatatgactccaccacgcatagttgccacgaaggagaggccttgccatcacggccccggcggtgggacgcccccgttgggcgagcacggaggacggacgaccattcggcatgaacgagcccgagtccgcgttgctcccctcgcaaattcgcatgccactccccctgctcgttgcgaaccacgcatgatttgcgattccttgtccatgctacgcccgtgtacgccccagggtggagggaccacttatcaccattcgcggcgaaaggcttaacctggggtctcgtgcccggtattaccgtggagagtcggtggtcccttttccgtccggggttctcccccttgttgggagaccgaggcgcccaaacacgtggtgtctttgtggtgggacactattgcgccaaccgggggtaatctttccccgcaccgttggcaccgccttccaaaaggcgatcctgtaggtgcgttttgtgggggccccataagcggttgtcgcccacagatgtggagcccccttttggcgcccgctatgttcgccattcgcggttgaggtttgcgcgctcttggacctttcgcattgaggcccccacaggccttcgggggttacttcccttggccggttcgccagggagcctccgggtttgtgg

SEQ ID NO: 417456 - DNA, 559 bp, Homo Sapiens
ggtgtgagtgcccaccacctcgacacatgtttccaaaagcaccctggccagagcggtgagtcccattcacctcgagactctggccaaggtgctttatggaaactaatgtgtcgatggaggccgaatgtttgcaccaagccaagatagcctggacgccgttggcatcgtagagtgaatcacaagccagaaaatctgatagcgcctatctgttctgccctggcgtgcctcagagcctaccaatacactgggtcatgtctaaaggtcatcgtatgaggaagttcctgaaccttccttagggtagattgcaaggatacaagtggaacggcttacaagaagacccaaccgggagaggctgttattgctccttaggataaccttaaaaggccctggaaatgatatctaacaaagggtctactgccctcctcacccgacatgacgagcttggccaccacggcccaacctgaggaaaccagtccgccggtatcccaccagcaggggggcccgtgcatcatctagtagtggaggtacatggtatcatccacggccttcagaaacatcc

SEQ ID NO: 417457 - DNA, 686 bp, Homo Sapiens
ggaagctacataagtagaggcccttgggcaggttcagccaagagctccagccaccctgtgaggggtccagcctggcctgcaaagaagtggcagtaggttgtcctgagtatggctggctgccagctgtctttagattgaacctgcactgcccagcttgttggcatgtttggaagtacacttgtcctggggtgtcccttggtaagcttcctagtgtcgtttgctgagtgtcatgcgtgtccggcggggcagggtccctcatcccaggtgcaggatgactgctggcaggagcctgagtggctcagcccttgagggcgatgcagaggggtgggtggtggtctgcctatgccatgggcacctcgatgcacgggctggcctgccagacttccttgggaactggctcctgggttcccctccctccctgctcagcatgtctagtcctggggaagcttgcaactctggctggtcctcctcctcgagccgttttgaatcatttccttgggggtcttccctgatgccctgtgctgctcccagagccttggggtcagcgttgtgggtagttgtgtgtgcatcataagtcggttctgggctcctgggcatctgggcagagcccatctgtgtagccagcagtgtccttgtgcccatcattggggcccttggtagaacagggaaagtgccaggggtaacag

SEQ ID NO: 417458 - DNA, 1400 bp, Homo Sapiens
  misc_feature (1084)..(1084): n is a, c, g, or t
gcggctgtgtcgtgtgtatgttccaagcccatggagtgctattccttatgatacagcatgtgctggcacgttactgccgaactcgttaactccgtaggttcagtcaacacgcagggcgtatacaacgctaattgtaagatagaggtgctaggacacatgtgtgaaccgtcagtattctcagtcggcgtggcgcgttgtgtcctgatcaagtgtatgcgccaattggttcgtctgaatgccactgatacgtcgagctccgtgtacagggtcctcgctcgtctcgcctgtacaatgtatccttgtgcatcccttatgcacttcacctatcatccgtgaatagttgagtagctttgtctgatgctggtgacgacccatggtatcagagcagcgagcaatgagcatatgcctcgtctaacctatttatttccaaagactttgtgaggttgtcccttccacgtcgtccatcattgggcctagtctactcgctaaggacggttcgtggaatcaatgccatatatctaggatcttcgcagaaaagccgtagtgcttattacacggggtcactgagagggtaatacacatcaggcgccgaagtggaccgcctacaattgtcaaacgcgcgagcacagacaccatagactgaagacaggaggaaaacccttacacatttgtctaaatggggtacccacgtacaactattcgtagtaggtttgtccccttgcgacattgagggtttcagtacggcagtgttgagaacactccaagaaggcgttatcctagggaataccccttattggcggcttagacacttattggggcattgcgtcctatttttgaacattccagtcatacgttttacactgggtccccaagaactaattgcgtgcctccgagagagcatttggcatagtgagcgcgcccagtagccaattccctgtgagatgtaacgtggaaacttatggcgttttacccattgacagttaaagcccttttttaaataaccatgaaaccgcaggtgagccattccgatgtaaacgggggacacatcctcgaggattgccatgttcgaatgcttccccacatntacagaatgtggcactatattgggtacaggaagcatggaccacttaatgtcgtgcctgtggggcacttccgaaactaacggataagcagttggcgacagggcacaagggtaacacgttcggttatgaacgaaaacgctgcactactgcgccgcgggtgtaagtcgcgagagcgataggttaagccggacccagttgaagcggagcatttactagttgtgcgtatcaaaacaccgcctccttggagcagaagaatcccccactttagggtcattagcacccacatattgcagtgtaggaaataacatccgccgttac

SEQ ID NO: 417459 - DNA, 845 bp, Homo Sapiens
aaaggaaagggctcccatttggttggcccaggcgggagtccaggggtgcaaggatagctcatatataacctcaaatcttcgggcttcaagccatctccctctccgccatcagcctctccgtgagtatagcttgtgggaactgtgcagtggtgggccaccactcagtgcctagcataatgggtagaactccttttttttaagtgttcgtgcattttttcacagtaattttaacaatatttctctcttggattccagtgcagttaataggaatattattcctataatttaaacaaagttagggaccttttcgcgacccaggtgcggtgggcggtctacagtgcctaatatatcccagcacacttttggggaggcccgaggtgtgggccagagtcacctgaaggctcagggagttcccagatccagcccggggctacacattgtgtgtgaaaaccccccggtttcccatataaaacacaaattacaaaatattaaagcccggggcatttggctgtggtggggccgcctgtgataaatctccccaaagctaaaccacagggagcgctgtgaagtcaccaactcggcggtgtgaaccctgtggacagggcacaagcgtttcgcgatttagaacccgaaaaagtgtgtgggcccattgggagcaaatccacaagacctgttgggtgtgcacaagggaagacagaaacacgtgggatttctcaggacaaccaaacgtaaagcgcctaaagagtattacacccttggtgtgggagtgatttctccaaaagatttggcggaccactaaatcaacctaacatatagggaaacttctcggcacagaattaagcgca

SEQ ID NO: 417460 - DNA, 896 bp, Homo Sapiens
  misc_feature (363)..(415): n is a, c, g, or t
gcaaggatgaagtaagtgtctgcgttcggctacctcatagagtgccatacgccatgcagggtgtctgtggcccgcatgggtgggtgtgctgcccccgctaggctcctagcagttcagctgaggctgcgctgctgtcaggggtattgagagccggcccttcccatcagtgccggcttggtgttgatcccattggcctttggaagccacccaatcaggatgaatttatattcagaggtcactgtggagaactctgaggttccaattgagttctcagtcaatctattttggtcagaacaataattaatagatgaacaaggtgacccagatttggggtcgggcccaagtctgccaaccacactgcgnnnnnnnnnnnnnnnnnnnnnnnnnnnnnnnnnnnnnnnnnnnnnnnnnnnnnacacggttagacaggatgcttctgagttggcttccaagccaaaagttctgtaagtacgtgtgagcagagccgtggactcaagcacaccaagtttaatcagagtttgtctgggtacacctggttggcagactgcgcgcgggaaacggaccagccccaattaaccccaccctagacgggagcctggacggacactccattcttaacacacatccacgacaacaggacatccatacactgctgagcgcccgaactcacaaatccaagcgcggggatcggaggaacaaccagaacggccacacccacaaaacggcgaagcgctaccagagcaagaagcggtacccctggcccgcgctacagcggcagccacaagcaatgcggccacgatcagcaacggaacaataccccagggcagcaacaaacccggggaaagggcaccagcacctacgagagaccggagagcacagcacggccgcgccccacg

SEQ ID NO: 417461 - DNA, 784 bp, Homo Sapiens
gggtgggctggaatatagagttgccacagacgaaagacgcgataggccgagacgcgtagcttgtccctagccagcacgccgtctaagtggctgttcttgagggactgctgacatcccatggcgtttgggcttggcgccggtggtggggctgatccggaagggaggcgcggtgattgttcccctgtcgtgccgatatcatccgccggtgtcggggagacttggcggtcgtgcgctctgggagtgtggcgttgtcctcgttcccgtactttggtggtggccttttttcgagcgtgcagaacgagtgagtgcctgctgtgtgccattaggatagaccggcgccgggcaactacagcattggtgccataaggcagtcaagctggttgcacaccggcggttcagcacaactcatccgatggttccttgggcaatcaattacttacacttccggcaaaacatcccttcgtcccaatccggcaacaggcaacggaagaccaggatgtacttgtgactgcgagattttctcacatgggcaacgcacctggccaattcggcgcccccgtactgggggaatacacaaagcccggggcctaggaacagagaaaactcgttcttcatcaccggaactcgttgggttggacaatcgcacttggaccgggtccgtgtagatgggtataaagactacctgaacctcagcagcgttgtcgcgtcataaagttgaggcagtcagtgtagaacatggggtggcattctcggtgacgcacacatgaaaatggggtccccgagg

SEQ ID NO: 417462 - DNA, 1487 bp, Homo Sapiens
atttgggaaaagccttggccaaaaattttcaagggtgggccaggggtcacgtgtgcaaacattcgcaccgggtttgctccggtgtatccccaggacaaaacaagagttgtggccattcagcagcaccgggccaggggaggttgcactggggggtggtccgtgctatgggcgtgcgggatccggatatactttcttggcttcacagtccttcttaataagagattctttcccttcataatctccacaagattttgtgagtgctggggggcccttgtgtggccatccaacacgaaccagagaataggcggttaagagggctgttgaaatccaccgtgggcgcgttggtattgtagtgtttcctccaacacatcatcgcgtcggttatacagcggtgtgttggtgccctctcgtggataaaactccacaaataacgagtgggccgcggggcgaaattcctctctggccctccacaaagagagcgcaccgagagaggggagtctcaccatccgtggagagacaccacaccagtgccgccgcgggcgtgtcacaaggatatgaccccttggtggggtgggccccaacggggtgtgtgtgggggctacctccaagcgctatgagcggaagatatgaaagcacccacaggggggtcaccaataatcccttttgagaccacaagtgctttgggtccccacagcacgctcaatatggagaacaaccagacgtcacatcgacggggtgttgcgcacgtcgacagtatctggggcggcaagaaaaaaaagcggcggggacacacaaagaagaaaccccccccaatttgctgtgagaggtagcggatccaccaaacattcgcggggggaacacagtgtgtgtctttatcttcgggcacaccaaccacccccaagagggagggatcattaccccagaaagcccgatgaggaaggggtcaaaaacccgccaggagaaaaaactccccagcaaaacaacaactgtccggggaccggggtttggtctcccaacaaagggacagacaagggggccccacgactcatcaggacgaaacaatccccctctgttgtgtgatgttggggcgcccccaaaagaatgaaatcgtcgccccctcagtgtgatggtcgttccccccgtggttgttggtggtaagacctcacctcaagaggaggcgcaacaggggggtatcaaccaatcaccaagaggagaggcacttagtaagagggggcgccaaactgtgtgtggcacacttctctgggacgagcagaaaatacacgcagcacactttcactacaaccaaagcagtgtgggggtgtagtgaacccctcagcaagaaagccaacggctgtgtacagaaagagttcaccgaagtgtgtggtggcccacaacaccactggtggagagtacggtctccaaaccaagtgtagaagagagaggctggtcgaaagatctgcagaagaagaggggggaggcagaacaat

SEQ ID NO: 417463 - DNA, 791 bp, Homo Sapiens
gcacagtggtatctgtaccatatgagaagatgctgcgagacaatggtcgtctgtggtaactgcaggggcgttccggaaggtgtgcctttaaacaccccgatgaactatgatcttgtgaatgcctgaatgtgtgattttggagtaacaaagcagggatttgcattcatcagttagagagagcgttttttagagactcgaaagaagacgatgtaggtggtcgtgtgatggtgatagatgctgacaggtcaatacgtatctccgagtgtggaagttgtgtggccctattcaacacgttgaatgagctgacatgccgaccaagaacgagttcgtgggtcagtattcccgtgtaaaggtggtcaggctgatgagcagatacaggggaacggaatcgtgacgatgtgcctgattattatcgaatataacccaatctcaccgggaacgtccagcaattcttccagagaggtgattgaaaggggactgaaagtggaaggtaccaagcagaaagagtgctactcaggtatgtctccgttcaggagtgctaacggtgacggagccttgacatgtttgagggatgacgtattgaatgtatgagtgaattaattcttccgaggacgggtacttagagagcatccgtaaaagggccagtgtggatcgatagcaggggagcactatccgaagatacgcgcggtgatactcgggcggttgctgggtgagagccgtgaagagttgaggagaggttcgaacgttcgagagagaatgtggagtgctcggactaaatgatgtaaggtaac

SEQ ID NO: 417464 - DNA, 1445 bp, Homo Sapiens
ggctgactcagcgtatgtgaggatcagcttcatagcagcgccggctgtatgtacgtggaccatccgagagtggtgattgtccctactactagcctctgtgtgcgacaccagtggctgttatgtgcagtggcgtattttgcgagcactggggtcactccatgatcgagtggccgcatcatatggacgtggaaagtcgtcgcttcgccgccatcgaccagtactcttgcagtctggcatgctgtgctggactggtgagcgtgactcggagtaccttcgattgacagatcctccattgagacgatggctacagcttcatcatgcatggcccgaggcggtaaccctcgttgcgggcagaaaacttcaaacgggcccaattgcttgctgacgtaccgggccgacaccatagaacacgttcgagaaacacgtgaagcataggggcaatacgctcggacatgcgaacacgttctttcagtcttgtgcacttgaccacgaaggcctactggcagcgtgccccccggattgtgctgccagcggatccacgtcaagaccacgttcgagagcagaggtagaacgacagggctaccgctgatggtggattcgcgaggacgaggcctgcctaagagttatcccagcggtagacaattcgctgatcgcctggggagcttactagtgcaaacatcgttgttgcgcgtggagaagttggcgaacgaaaaaaccccatatactctgatcacaatatgtccccaattcagatttgacacaacatggttggaaccagggtagggaatcaaattcccggacaaggaatgcagagccttgctacacggcgcaagcgacgaaactaggacatggcatagagatcaacagcaggcaggggtagaaggcatagccttgagattggtttagttcctccgggagacacagttcagacaagacggtacgcgggcgaggccagcgcacaaccgtggaggacatcgtagcccctgggcctctagggagggctcccccacagaagactctaagttgaaccccaatcagaagagcactccacttcaggaccaagcccgccccaatagaagcccggcaaaatgtgtaacgtacaagactatagagtcgcgaacttcggtggagtatggtgctctcccgagaaaccagttgcgtggatcttatcaagaactaggtacccaacgtccaatttacccaagcaacaggaagtgattgcgaattcaaacagcggaagtccacgagaagaggtttacgagcactagcagcgatttgagagtccggcagttcccacattgcaggtacacaagacaggtacgcaagatttgactatagctccaagaaaccggggagcatccgaacgacagcagagacgccagtataagagatagctggcctctgagacgatgaggaagttaaaactctatggcgacaactatgga

SEQ ID NO: 417465 - DNA, 1277 bp, Homo Sapiens
gactccacattccatacttaataacagtaaaaccttatcataataccatttataccagatatagcgctataggacgattgaaacttgaacgcctgttacactattgtatctagatagcggacaaggagtgcaaagagtgcataacactaatcactaaatgaacttatcatgtagctaaggcactaatacccttcatgccatacatgcaattatgtataaacttagttagttcaactgtagcagccgagaaagtcaaagagcctcacgaaccccagaagcacgcgtaccatggaataactagctaacagcatcaacagccggtacatatcggtcgtaatgatatgcgtaggagtaagtaggtgcatacggatgttaataagggtgacgaggccgtacagcagccgtcagcggagcaattaggtgggatagccccggttggtccgaatcattagagattcgtatccagttcaaacttttgcaccatttagcacccactgtaacacttctcaatttgggtcccccctttggtacactttgtctaaggttcggtagaagtaagcggaaaacggagtgctatcagcgtacgtatctggggcaacgtagcgccatgtggtaagccatgtaggtacgtgaagcagccaagttattcaaacaatccccaatcaaggtcacgagtccatttaaagggctaagaacaagcagatcaaacgaaatatgccgtgcaccacaggccgcttccaaaacgacctccaagataagcccctacttaaacactcccccaaaattccctacataaaacatgttaatacatctgtacgacatccgcttacattatggcgccaccacgtatggtgcgataacctacaagtctctcatatctacgatccgtgaattacgtaaaggtgactccctgaatctggtttaagcgtataattacatggtcacacccacttggtatacttaccccttttgtcggtccactttccgcggccgttaaggtgcccgtgaatgtttaacaacaactttcttggaaaaccctgggttggcaaagtgtgagagaacaaagattctcaaaaagaaggaatacctcaaactaaattccttaaacccaaagttccgaagcctcagaggtttataagatttaccactctccatttttaaactggtcttcccaactcggcaaacaaaccacgggagcatctgccagtggccacctattgggtgcacattagaggtgtgaaacgcgcggtttgcacctaaaccacagagcacaacac

SEQ ID NO: 417466 - DNA, 1359 bp, Homo Sapiens
gataaaattcatttattatcattctatattgcagaagagtggcagtgaaacctgtttaaggagtggcgacgctccgatgatcgcagtgtcagttactgacttgcaggttacctagatcaccgagaggatctcccaatctggacgtgtgtacttgctcctcttgtgggaatttcgtcacatttgctaggagaaggtgcacccgcgcgtcacgttggccatatctggtccagctcgtgctctgtaggcatgcctggagatgctgacactcatttagacatatggttcactacaaggaagacttgtactagttcttgtgactaccacactggtccgattgacatcatacgtattgaactttttcttgttggttgatttggaagaacttcgagtagatagttctatattaactggagtatgggacgcgtacataggtgtgattctgtaaggctttgaactagtaggaattgagtggcgtattggtgagctagtggtgtggggtactaacctgcgtctgtcgtttgcatatgttcgattctcccctcgactttgtagagggacgcatactagagaagacccaattaccttccaactttttcactttgtggccccaaatattgcacttttgtgggatcggtctgccctcttaattgtgttcccttagtggctcatgttctttcatggagagagacatctagagagcgagactcgaaaactcgacggttgttctcctttgctaagcttttgttaaacaacttaccactattgggcttaaaaaattagagcgagaaaggtaacacttccagagcattcagcattggaggatcggcctcttgctagagcaggggccagtcacataacctatgtgttggcgagggcatgagcgtgaagacagaatagccgcgagcgtttctcactggcaaagagcatgtgtgtctacactcttggtggccacacgaggaaggtcggggcatctaactctggagttcgcacaagctcatcaccttatttccatcgcggtcactctggggtcacccttcccagcagcggcaccgtttatcggcataagatatatagaagatcggtcccaacaatttgcaaatatgcccttggagaacagccgcaacttcgagtgaaattaccttccgttgtcgttgagattcttcgttatggccgcccccaagtatggggagggcccatggcgttcgcgttcacgaacattggtttggggcgaattcccgggaggtctggataagttccacgatacaggtcatgttggatgcgactttccccaagcgcagcgtcgcatacaatacgaccaccacagggaatgcaccgacatgacacggcgactctccgtaa

SEQ ID NO: 417467 - DNA, 410 bp, Homo Sapiens
acaccatttccccttcggatggcgctttccccctgggcaggggcgcaagacgccgggtctacaccccagaagactctaccacgaggccgccgagccggcgatatggcgaagaggaaagccccctatacaacaatacctggcgtctcagagcagcaagcggaccagcagacaccgagttgcagtccaatacaaatggacaatatctaaatcagcagtcatgacgcggaaccattgtgtgagacacagaacgacagaatagctatcacgggcttctgaagcggccagagagcgccccagacgtcaggcgacccccacacggtatacccgataaacccctttgatagcctcacttcataaatgtgtgcgccccgaacattcgcacgggagacgcaacaggaatacagtactgc

SEQ ID NO: 417468 - DNA, 894 bp, Homo Sapiens
cgcgagaaagggaacgtcctagcagaccaccactactcacacccgcaacctgacgcaacagccctccaagaaaacactgggacgtcatcggcgacacaagcacccaccactctcacagcatcacgaatcggcgcacgctgacacagctgaccaggggagaactggacatcaacgtcgggaacaaacaacgtctgccacggatatcaatccagggagataccttcccccgaagtccataggcccacagcgccaagggcccgaacatctcgaggcatccaaggcaaagtcacaagcaagaaccgcccaacaagacggactacctcgcctccaaaggaacagcaagccaacacgtcgcacaggcaccgcgactcaacctcgctaccacgcaagtcgcaagcacaacaagatctggaccgactgcacacggcgaagcccacaccactcgctccaaacgggggcacaagcgccccaacggcacggagaaacacgcacgtccgaggcgataagaccgccgtccacacaaaggagggacaggcgcccaacttgaagcagccttaaccagaaagccgggacatgaccccgagtaatggggcacaggaacacaggcactccaatgccagacggtacccacggagaagcaagaccggagagggcacgggacgtacaagaagtttacctaacaaagtcgaacatgccggagacctctttacaccaagacgacgccagcagaaagcattcacacgacgaactgcgcacgggcacgacgggctaaccacgcgcctccactaacagccgacgtggaaagacgaaaccgaaacacgtacgagcactcaacactaacaaccgcgacgactatacgcgccaacaactcgacatgacgacgaccacaactac

SEQ ID NO: 417469 - DNA, 134 bp, Homo Sapiens
ggctgtgatgagtttggtaacatcatgctatctccaagtgcatccggtggatgtaggtttgacctctagtacgtgatctaggcgccctgcaacatgcgtacccgaaggaaattgcgtcctaagtgagagtagac

SEQ ID NO: 417470 - DNA, 682 bp, Homo Sapiens
  misc_feature (272)..(315): n is a, c, g, or t
gctttgccctgtgggcaagcgaaaaccttttctctccccttggatgggatgactctgctatcaggagccagagcccatactgatatttaaaatcagccacattatgggttaaatagatgtttgcatgttgaccttctctttccttttagtttcccatctaatgtagtaatagaaaagtttatagttgttagcatactcagtcctcttgccatgtaatgcccttggtcatctcaggacacatcaaagagaacacaccagcaagaaggctcccnnnnnnnnnnnnnnnnnnnnnnnnnnnnnnnnnnnnnnnnnnnncaaatactagcttatcttgatgaatatgcatgttttactggagactatgtgacgagacttgattgcacatgtggaaatgaagcattatgtgccataatctaccatgagtcacataaatattctgggtcccccccaaacacacgaacaagttcattaaacatcagtttccttcatagagtagactcgggtatctgccatgactcaatatccaaagaatcatattctacagcagaatacatactttgatcctttacaaatgtctttctcaagactaacttacgaatcatatgcgactctgtccctctgggtaccttgcttcacacaatcacgccattcggacacgcctaggaacacaagtgaaaaaagg

SEQ ID NO: 417471 - DNA, 1100 bp, Homo Sapiens
cccggggaaaagaaaaaggcaaatttgggcgaagaagtcccttagaaactctccgggggtgtacatagtgtgcaaccacacaaccgaggggcggctgagggcgctacacattgctgggccactttctcttctacacgctgtgcgactcgtgactaggacaccttcttcatttcacggggggcgctcaccctcgttcggccacatcgtcctccccgtgcatgcaccagggcaacacacgctgtgattgacgctttttcggcggggcacacaacgcaggtgtgcgaacgcccccaagggtgggcacgcacaacaacgcccctgtacacatgtggcgcgccattcccatacagagccgatgcgcgccatcaccatcgcgacacaccggggtgcgccccgcgcaaatattggtggcccgtgtgtggcacactaattaatgtcgcggcaaaaaagatatactccccgcacataaggcggcccagaattgtatcttttctcctccacccaccccacccagttgggacacacggcggcggccaacatacttgttgacaacacttctctgggacgaaaacgcgtcccagaagaaaatttcgtgcgtcgccccacacagagtacattcgtgtggcgcccccggtggcctacatcagaacgcgagcgacacaacaaaggcgagggcgatactgtgcgcgcgatttgccctctgttgcaacacaatcaatcaccgcacacccgccttcacacacagtgtgtgccgataacagtggccgcccccacaactaacaatgtaggcccactcccgcacaaagaagttgtagacgagcaggcacacacaacaggcggtgcagcggattctaaccggcgcaggataaagccacacgcgcgcgccccaccccgccggccggccacgccaccacgtagtagaggcagtggcactgaagcaagaccatgcccagacccctgccatcagccggacggcatcgagcaccagacagatgtcgttagaacacgagcggacgcaatcagtagacatgcacagtcacgctagtcgcggcagaaccacgacagcactagcgagttcagcgagccatgcccacaccaga

SEQ ID NO: 417472 - DNA, 1096 bp, Homo Sapiens
ggacgtacagttgtggcctgtggtttaggtgcgcatgaagccggtcacggctagttgatgcagtactgcggaaagtcccgacactcaatcgagcttgaggagcttggctcgacgtgaatttgggaactggacttagatgataacggaagccgcgagccgatgaagcattaccatcatagacctcctcatcgtgtgtgatccgcctagggtcggctgtgttggtcggagaatcatgctcgcgtgtcttggtgagtctagacatgcttgtacatgctcaatgcccttatacttgagaacgagggacgctgaagtactctgtccgcctccccctggtgctgccaccgtactcctttatgactgagcttcatggatgccactgtcgcaccgctggactgccaggcatgcgttatattccaggttgcgcacggatgatctggggagctccgtgcaagggggggcattctgcgtggatcgttggcacgactaggggggcttcattcgtgcgtctccagtggtcttgtaattcatccttgaaagctttgtggtcgctggccctgcgcgtagcagctcaattgcatgctctcgagagggaaccaagcgcgcggattgatggcattctctacgctatcatacactcagtttgtgtagaggcatgagaaagcaatggagactctggatcacacttgagccacatccattttcttccaaggtggggaatattgccggaaatacgatttcatggactcgtgtcgtggagaaggtttttaacaccgttgttcctacggttggggcttcgtagccatgggatccgattacatttttcttcaaacggagttataccgtttaggcgttccgtaatgagctatgtgggggaatttttcgcacccgccggttatatacgttgctatggcacccgcaaggggaaattacacaggtcggagataggatagacaggttttcccacgcattgcaagacaaacgctagattgtgcggaacctatttggggacagattacgtggtataaaggaggacgtttcccatttgagatctttacccaagaatcaacgggagttcatttcgttggtatgagccaca

SEQ ID NO: 417473 - DNA, 1081 bp, Homo Sapiens
gctggagaacggtgggagccgctgtgtgtgcgtgaacgctgtgccggtgtcatggcggattcgtgagtgcaggaggcgctgactgctcagatattaccgagcgagtccagggtccctaatggctggcagaactggagttccacgaagagactgatgtgcgccgttcgtccgttcgagcagcgccggacgtctgaaggagggcactcgtagcactctagtatgaacaactgttatctgagtcgtattgggaagacagtatgtgcgaacgagacgattttcatactagagtagctcggctcaagcgatgctctatctttggatctccagggcgagacccagtggagtccctgaacagacgtgacgcaagccttggctacaccgagcacctgtgagaaactagacccggtgacctacagctccgatgcggataggctagtcaggtgtcggaaaggcgggatttggagctccatctcagacagagcgaggacaaataactcatacagttagggaccggagagaatctgtcaatcagtagttgccagtgttgatgcccatcaatcgacccgttgagaggacttagctcgctgcgtcacattgggaagcctgagttgggaaccgtgtcaactttaatggggtcaggtccgcgcaagacctcctgggatgactctaggacggcgactgctcggagaaggagcccccattactatcggattcgattccctggaagctatcataaggatcttacacgctgattaaaaccgctaacggcgagagcggttgacgacagcgactagtagcgacgaaaattggcgagacggacaaaggtgttgaatcagtgggaccaagcagatttggatgcatttagaccgagcacaaatttgagccctcttctccgggcgaccgtttccgaggacgccacattggtcaatggcgaggcgcgaacaacatctggcaggtgtcctacacaggagaggatgacccgcgctcaccggctcgtatgttccgcggacagtcagtggaagaccaattggcctaccctccgaagcatggattggacccaattggacggtcaacggacgga

SEQ ID NO: 417474 - DNA, 1332 bp, Homo Sapiens
gagcattcccggatgcatctcgtcttggtgttgctcgtgcaatgcgagacgtgcagggagtcgacgcacagcagcacgccagtgacgctagaggatgcatctcgcactcacgagcgtcgagtgccagtgcatgatcgtgcagcattgcgagggacggcctgagctggcgagactctaagctagtcgctgcgacacagctgttagtcgcaggcttcgtactaggtgcatgaatgcctgaggtgtatgaagcacccaattgggcgaggatgcacaatggattcctgttcgaatatgccttcttgcgaagtgaagaaaatcgggggtctgactaacgcaattgaagcccctgtgggtaagacgtaatgattagtatctcttgcgaagcccatcacgtcgatgtgatcgtaggattccgagagttgggatggtatccggctatgagtcgtcttcggaacctgacgcgaactatatctataggcccaagacaagtgcctgtcgataattgaagccaataaactccggacggcccgagcgtaacttaacccattgtgggccacagggaagcactcattatgaacacgtacgggtggttacgcggaccccgtaaagtttccgagcatacgcttggctcggaacttcgatggtgtgaacggggagcattcgtccctacgaggaactatcctttgggaatttgccccatcacgacgttgtatgtggttgcaggagagaaaaacattggagtttccctagagtgagttcaggccccttcggcgttagcggtccgattggcggacaaccgtgttcgtttcctttcacggtttggaactcatatttggggccacaaggaaatggctcgccgagaagacattagggaaggcttcggtccatcagttgtaaatccccctggagatgcacccccctatgagggtaatttgcccaaaaagggcccttgtgtaaggctctagaaggcgctcggtaaccaagaacatcccgcagttcgcgttcagagccgaaacccccttaaaatccaggcgcccacttgggtacgcgtaccgttccttcaaactctgggttgcccgcgtttccgatgggcataccacacacgccaattgtgaaagggggccctaataccttggcgttgatacggaatccatgggtgccgggtgacgacacatgggctatttcggacagtattttttgggaaaggtcagtgtcgccaaaagccccgcttatattaacgttcaaaggcacgtttgagagaacttcccgggtataaaaacaagaggggtcacacacgatttaggggcggtatccccttgcgccatgttcccc

SEQ ID NO: 417475 - DNA, 1298 bp, Homo Sapiens
  misc_feature (165)..(165): n is a, c, g, or t
  misc_feature (720)..(720): n is a, c, g, or t
ggcctggatcgttgctattaggtgcttacggcgagacggtcgaacgcggtgactctgccagtgttcagcacatggacacgcaagaggtatcgcacgggctgtgatcttgagaccacatggaatctcgcgactactgttgacacaagcctaggattcaggcctggngagaccacatcgtgtactcgctggacgccttgcagtgtgtccgtatcacatgcaggtgcgcgagtcgtactcgcaagaatcatgctacgggtacggataaaactcgtgctggagtgacactgaggctgcacgcaaagggcatatccacctaacagctcgtgtgacagcacggcacgtgtcatatagacgcaaaagttggtggtcacttcctagtacccttgcattgctcacctgcaagtatgagcattgggcgctccgtgcaactcgatacgtagcggagcagcaacgcatagtgtaccaaaggaattcatatggctaagtgtaaggcaccccttatccctcacacaagagcagtaggccattgtttgccgcttgcggttgggcccgagcaagtgaatggcacccccataggttgactcgttcttgagcctcgaatggagacaccgccctaatgcaaatcgcacccaagggcctctatacatagcgtacggaccgacgcacggaacttgcaacctccacaagtaagttcttaagtggccttttttggaagggaancccattgtctcaaaagaactaccgcacgtgggctcggaagagatatgtgtgtagggcgccatgtgcccaaaaggtggcgcttgtatggacttaaggcacctgcggtctcttaaggccggtcgcctcccttgggtgacgcataacaccgcgcatgcgtgttgcaccccggttttggtacaattcgcgccaaacaatagcgatggtggatgcaaacagtgggcggtggtccacaacctcttagtcaccacgctccatggttcccaacaaaattcctctaaaacggaaccgtgcacgggctaaagttgcccaccacagttttcctcgcctcgagaacgtgctcgagattcgcgctcgcgcaaagattttgtggggaaatactctattaggggcgttttgtggctggcaagttgcgaaaaccatttagaaccacgggaaccataacccacaatcccaatggttagacgttaagctccccttgtcgattgtgtaggaagaaccccggttgtggctctaaacgaggggtttatctcacaggaaccaacccgcatttgggtggggttcgggaaattcgccgttag

SEQ ID NO: 417476 - DNA, 1501 bp, Homo Sapiens
  misc_feature (285)..(285): n is a, c, g, or t
  misc_feature (1003)..(1003): n is a, c, g, or t
ggtcactcagcttggacctgttgggacccctccgaccttgtaagctggcctttgaacttgggaaacacgaacttcactgaggtcaatggaggcccagctagcctcacaatcgatgaatcgctaaaccctcagcatggaggagtgagatgggccaccgtcagagtgctcagattcatgaggcctaagatatgttgcgagccatcagaggtatgcatggccggttgccacaagcatgatgccttcaagtgactcatgagactagatcaataatgcagaacaagtggnacctgtcctgtcggtgtagctggcaggcacttttgcccaaatggagcagcgatccttaaggcaacaagacacgcatgtgctgggtacctgaatggcatcaacgagcatcgcgtgatcgaaagtcgttccttgagcatagggggtgatcaaacagatcaccgaaacaggatgtccctgccatctgggtaggatcagcgatcattcccttaaaaacatgtgaggtgcaaccttggtgatatgcccgaaggctagctagaccaggggagacgaactggtgcatggccattaaacgcaaggcatttctgagaatacccaagggcctggaaattggccccttctaaagcctcgcttgcttgtgccacgggggagaaagcctttcggtggtcagggcgaccatggtgacatatttgcaccacgtcaaaggggtctgaagaaacctaatggtggtccgttaggtacctattacatgctccacgaggaagcagaacagcaacacgaccattagttgacactttggatcgaccagggcaagtcttcggtataggagaccgccagaagcctcacacgagacgggtggaagaacgcgttttgagggcgccatttctgcccacgttcctttagccatttgtttggcgccatcataacttccccggtggaggtctaaacacttcaatgcccaaacaagtgcagactcggggggcatccgtggaaacgagancggaagggcaggcgcaatggacagggcaaacgaagagacaaaggcacgacaccgccgtggggtcctgggagacggacctctcgcctcgggggcacactggggccatcgcatgtgtgctccccacaatgactgcgccaaaaattaaattgagcaggattcacaggggaaaacaccacagatggctttaagtgtaaaacagagattcggtctaggcagacaggccctttgtgaggacagaccaagggagagccctccaatagagagagggcctgcgaccaaagtatcaaaaggaagaaagttggcacacccccccttgtccgccattaggcccaaggttgcgatactaggatagttcctcctggaaattgatttagggtcgcaaaggggagcattttgtcaaggaaacagatggcggacgtagtgcgaccagaaatgtgactactttgaaacagtagcaagcacgggccctggaatatcataggtagcagcgcccccgtc

SEQ ID NO: 417477 - DNA, 1612 bp, Homo Sapiens
gacagagagtggggatgtgtgtgcagcggcgctcggccacatcatatttacttacttaaccactactccaacaacaatactctacaacaacatctcttatatacaacaacacccccaaaacaaatactaacaaaaaaaactgcgtgtctcccgcgggggacgacttattactttttgtctctctctcttactagctaaacacacacacgcgcgcggatgcaacgacagcgacgacgcacgacgaccgccggcgcacgcgacgagcggagccgccgacaagcaacgacaattcacagacgtaaggagagacaccacagaaagcacgaacgacgaccggactccatgcacagcgcgagcgtggccgcgcgaagaaccgccacggacgcacgccggaccaatcacaacgttcgtacttgcccgcctggagcgagaacacatagcgcacaggaggaacgcaacgacacgaacgcagcgcacagcacgcgtaacattcagcaccgcaccccctgatcctgccacagggcggcccacacgcgcaaagcacacatacagctctacacacacaaaactctacagcccagagcgcaaaggaccaagacatgagtgatacctagcgatgcatggaacgaaaccgtccgggcaccatccccaatcggaccacaaccgcaacacgtcaccaaccaccacggagggagctacacaacagtaggcagaccaccgaccacaacagaaacaacaccaagcttcaatcaccctagacagacccacggcgcgctcaccgccgccacagacacccatacacacgacacacaacaagcgtgacaagcaccgcggcacagcacggcaccgccgacaccgttaaggcctccgctacccctacgacacgcgacagctacgaacagcacgcacagcacagacgacagcaccacacccacgacctaccgcagagtacgaccaccgcccacacgaatacctcctgacacacaacccctcctacggttttcgattacacctcacccaccgcgtcacgcacgacatctcattatcgatactcctaagcgtgttcctgcctctaagtactcgaacttgtctatctaatcaccctcccagcctcacaccaccacaccctcactcagtcgctctcaggctctactacccctcacactctagctcactctcttctactcacatactactccacatcgcccgagtcagtacacatcaatcgaattgacacccaccctcatcaccagacacgacacacaccaacaaacatcgcagaagtaaccaaacagacacggaccgggaacagcgctgccgacacacgcccctcctcgctaactcaaaccaaacaaccaacacgaccgcacggagcccacacccccaagagcatcacatgactacacgccactccctacacgcgcgccggcgccacaacaccacagagccgccgaaccacactcacagacaagagagacagacacgagagtcgccagccacaaccatcagccctctacgccgccaccagtacatataattcacagccgccgcccactccccccagtgcacgccacacatacatcacatgatagcatctcagcatcaccactgc

SEQ ID NO: 417478 - DNA, 1415 bp, Homo Sapiens
  misc_feature (98)..(98): n is a, c, g, or t
  misc_feature (427)..(427): n is a, c, g, or t
gcttctttcgcgtcgtcaggcgagccgacatggctgcagacacgcatggggacatggtgcaaggtcaggtattctaatgtgaattggagtccgtattngcgagcgccgtggtctagcaaggccttgctcttaaacactactgtgcttacaacgctaggcactatatgtagtgcgcatctaatcgaccgccgttcacttcgacctgtcacatctacgattgcgtctctacgatctggtatccacatctactgaagttccatcgcgcagttgcgacacaatctctctgagtcggcatcacagctctagacgcgacctgaaggaaccagagggaaaggccctgtggtcaatgtctagaggtgcgaaaacggttccgcatctcaagcacaattctctctccctaaggcgaatggccgcaagaagtgcgccnttccctagaagacacgttcagactgtcgtgaaggggctggacctgggcttttgtggcgccgcgttcgacaaggtagcaagctacatcggtagtgagggctgcgccatcgtgcgggcttgttcttatgccacctctatctctatatttggatcgacaacccgggcattggtgtggggcctcccaaatgatcggtaatcgtgagcggtggtggaaaagcgccacaacgagatacgggggggttccgaaaattagacatttgctgtcagtataggtgctccccccagtgtccgtttggccgttggatattagatgccactctcaccagggaatgtgtgcttcccacagaggtttcccatctttcggggcaggtgtgagatcgaccagccaccgaatttattggaacacgcagtaatgatgacgttccgaaaccacatattcacatgggcaccttcctaccagttgaagtttcgcattttccaacggtgaccagatcatagagccccatgtcctctgttggggccagcagccgccagagagtccagagagaggatcttatggctgctattatataaagagcaatatatctctcatcctcgtttgatgtgcccctcagagattgctggagattctcctatctttatcatccgtagctttgtgtaaccacaagtaagcttctatctacacagcgcgcatcaatttgccttgaacttggtgccataacactgtgcggacacccctttccaaactgttccgtcgatgggccctaaccacatttaagttctcgcaaaagtttgcgcatccaagtttctacaacgcgtcatatggcacctcaaaccctccgtgtaagcagtacaacacgaatcagccctagggtgttcggccgacatttacgaagggccgcaccctctttttgcttcctgggacaggcggacacaacatcctcgttaggttggtgcgccgcgcctctggacacttttggagccccctg

SEQ ID NO: 417479 - DNA, 986 bp, Homo Sapiens
gagaacatgtgggcaggaatgtggccatggattggcaacctggaagttattagtaacttcagtgagccagtttcatggactagtgtagatggatgccagatttgagtgatttgagggataaatgatggctgaggaactagagacagggtgtatagatagcttttaaagaagtttacctatgaaagggaatagatacagggtagaagctagagatgtatgaggatataaaggaaatcttttagtttgtttcttttcgagtgtgagaaattctgcagaatgattttagttgttacggattgctaagataagggagatgagaagtccttgagaaagcaggagtggtcaggatcctgactgcacagagtcctatgataggaaggggatacttcttcagctcactccacacaaggtccacaccccagcaaaggggcgagggatatccgcgcctcggggcgccccagggcgggaagggaaagggcccgtgagtcagaggacacaacggcaaacccctcgcggctaccgcggagttggacacggaaatcctccatgtgacatctcagaccactcacagaactgctggccggaggatatcacacgaggggcgcctaacccagcgaaggccggaggttagaaaatgagagggccactacgcctaacagaaccaacagacaccccggcggtatcacacccaaggtgtggacgccagggcagaggaaccacgccacagaccgggcgagaatcccgcgatgaaccctctgccgaccagcgaccgtgtagacgcccgccccccaaaaacaagggacgcgagacagcactcaacacaagggggacaggttgaggccccacacgcagcgagacccccggcgacgccagtgtcgccccaaagacgcttcaaaaaccacgcgagcgcgcgaacccaacccgaagacaacaccagcgggtacaacacgacaacgccacaacctgccggacccacaacacaacgc

SEQ ID NO: 417480 - DNA, 119 bp, Homo Sapiens
ggttcaaggcggctgctcgctgacgcctgaaggctggccggtgccgcaatgtctacaggtggaacacagggcatcgccactctggccggcgcgaaggcagaatacaagcccagaggagc

SEQ ID NO: 417481 - DNA, 1557 bp, Homo Sapiens
ggcagaagggaccaccatggtcgatcgagtgctgacgatcctggcactagtactatagcggaaaacgagtgcggaggagactgactgcctcgaggactgacgtagggagagcccccgtgcgaaaaatccgcgtggcgtgttgacgtcagtgctttactgtgagcgctaatcctgctggtgaataactgacgattgcggtaccagaactgtacctgcgcggctttcagcttatcatgatacacacagtcaatgaagcctcaagagctgggcttggatacacaccgcctgggtgcaaccgatagcttgggtaacgtcggagggggcagcacgtctggagactggggaccagaggcgcaggtcgaggcgtcgagagaccgacatcagacttagtacgagggctagtgcacgcgacccgtcaatcaggacaattaaagtggagggaggagcacacaggtgcctaaggtgggtgcagaaagcgagtcaccgagacgtggcattgggagcgtgctagagggccagaccatgggggcagaagaacgtggcgtatccctaggagacggcctttgccccaggtgtaccatggactgcatacatagtccgagtggagacgttcccacccttgcgttactcgcagggctgattcttgacttgtggcacggggcagtcgttccaccgcacggcttttgaagatgtctcaagaacggtctgtggggtatgaccaaagaaattggtctggttgagcgtcgtgtcgcaatctaatcttccgcacgggttcttggtgcgttggagaatccgtgggtcttcaagtggagcgggcctcgccgaggaaaccggttcgatgggttcgaaattggaagtacccgcgggaacaacgaagagcccagagtagatcattaagcgtactgagccgatgggccatagaaagtactttaggcctgtatcagtcatcgtgcacaaagtgatcacatacgggatagtcgaggagaaaaaggtagcttcccggtacggcaacagagacggtaaacacaggtagtcaagggacacccgacttgaactacgggaggggcgctccaaggacagacccgaaacaccccatatggtacgggcgcacgaacttacagttcgcacacctctcagttgtgacgatttactttcctttgacagttgggcgccaggacttggtgatagacagacaaaaacactacggacaggtctgccaacatgtggacacttgggataatcacagtggccgttgacacgttggattctccaaggaaacagtcgatgtcgacacatctgtcgagttgcggctcggcaatcccacgcatgggagaagatgggcacacatggctgtgaccccgcgcgcggatgtccattatctgtacaatggagtacgtatccgttggacgttactgtaccgagtaaagtactgtaattatacgggaacacagggaacactgtccgcacgctttgccaagatgtcaccacgtagttgtcaagagactccttattaaacgtgtccagtcgctgcgcacaacttcagtgatctaacaagaa

SEQ ID NO: 417482 - DNA, 1295 bp, Homo Sapiens
gctcgattctgacttcgcgcactgacagcatggatacaaggctccgtggcacaccgaggccaggtggatggagtatgacaaaagtcgaatactatgtgcgtgttggccaggacctgatgtgcgccgttgagtatgcatctaggtgatagcatgactaggatggccactcagttgagcagccacatgaggagtgaatgagttcttagatgacctgcgagccgtacaacgaaagcaagattggccatccgttgacatgatgacgcaaagaatggacgcgtcgtagcttgcgctagcccactgaaaggccctggaaaggggcagacaggatatggttgcgacgatggggcggcagtccgtcgctcagaaactgaggaagacatgccctgcagcaccccctgtgacatcataaaaatcacggaggagagacgaaaggactaacagaaagcacgctgatcgctgacacccgtaagcggcgactggcaacaaaagggcggaacaacgtaggagtcctagggccacaactaagacgaatgcgaccctggtggcaccccgggcagaatcccagtcggaaaggacgctagagggaaggggtagcagaagggcgtgctcccaagcggatcacgggggcaatggcgcgcgtaaagggaacacaaggactctgcagtactgacaacagaccactctttagcgttcgcacggaatagcagcgcgggtaaccaaggcaggccagcgtagcacacgaatcgacagctgtcacacgggtacttacacgccaagtcccatggagcaggggtaacaccggtcagcactagcgcgaacatggacggcagcacaacaatcgtaccaggaaaagtcgagggacgtcgtaaacaggcccacttaaacaggaaaacggatcaatacaccaaactacagcgcgggacaacataacctgtcacaaggcgacatagtcaccggggatcgcacggtatctcaatagggcacggacacacatccacgggacacatcaggccctaccacaacgggtgcagtacgatgagaccacactgtacgacccccgtggacacggaaggtgccaaaaccacaggttacagtgcaaacggaaaggggctacaaaagggagccatgcgaaccccatagccggagaacgagcaatattggtgccacacgcgcacatgcatggaacaacgcacacctggcgatccactagcgcacgcctccagagcacacaggcggggatgcactaacatgaggcccagcaaagcgaactaagagacacgggagaagatacaggt

SEQ ID NO: 417483 - DNA, 735 bp, Homo Sapiens
ggtaatgaaaagtggttttaaaggttgaccagttttactacttagtgcctaacaggctgagtgattataccattgaaggaggtcacagcgggaaggacatggagagagatggggggtctgaggcctggggagtgaggtctggttccctctcctccccttggagccagagggcaccttcgtgactaagaagggagaggatctggccttgtgcagctctgcccactgagaggtaacacctgttctccagctgggtggcagctccctgaatcaggccagtttgtactttttcagcctaactcacatgatttccacttcagtcgcactaccgctggctgccccattgtggacagcttcattaccctccgtttgctcctaaaggcagtcttttgatggaaatgagtggcggacaaaggctgagagcaaccaggccaggctcagcccacttacttactatagttagcctctctgttatgcctcacttaccccaaggactctctgaggagtggccattagtcctacagctcctgagtgcatattggtggccagtcccacaaatgtgaagttctcttctttcctccgttgagtcgtcgggtcaaatagacactcttgttaatagctcaccaagtccagttaaagaattgggaaggtgggcattgtgaactttgggattaacatacatgtccaggtgggttagcaatggaactttaccgcagacacttagagaggacacgggct

SEQ ID NO: 417484 - DNA, 901 bp, Homo Sapiens
ggaagaaatcaggcattttacgttatgatgtgcttgttcctgtctctgcctataaattgactgtattgatgatgaaggaaggagttccggctgaccattctgaagcagtcccagtcacgggaggatgccttacccagtggccagacatgatagttccaggtctccccttggtttggtgatagagaacccaaggaggcaagggggaatatcaacgaacccatttctatttcattacccacaagcgaaaggactagcaaaaaaatattggaaattaacatttagatgcataggtctaactccttgtgtgaacctgtcctcctcaccccctgctccaaatatgtgaggtggacacgcattagcagcggagcaaaacctaagatctaagaaccgggcgtgtggctgctattgtgtccctgggagtacactccacgtcgcattgcacggtggtgctgacaggagccgagagtagctttatcatgggctttcagttccccacctgcgagcctgccaaacttgtgatcttgtcagtccttgaattcccctctacatcacgagggaagcttgtctctttcatctctttccggattggaatcagaacactctgcccgtagtctatttcgccaagttgaccattcttaaccatgggggagcattaccaatgcaaatgcagagatgtgtcctggtcttgacaaaaggtgggaacccctgaagcttgcgagaagggggttcctcctcatgacgaagcttggagtaaaccagccaggcattcgcatgttgggcgaactcagaccgtgccggaattctggcctggtttggtcctaaattagccctcaacttgaagccattatgtcttactaacgcgtagtgcattcgtacagcgaattttacatcagggtggagg

SEQ ID NO: 417485 - DNA, 746 bp, Homo Sapiens
  misc_feature (88)..(382): n is a, c, g, or t
  misc_feature (391)..(444): n is a, c, g, or t
ggtgtgaagcatgggttactggaatgacatgatgggagggtgattagggatctgctccaccctcaagggggtgcttgtcctgtatgannnnnnnnnnnnnnnnnnnnnnnnnnnnnnnnnnnnnnnnnnnnnnnnnnnnnnnnnnnnnnnnnnnnnnnnnnnnnnnnnnnnnnnnnnnnnnnnnnnnnnnnnnnnnnnnnnnnnnnnnnnnnnnnnnnnnnnnnnnnnnnnnnnnnnnnnnnnnnnnnnnnnnnnnnnnnnnnnnnnnnnnnnnnnnnnnnnnnnnnnnnnnnnnnnnnnnnnnnnnnnnnnnnnnnnnnnnnnnnnnnnnnnnnnnnnnnnnnnnnnnnnnnnnnnnnnnnnnnnnnnnnnnnnnnnnnnnactaagaannnnnnnnnnnnnnnnnnnnnnnnnnnnnnnnnnnnnnnnnnnnnnnnnnnnnncgcacccagagcagacgcgcagagtaccacccgacgacacgaaaagcaccccagggcacactacctcaaaagactctcaaacgtctcaaatctgcgcgtagagtgatcaaccaaccaaatgagggaaggagcacaggctacaacattaagaagcatattggacgcccccacaagatagtacaccagtgaacgtacacgtactcctcttggccgcgtgaaacatcccattaagaagtaagacgaattgattacacagaactaggaggcttactatagcactttctttatggggttggatccca

SEQ ID NO: 417486 - DNA, 1711 bp, Homo Sapiens
  misc_feature (736)..(744): n is a, c, g, or t
  misc_feature (937)..(946): n is a, c, g, or t
  misc_feature (1274)..(1274): n is a, c, g, or t
cccacccagttgggttttttggaaaaggcccccctaaggcgctctttgaccgggtttattcccacgaaggggtataagcgccggctcactcttctccgggtgtggcttctgtggtgctctcaagggtcctcctcctcggtcgttgagagtgccccggcgggtctctttgctgtcgttgtttctctataaggcgccggaaggtcaaggaggcgtgttgtacctttctgtgccccttttggaaaataatttctccgagaggagtgttactctatctcactagaaagcgctcgggggtaacacatacactgtggtgagacaacaccctcgtggggaaaaagtgtgatgttttccccgggagacaaagactctcggggagatcttttactagaaaagagcctcttggagagcgctccgatcacgcgccttttgttgaccactttagtgggacggacacccacccaaatttttgtgggatacacaacctgttcttcaccaaactatatactagatagagctgttcgccaccaccaaactggtgttgtgttttatacaagcaaaggagccttctcactacactatatttaattattaatcccccccggagaaaaaaaggaatcttctttcgacgaagcgccttgatgtaaatctttatgttgggcgaactatttgttgtgtgtggcgcacaaaatatgcgcctctcagaaaaacagtgtcgccctttggtgttcctccaccnnnnnnnnnggaggtgggttttttgttggtctacagaaacgcagggaaatatacatctcgaccttgatacacccactgttggtgagaagaagagcgtcctccctgtagttgtaccactagtgttggtcagagtatcattcatctccacccccaacgtgttgggtggtcacaaaaagatgagtgcatgtataatacctatgtnnnnnnnnnnaaagaacacattcattataaaagatatccctctattgaaggaggaagagtgctctccactgacatgatcatagaatcgaggtaggagttacacaggacagtctgctctagtaagataagatagcctgcgtgattgttgtctctcacgaaacaacacgacgataggttcgttttttcaagcaacaataagaatcaagtcatgaaattggcatggtctgtcgatcgatgtcgacaggacggtgaagcaaaccccccagagaagatgcaacagaacctctcttgtttgtgatctaaatcacgcgcttcggtggggatgattgagctgaacngcaagcaggtagtggggtcgtcctccctatcactgagcggagaagaggagtgctccctctgagtatgatgtagaaacccctctcttggttagagaagcttcctctaacgaagagaaatggatgatgctactccctcccttaccgagaattgttgttctcgacgacgagtgggactctctcaacgaacgaggtggggtggacacaccaacagaacggtggcgttgtgggcgacgaaatcacagcaccgacgtggctcgccgtgtgtgttgtcataatcagatattccccccccagagaaagagtgtgggccacccccacatcgccggccggggtttatacacaaaacgcccaccggttcagttgttgtctgtttcgtcacacacagtggtttcattcaggtcgtcttgatcgggagcgcacttcaaacgagtgttgtg

SEQ ID NO: 417487 - DNA, 1333 bp, Homo Sapiens
  misc_feature (619)..(628): n is a, c, g, or t
  misc_feature (671)..(679): n is a, c, g, or t
gtggggggggccccggcggcctacctctattagtagggcgagccaacatcacaagaggtggcggcgccccctctagtcgcacccctcctcctctcttatcagggagggcgctacacgcagcgcagacctaagtggtgaggagtggagtgaatcaccactcgtggttggggtggagtacacagtggtgcctcgcagagcagactctcccacaccagcgtcagcgtccctcaatctcttcttctccgacctgagtgaggccacccgtcagcgaggaggagcggagagggcgcgaccgccaccggagcgcactctacacacacctctctctgggccaccgcccaccaggcgcggcgacgccagcagaggagaccccccacacacacgcacgcgagggcgcgtccggcccccacacaaccccagacggcagcgcccgacctaccatacccagcgacagacacacgcacccaccgcacacaacaaaagacgtcgacgtgcgccgcagcgccgatgccgcgagcgcgacacaacgcgctgccacaccactaccgccacacagcacgcgcagactagcgagacgacgtgcgcagcgacaccgacgcgccgcgcgacgacgcactgnnnnnnnnnngagcgcaacggacgaccacccacacgcaacggaccgcgaccannnnnnnnngccggcgcagtcgccaccctgagatccaccacacgccgagagacagaccgcgccgccctcgatgaagggtgccgcgccactccccccgccaccgaccacccgtcccgttaccttcaccaccccaccaccgcctcactgctcaggtaactactcaccacaccacatatcacttcgctcggccagaggatctcgcatccatccgtacacaacagcagtgcggtccaccgctcctccgtcaccgccaccctcaacgatctactacccccctttgtttcgtccgctaggtacgagtcccacacaacgatcaaacgagcctaattccatcctagttgccttgggaacctcgtcgtcgcatcctacaacaccactgctagtgcttcacacatacttcactatcgttctactaaccaacaccctctactagctttcttgcctatgaacaaccactcatcttcattatcatcaatcacgtccaaacttctactttacattctcctactatactaaatccacccccctccccctgacaccacccacactacccacaacacctacaattacctacctcccctaacttcgtacctccttacataccatcaacctcaccttacttttatatctgctcttaagtatcattcatctgtccgttcttca

SEQ ID NO: 417488 - DNA, 1178 bp, Homo Sapiens
  misc_feature (625)..(625): n is a, c, g, or t
gtcgcacttctactttaccatcttggccagcgacgctcatcagccacgctgatcatcgcactgattgtatagccttgaataggcctacacacagtaaacttggctaaccttttattctgagattcctcaactgaagacagccatcgacatccatcgtcttgctgcgagagacctctgccgatctgaagtattaccatcgaacgcaaagccatgctgcagatcactattgtccgtatcgtaagtaagcatattcgcgtacatactgaacgatcatacgtcttccgtgaacaaagtgcaaccgatgaaccgaatcactgacctgaatcaatcacatcatcaagtcacatgagatcgatcagatgggctagtatggagatcatacacatctagcgcacactatgccccctgttctgcatttccttggagctccctagtaggttatcgccaagaagcacacccatcggtgagcaatccgggcctggcttcattcttctactatgtgagagaagagacatattttgccccaatcgatcaatcaataggtaccatagagtctgtctcgcctcaactacacagcgtaaggcgctttcctcgctcgacttcctcttctagatcgtttagtccnatcagtacgcaaggacaggtatgacccgctggatttaacacacaaacctcagcatactgcaagaatcgttacgctagtatcgtcctcaaattacccagcataggcatgaactaaagtagcagtttcctacccgtatcgaatccgcgtaatcactaatccattccttcactttagactaatattatactttatacctaaagtacgtagccgcaattcctactaactcacactttaaccacgtccagcaacaggaacgctactactatctcgcacctgacaacaagtgctaagcattgactaacagccttacattgcatcctagcactccttctccctaggaaggcctgccccccgttaaccggcttttttggctccaaatggggcccatatatccgacagaaattccagagaaaagcaattaggcttcatgcatccccctgcaatcattagccaccattaccttccttaacctattagtttctacctaaggcttaatgtacgtcacttcattcacacttaatcccatttttaacaaggtaacaataacatgacg

SEQ ID NO: 417489 - DNA, 996 bp, Homo Sapiens
  misc_feature (707)..(716): n is a, c, g, or t
  misc_feature (724)..(724): n is a, c, g, or t
cctgggtggcgttttcggcacgaggcattcaacagatgttgtgtcggcagggcgaggtgggactctgtctctgcccacgctacctgcccctggggttgtagttctaggaaagcaagtctcagactgagttttgatctggattaaattctgtcccaggtgcagatatttataggaaagcagggacaagagccctcaggcaaagctgggtatcctgcgatgggtgcctctgggagttcgcagataacaaggccttttcctggaggcaaagcagaagcgttctgtggcagaccagtcagctttctagcaggtcaggggcagggacatctaggcccaaggtgtcacaccgtgcctggctgctggctctcctcttgcaaggacacagctcttacaggacttcctagcccacccaagaacatctttccatcatcgaaaagttattgataagatttttccatcactgaaaagttattgataagtgccaccatgtgcatgagcagccctccaggtgctggcttgtgggccggtgtttgagaatcttgccagttgaatgtgggcatctgttgagggtttcccaaaggctaaccgttcgtgccagagggaggccgtggctcattcctagggccctgggtgagactggggctcatgcacacacaggtatcgatggcatgggctgtaacgagctgagtgcctgctgccctttcctagtnnnnnnnnnntgggctcnctggagaaagaggggaggctgctactctcccggggcccaggggagcccagaacgcccacctcctgagtgtcagcagccaccaatccatattaagtctgcgcgcaacttaagctttttgcctccctcagaggaaaataatttccttccagggggggcaccaaagacaggggtccaaaaaattggaagttaagttttccccaacaccaaaaggtggaaaagtttgtatttgaaaaaaaggtgttaaaaagcccggggaaacgcgaaaaggggac

SEQ ID NO: 417490 - DNA, 619 bp, Homo Sapiens
  misc_feature (42)..(206): n is a, c, g, or t
  misc_feature (291)..(291): n is a, c, g, or t
  misc_feature (299)..(299): n is a, c, g, or t
  misc_feature (313)..(313): n is a, c, g, or t
  misc_feature (354)..(354): n is a, c, g, or t
  misc_feature (539)..(547): n is a, c, g, or t
aggtagcgaggcctgggtggcgaattcggcacgaggggtagnnnnnnnnnnnnnnnnnnnnnnnnnnnnnnnnnnnnnnnnnnnnnnnnnnnnnnnnnnnnnnnnnnnnnnnnnnnnnnnnnnnnnnnnnnnnnnnnnnnnnnnnnnnnnnnnnnnnnnnnnnnnnnnnnnnnnnnnnnnnnnnnnnnnnnnnnnnnnnnnnnnnncctcagagatctgtcattttccacctattacattcattttatgatacagaaatggtcattcagttgcagatagtacatgactggntggatcangcccccaatctggncataaactggccccaaactggccataaacaaatccctgcancaccgtgacctggttgtgatgggcatgaacaccatgctgaagaatggggggtttaccggattgaagggcaaggacaacctgggcccacccaggggggaaaaaccgcttaaaggggtttcctgaacccccaaaaattaccctgagccgatctggggccttaaaggggttggcccccggcggcgggnnnnnnnnnccccaaaccccttcccttttattttggggcccatccccttttgttttccccgcaaaggaaaaaacctttttg

SEQ ID NO: 417491 - DNA, 819 bp, Homo Sapiens
actaacttcccctccctcaatgaccccaaaattttttacctacattcccccaccaaccttaaaatattattaccctacacttaccctcccacatactaccgctcaccatcttctttcctcctttccctcgcatcatggatccccggcaacatgaattagatccagggcgtattgctcctcacatcgctcccaatgcccgtttgcgcctccttggcctgcaaagcttctatcgagctcttcgcaacatcacacaaatcattaaacacatccttgccttcctcctctctcgctgggtcgtctcccccatcagccgaaatgccctttgagtatttgagccactcgcgtctcactcctcagttgtaccctttcctcattgcaatcgacacatggtacccttcgttccgccccggcttttctctatctcgcacttctccacctgaaatacaacgtggcgctatatctttgattaatgagagaatagaattggtagacgcgaaatcaaacgtaaatcacagaagactctgtaaatgcttcatattataaaaaatacctaaggaaccctatgcgcggactactactatatcaacctgtacctattgtacacatttatttcgtcgtccccacttcctagtggggtccactctggccactcgcacaataatttaaccaagagcccggaccgtcgtgctcatttctccaccgatgcagcgcgaagcatatcggacaaaaccagaaaaggcttgccatctagtgtttgtgtaaatactgtacactctttcaataacatgaacaacaccaactctaagtatagatttatag

SEQ ID NO: 417492 - DNA, 497 bp, Homo Sapiens
  misc_feature (88)..(342): n is a, c, g, or t
gacacattaaaggcttattgcacatgttcgtagtcttatttcaatttttattcatcttcagaatgaattatatggaccattctacttnnnnnnnnnnnnnnnnnnnnnnnnnnnnnnnnnnnnnnnnnnnnnnnnnnnnnnnnnnnnnnnnnnnnnnnnnnnnnnnnnnnnnnnnnnnnnnnnnnnnnnnnnnnnnnnnnnnnnnnnnnnnnnnnnnnnnnnnnnnnnnnnnnnnnnnnnnnnnnnnnnnnnnnnnnnnnnnnnnnnnnnnnnnnnnnnnnnnnnnnnnnnnnnnnnnnnnnnnnnnnnnnnnnnnnnnnnnnnnnnnnnnnnnnnnnnnnntgtattctcatgggtcttatattttgaaaaaaattatgctgtacaaattatacttattataattgatttcccccatttttattaataaaaaaatgcctgccctaatggagctttttatccccctgataccaaactatttttttaatatggtcctg

SEQ ID NO: 417493 - DNA, 1524 bp, Homo Sapiens
  misc_feature (98)..(160): n is a, c, g, or t
  misc_feature (164)..(238): n is a, c, g, or t
  misc_feature (247)..(281): n is a, c, g, or t
  misc_feature (1408)..(1430): n is a, c, g, or t
  misc_feature (1457)..(1457): n is a, c, g, or t
ggcgaacgcggaggagcgagaagggaccagccgcacaacaccccgtagcgaggcctgggtggcgaattcggcacgaggcggctcccgcgctcgcaggnnnnnnnnnnnnnnnnnnnnnnnnnnnnnnnnnnnnnnnnnnnnnnnnnnnnnnnnnnnnnnnatcnnnnnnnnnnnnnnnnnnnnnnnnnnnnnnnnnnnnnnnnnnnnnnnnnnnnnnnnnnnnnnnnnnnnnnnnnnnatgctactnnnnnnnnnnnnnnnnnnnnnnnnnnnnnnnnnnnaggtgttgttccgctggccgccctgcacacacaagcgcctggccgcctgcggccccgcgccggatgcgccgcctgccgtcgtggccatagtggagggaagcgcctgcatgcaatacgccgaggtctagcgggagccgggctgcaactgctacacactgcgccccccgttggcagaccagggctaggtgcacactactctggcgctacggtcagggtacatctccgcgatcgccgccgcgcgactccgacgctgggccgccccggcgcagacggagtcgccttcaagccaggtgtgcccggcggctatggggccgccaaaggacggccgcgtcccgggccgcgcgcgccccgctgggccagggtagcccggcgcaccacagagcgggaagacactgccgacaggaacattggcgccgaacacagcgcgggccacctgcatcgggcggctgtccaggcgccacgtcgccccccccaaaaggacgcgccccggcctcgccgcgctgggggcactaaagaaccgcgtcccgtcgagaccccgggcaggcggagctgcgccccccccgcgcgccgggcggcgatcgccaatatacaacggccgcgggccggacccactcccagagggtcccgcaactattcacggaagccgggcgtcctctagacccgccgtacccagcctggagatcgccggcccgccgggcgggaggattgccgcaggcggggaggctacccctcacagccccttacccacagtgagccccacagcgcgcggacccgaaatggccatcgcacgaccggacgcctgcgacgacgctccgccgcgcgagcggcccggcgtgtaagagcgccgccggacgacagcatagtggccgctatcccactgacgcgcggagcgcaacgcacccgcgccccagaagcacgaacgactaagacgcgcgcgtgcgcgcgcgttcatatagaccctccaggtatcacaccctccgcagcccaggggcgtggcgtgcgaggctcacgtgacaggcgacgacgcccgatagcgcgacgggggatatggtgtcatgcccggcgcgccgagagcgggtactctttcctaagccccccggccgcagctctaaccttaccacaccatnnnnnnnnnnnnnnnnnnnnnnngtggtcgccacccctctcctcacattnagctccgcgggcccctcgccacccaaaccatcaaagacgagaggttcaattaaggccacggcttaaa

SEQ ID NO: 417494 - DNA, 1105 bp, Homo Sapiens
  misc_feature (484)..(484): n is a, c, g, or t
  misc_feature (506)..(506): n is a, c, g, or t
  misc_feature (614)..(614): n is a, c, g, or t
  misc_feature (637)..(637): n is a, c, g, or t
  misc_feature (1004)..(1063): n is a, c, g, or t
ggcctgggtggcgaattcggcacgagggggacgggctgtggacaccatcaaatgctacactgctgggggcagagtggtggtttgggggcactattggggttacattgcctactacggtagtctctgggtgtgttgtgggtgcaatccgggggctgcattgccggcagcgggggccaggttaggggcgctatcggggtctgcactgctgccaccagaggcaggttgtggaggtggccgggacaacggttgcctccgaggaaggggaccttctccttttctcagactcagggctctagagagagaactcctcctgctcgtgtgggagtgtggcgggcgcacagagttttcatgccaatcctctaagcatggcagggcccccacacccactgtggttccccagcccttgccctctcgctccatgttgtggagaccatctgggacctccaggcatggagcaggagtagtgggcaccacgggggctcanggcctgtgggtggaggagtcangaatgggaaccagtacttgggtggggagtactggctgagtgtgagtttctgctgttcctgctccccagggagtgttgggcactgtggtgtctccagtccccaccccangtcaggaggccagcttgggccangaggagaagctggactttggcaggggagtgtgaatgcctttgctgaaactggccgctgccacccaagtggccaccatgacaaagcggaggctttaacactaccactttctgcatccccgttgtaaggtttttctggctttttcctctccagctgtttccaaacccaggttggtggaaataggaatccacctgtggtgaaacttgaaggtttggaaccctgtaaaataggggtgggctcttgtggctcactttccctgggggtggtgggcaaccaaccacccatgggaaaattgcacctccacccggaaatgggaaatgggaatcccccgaggaatggtttccacccaatagcgggattgttagggannnnnnnnnnnnnnnnnnnnnnnnnnnnnnnnnnnnnnnnnnnnnnnnnnnnnnnnnnnngaaaacacaaggccggaaattggccccgggtaatgtggagaa

SEQ ID NO: 417495 - DNA, 301 bp, Homo Sapiens
  misc_feature (220)..(229): n is a, c, g, or t
cctcgaggcatctatgtcgggtggcggaaaaaaaggtaatgaaatggcacttggccataactgttttcctgaacccccttttcttgtaaaaaagtggaaaattttgccggtctccctaataggggagccgtattaaatttcaataagcccgggtaaaccctgcatttaatgaatcggcttgcagtcccccggaaatttaaccccgcctaatgagcggggnnnnnnnnnnggggaacccaaagggtctttcctggaaatcccttttttttctgccaaagaaattttggtggctttggaaacc

SEQ ID NO: 417496 - DNA, 215 bp, Homo Sapiens
tcttaatacactatggcatacggggtacccttaatttatggccctggggaaacccaacaaatttcttgaggaattcccctttttttgataaggctcctgggaatttgaaccctgcccggggtctctcgaagggtcgctccctttgagggccggaaaagttcttttaggggctttttaccccgtcggcgcgtaacccacaaaaaaaggtttttgca

SEQ ID NO: 417497 - DNA, 809 bp, Homo Sapiens
  misc_feature (200)..(345): n is a, c, g, or t
  misc_feature (482)..(684): n is a, c, g, or t
  misc_feature (695)..(695): n is a, c, g, or t
ctcaggagagaggaacagggtggctgggcgatatttcccttctgtaccttctgagctttggactatgtgaatgcatcatcctttcaaaaagtgaacaagaaattgatttccccattcctgtctgtgcccccacccccagtgaacaaatgggcttggagaatcagatatacctggggtttcaaatcccagctctgtctgannnnnnnnnnnnnnnnnnnnnnnnnnnnnnnnnnnnnnnnnnnnnnnnnnnnnnnnnnnnnnnnnnnnnnnnnnnnnnnnnnnnnnnnnnnnnnnnnnnnnnnnnnnnnnnnnnnnnnnnnnnnnnnnnnnnnnnnnnnnnnnnnncaaaccgtggtagtaataacggtaaaacaatagcaatattacgtaatccctctgggcctctgttagccagctgtaaattcaatctctttccctgtcccttcacgcttactaagttcttttaaaaacaaatgagactnnnnnnnnnnnnnnnnnnnnnnnnnnnnnnnnnnnnnnnnnnnnnnnnnnnnnnnnnnnnnnnnnnnnnnnnnnnnnnnnnnnnnnnnnnnnnnnnnnnnnnnnnnnnnnnnnnnnnnnnnnnnnnnnnnnnnnnnnnnnnnnnnnnnnnnnnnnnnnnnnnnnnnnnnnnnnnnnnnnnnnnnnnnnnnnnnnnnnnnnnnncttgaacctgnggaggcccaagggttgcaattgaacttgaaatcatggacactgcatttcccaacctagggggacggaacctgggactcccaatctccaaaacaaaacccaaccaaaccacaacc

SEQ ID NO: 417498 - DNA, 1050 bp, Homo Sapiens
  misc_feature (560)..(571): n is a, c, g, or t
ggcacccgtgggggccaggctgggctcgaacgcctaacctcgggtgacccgcccacctgcagcctccgaaagtgcggcgattacagatgggagcgaccgcgcctggccgccaccttaaaaatctatccagaattcgactgcttctccccttctactgctcacacctcaatctaggctgacatcacctcctctctggactgctggaaagcttaccgctttgatgaacctgatactctgtgacacacttgccatcaggaggcagagtctatgtcccttcatcttgaaactgggcccctcaacaactagaatgcccaggacgtgatggacctcaacttctagaaggcagtgagaaaagatgatatcccagatgggcatggagggcgaccgccagaaatcggcgcacaaatgggaggccgagggggggcaggaaaacgacgaggaagggggttgccaaacccgattgggcctaagcggggagagacggccggcgcaaacgaaaacccggcctgggagaaagccggaagagggagggcggggagaggaccacgggagggtcgcannnnnnnnnnnncggcagctgaggaggaaaagggcacgtggggggaaggaaaacaagggggccgaaaggggatgaaaccaagccgggaaggggacagtgcaccccgccgcggcgcggaggaaatgcggcggggaagggccccagcacgttgcgagagcggggggcggacacaaaagagagcggctatccttcgccgcaagacgagcggagggagcagcgagagcgcggggacggcctgcaggggcgcgcaacactggagggagggggcgcggcgaaccaccacgtccacttgaggacaccgcgccacccgcatccacagacgcggtgctacaccgcggaccgctggacggtcccacggcagcacaagggaggggcagagacaccgggcggggggcgaccccccgggaaggcccgcaggggggccgaaaaacagcgcccagaacgagcccctcagggtccatcccccccgccccatcacacagcgacccccg

SEQ ID NO: 417499 - DNA, 915 bp, Homo Sapiens
gctgggtggcgtatccaacacgaggagaccgccgaggcgggtcacgggcggcagggaggcctgcgatggcctgagaggaagaagcgggctgcgaagacccgaggggcctgcgggtgccggggcgggatggcctgcaggtggagggagcaggaagcaggttggcgactcttttctagccttccactcgtctgacctgcagattgggttctctacacaacctagaagttcctgaattctaaccacgactgggaagagaggtagtgtgaaggaagcccggcgttgcccggcagctgcaaccattacgccccctgagatcgctaagagcagggatctagaggggatggttctgttaggagagctaagaaaaggaagggcagaaacgtgaaagtaaatcaattcggcctcattacatgtggtgttgttctcagtggagtatttggaagtcaacagaaatgtttaaggatgggtgagcttttttgaacgttgactttgctttctgtcctagacggattctaagatacttccgctttaatccgagggaaattttaggtggaaatggacttcatggatgagtatccatgccccgagaagcataggacgggatccgtataaacaataatctttgttacgaagcttagcattcgtggaattttttcagcttgaagagcctcactggtagaccgctgtatttcacaacaaccctgaataatcacagcctctgagtactagtttatttggccagtaaatatttcagttgtcttctcagtggcaagctattcattttattcctgaagtgagataagctaaattgacgtaagtttttccctagatgtgctggtatccagtaagtgactggaggtcggatctcttaacttttgccctacgttattgaatggggatagaaagcagaacttc

SEQ ID NO: 417500 - DNA, 1211 bp, Homo Sapiens
  misc_feature (504)..(593): n is a, c, g, or t
  misc_feature (927)..(927): n is a, c, g, or t
  misc_feature (945)..(945): n is a, c, g, or t
  misc_feature (1091)..(1091): n is a, c, g, or t
  misc_feature (1136)..(1136): n is a, c, g, or t
ttggtagggagcctgggtggcgttccagcacgaggcccagttatgtgtaattgctcggcgtggggctcctggcgcctgggaagtgtggaagctggcagagccgggtgtgttgggcagtgagaaacttcagcgctggatcagcggggcaggcctgccttgatgaggctgagtcagaaactacagcatgttcgatacgcggctgttttattttgagcagatatttgggctcatttaaaaatagtgcttaaaacctaattgtatcatcttatttttgatgagaaaaacacgcaccagtctacgtggaaaacgggatgagtaggctgatgccttccgggctccctggtgaggccgctcatccctctggctgtccatcccgtgcagcttcattcactgcagcccggctctgctcccagacggtgctatcttcctgactcccccaggactgttgttctggtctcctcatccttgccctcgcagagaaggatgagaatgaattctcctgannnnnnnnnnnnnnnnnnnnnnnnnnnnnnnnnnnnnnnnnnnnnnnnnnnnnnnnnnnnnnnnnnnnnnnnnnnnnnnnnnnnnnnnnnttgagaccaaacttgggccaaccttgggcaaaacccccccatcctccttcctaacaagttaccaaaaacatcccgccccgtgtcaccgggctgtgtgggcctattgccgtccctctgcaaaatccccccaagtcttaacacggggagcgggagaggtccccgaaacgggcccacgttgatgcaaaattcgctcctctttggaataccccccccgcgtcacagggctacaccatatgcgtatttgtcctacagtctccgacacgccccgctcctcggaatgaacgacatggaaagggcgacaggagaccctcgcgccgcctactgccaaacgcanccgcaccaaatcagtagnatttcctcgcgcccgtactccccccccgctaagcgcgccgtcctcacaatgcgctacacggcgctgggcgcccccaactcgtagaaaggcacagcgcacaatatgggcacaacagggcgcgacccacttgcggccccaattgaaangacctagggatctcaacctggggaatacgcgtaggcatgtttttntctttggcgcaccacaatagagtgtgtgcattcacaaacccatgcgcccgccgcgccacttatcaccctgcaata

SEQ ID NO: 417501 - DNA, 757 bp, Homo Sapiens
  misc_feature (281)..(289): n is a, c, g, or t
cactcgcgggcatctatgttcgggtgcgagacaaagaggtacatgaaatggcacatgggccataggctgtttccctgaccccagcttttccttgtacaaaaagtggaagaatctggccggttctcccttataggggagtcggaatctaattttcgatacacccaggcttaacctgcatttaatgaatcggcctggaagtacccggggaaatttaaccccgccctaaatggaggcgggctttctttcttgtgatcccaaaggaacttcccttggacatcccnnnnnnnnnctggcgagaaaatctcgcctgccttggcaaaccacaaaaaaacaacccgcctaccaggcgggggggttttggttttggttcgggaaccaaggacgccaaccaacacttctttttctccaaaagggaaacctgggttttccacgccgtaaggcgcacaaatccccaaaatacctgcgccccttcctaagcggctaagtcgcgaacgctaaggccctcctccctttacaagaatacttctgggaatctagcccccacaacataacacctccgccttctggctataaccccttgtatcccaccacggggcctcgctgtcccaacgtgggcgatataaggttccgggtcttaacaccgggatgtggtaccctttacaaacgacaatcttactcgggaatcaagggtcgcagcgcgtgttcggcgctggaacacggtgtggtttattatgccccacaagaccccgggctggga

SEQ ID NO: 417502 - DNA, 966 bp, Homo Sapiens
  misc_feature (97)..(128): n is a, c, g, or t
  misc_feature (142)..(276): n is a, c, g, or t
  misc_feature (279)..(295): n is a, c, g, or t
ggcctgggtggcgaattcggcacgagggttgtcaaaaaatatgcctagagaccaccatctgtggccagcaacgccagagtatttacacagagattannnnnnnnnnnnnnnnnnnnnnnnnnnnnnnngagacagggtctcnnnnnnnnnnnnnnnnnnnnnnnnnnnnnnnnnnnnnnnnnnnnnnnnnnnnnnnnnnnnnnnnnnnnnnnnnnnnnnnnnnnnnnnnnnnnnnnnnnnnnnnnnnnnnnnnnnnnnnnnnnnnnnnnnnnnnnnaannnnnnnnnnnnnnnnngtagagacagggtttgaccatgttgcccaggctagtctcaaactcttggccccaagagatgcacccacctcagcttcccagagtgctgagatgataggcatgagccatggcgcctggcttccacagtgatgtctcatccctgctgtgggagactttcttttagtgtttgagataaatagtggtgtgaggggaaaaaccttgcttttcctgtatagagagtagctaggagcactggctttcaaatttgaaagagtatgatttgaatccaattatgtgtctgtcccataataactctttgacattgggcaaacttttaaactctctgagcttttttcctttcttgtgaaagagaactaaaatatacttatcacttaggtttgttagaaaagtaaatgaggctggggtggcggcttacaccctaaattcccagccacttggggaaggccagggggggtggaaatgccctgacggccgggacttccaagggcccgacctggcataacatgggtggaaacccccatctcttaccaaaaataaccccaaaaaattattccccggccttggaggcgcaaggtaccaaatactctagggaaccctggggcagcttcaagccaggaccaaccgctttgggaccccccgaggcctcccccacgttcgctcttgcagcccaa

SEQ ID NO: 417503 - DNA, 1037 bp, Homo Sapiens
  misc_feature (35)..(35): n is a, c, g, or t
  misc_feature (225)..(313): n is a, c, g, or t
  misc_feature (481)..(540): n is a, c, g, or t
gctgggtggcgaattccgcacgaggatccaatccnggggacgtcaccgccctagtcttcggctgttttaaaagcaagcggtttttaaaacccccaatcctgctctttgtgttggcctcctcggagttgcccctctgcaagccaacaattcgggatagaaaacacctccgtggtgttttcccggggccctcccgcgccgcgttcggccgccagcccgctcgagctnnnnnnnnnnnnnnnnnnnnnnnnnnnnnnnnnnnnnnnnnnnnnnnnnnnnnnnnnnnnnnnnnnnnnnnnnnnnnnnnnnnnnnnnngcacgctgcggctggcgctccccagccccgcctgacgctgcagctgggccggagactcgccattggattaaaaatagcgtcgccagtccgccccaagcccgcggtgcccgctcccgccccgcagcccgctctccccgtccgccccggctcggccggctggcgttgccnnnnnnnnnnnnnnnnnnnnnnnnnnnnnnnnnnnnnnnnnnnnnnnnnnnnnnnnnnnntcccggtttccggctcggtttcgttccggctcgggtgccccgccgaggtcaatggcagcgccggggcgcccctgtttccgccatgccggggcgggacgcggcagggcccgaagtacggcttgcaggtaccacatccgccgagcctgcttagtggccctcacattgccccacggaattcggcgttggccctaccgtccggggtgacccgggccctaaccagaaattgagcggccgccgttcctcactaccaaactccttccaaaggccaaacaagcgcggctcctgggggggcagcggctcaccccataatagggacgcaaatccccacagatattttcttttcgaatcttacgaaaaccgggttgaccggattttccccatacaccggatcgatttattgccatctttttacaggatgcgaagctccccgcaatcctggcctactatccccgccgaaactcccctatgtggacaataacccgccctatcccaaaatc

SEQ ID NO: 417504 - DNA, 848 bp, Homo Sapiens
  misc_feature (234)..(246): n is a, c, g, or t
aggaaatgaatacagttattgactagtaggtgttgagacaataataaacaatacagactaaataatcttagctaacattatttgtcagcattatccaaggtagggtatggataagtgccaacatggatggtcctgtaaaattcagaaatgtgggagcctctgaaagctgaagtgggtcaggaagcttcatggaaaagggagcacttgaaccagatttttgagagatcactagcnnnnnnnnnnnnngtagtttacagatgctttatttggctatgtattgtttatattgttggaattagatgccaacatttaaaaattgggtaatttctcatgaacccatatttctggcttcttctgaaatattgaaggttagcaacatgtggcctgcatttcagaaatcagagctgagtacgagctgctgtctttaaaaaagatatcctttgtcctgtaccctgaggtatttgaaattgaaaccccatttataattccttacgatctttttcccattagataatgtacttagtttcctatccctggtataacaaatttaccacgggtgactttaaaacaaattttacttcctcttatgggtcctgggaaattttgaaatcctaaaaatgggttcagcaagggcttatggttaacttcttgcaaggcctccacggggaaaaggccccttttgcctttggccctttttcccgttttctttggagggccacacctggcatgtttccttggggttaaatggggccccttttctttcaccttccttttcctaaacaaaaagcggttggcagcggtcttttacacttggggacggggaacggggacaacaagctctctattgg

SEQ ID NO: 417505 - DNA, 296 bp, Homo Sapiens
  misc_feature (164)..(164): n is a, c, g, or t
ggcctgagtggcgaattccgcacgaggctttgccgctgggaagtcatattgaattaagcacttttgaaaatggtcactgtttgtgacacacaatggttctctacagaaaacttcttctatcttatgtcattttagcagtagatgtagcttgcctgccacccagngtgcaaatatgtcattttgcatcaagcctttttcagttaaaagaaatttaaaaccttggcaatgcatttagcttcataatgaatgaagggtgggcttgggttcccccaaaaaaaccaatttgcttttggaac

SEQ ID NO: 417506 - DNA, 1533 bp, Homo Sapiens
  misc_feature (886)..(886): n is a, c, g, or t
  misc_feature (951)..(951): n is a, c, g, or t
  misc_feature (1066)..(1066): n is a, c, g, or t
  misc_feature (1133)..(1133): n is a, c, g, or t
  misc_feature (1161)..(1161): n is a, c, g, or t
  misc_feature (1172)..(1172): n is a, c, g, or t
  misc_feature (1234)..(1234): n is a, c, g, or t
  misc_feature (1274)..(1274): n is a, c, g, or t
  misc_feature (1408)..(1408): n is a, c, g, or t
  misc_feature (1413)..(1413): n is a, c, g, or t
gtagcgagcctgggtggcgaattccccacgaggtcttgcgggcaggcctggagccccccgggccgggaaaggctcgggtgcccgtggcgttctctgggctgccggccgccaagctcccggccgtggggcctcctctggggcccgcactattggcctccaaacgaggtgcccccctcctctcgcgctcccgcaccctagggtgcacctctccgttcgcctttgctgagcccttccaggacacaagtcgcctctccactgcgccgggagctcaggccctgtccggggcgccccgctgcgagagcgacggcgctgagagaggcgcggtccgacaaagcagcggccggagaaagggctccaagaaaaaaagttaggcgctggccccggacaaggcctgcgcacgttctcgacgtggcccaccaataaagctataaaacggcgaagagaagccgccctccccgccgagaccagcaaacgcgccagcgccaccggccgaaatgccaagaacggcgcctaaagggaaaaactgcccgaaagaccgcagttgccaaaaggcaaccgcaagggaaatagcgtacgtatgaactccccgaactccagggaacttaagactattacaaaccacaaccagacatcccacgcaggcgagcggggacacaccgaaagagtagaagacttcatatgcaaaacccacacgagaacatgcgaagcaacaacgccgccaagagaggctcaagaacacacaacagaggacatctccggacggggatctcatcacgccgagaatacaaatgcgcagctatactgccagagagaatgcaactgaggacactccacaagcgcgacgcacagggggacggactaaacatcacaaatataccggggaagngaagtatcagacgaaaagagctgactgacggacaggcgccaccgacgtgacatgaatacgacggngagctatacagcacgacgaacgagagaggcgggtgaagattacccggaacgcacgaacaacgacgtgcgagatagaaacgtgccacgggacggacgcaatgaggagcgagagacngatggtcccactaccaagtagcactgcgactctgagagacgaatagtaaaacaccgacgcagggagnacacactgaacgggaatcatatagtgancaacggcgacntcacgaacatgcagaagttcaaccctgataagagatagacaacacggcaaaccgaacagaangaacccagggcgagtttacagcacaaatcacccgcgacanacgcattatcatcagcgaaacactaaacgacagctcacgctcacgacaggagagcagaacaatcgcgaaacgaagaagatgcgacagacagaggacataacagactagagacaatagagaagacaaatgcgagngatangatcgatggtacgcgtcacctaggagatacaagaaagtgacttgcaaccgcactgcataatcagaagtgcgtagcagctatcataagcaaagtgcggcgcgagatctaatatatagcggg

SEQ ID NO: 417507 - DNA, 1115 bp, Homo Sapiens
  misc_feature (88)..(130): n is a, c, g, or t
  misc_feature (545)..(545): n is a, c, g, or t
  misc_feature (932)..(932): n is a, c, g, or t
  misc_feature (1103)..(1103): n is a, c, g, or t
atagtcggagcgaggtggcgagtcgctgagcccgccgcggccccgagagcggctgcagccgccgccgccgggaaggagagggcgaggnnnnnnnnnnnnnnnnnnnnnnnnnnnnnnnnnnnnnnnnnnnaccaccgtcactggagtcgcgggccagccgggcagcctccgcgggccccgggcggggcggggggcataaaattaatccttagtgaacctgtggataattggacatcgtgccactgtttcatctctttccactctctatgcttttctatggacaaggttgttgcttatttcaagcttcgaaccgtctttcttattaatgatctgttcatgcactattacatccatcatattaggtaagcgtaccggatcctgcaagaatagggtattgatctgcctcgatatgctgtgctcaacctgtgatcctgtcttttttgtaggaatgcaatctgatagaaagtgcaacatcaggcacagcttattgctagcttgtcttttccactttcttttgcgtaatacgtttattgcattgccgtttnacctatttatgtttttccttttactcctttttccctttagctttggagggaggaaaacatgctttctttttttctgtaaatatcgcgatactccgtactacgtttgctttatttcctccgtgtagaggtaatttgtttcatatatatacccggcctcctcccaccatttctacgcgacgtgggccttccatttatgccttacagtggtccaccctattatttttatgtgtgtttttcccgtggatggcgtactagcatattttcgcgcccattgtcctcaaaagtgtcgcaacatatatccccctactctttggggaatgggtataaatgctattaaactacagaccgatgtcacagggatattagatacggttagtaagtacccgntattgtggctgccactgctgtttatgtgataaatggttggcggagttcgcatgaaccatgatctggcttttatatattcttacgccgttatattatcgggtgcgatatttatgcactattatttgccgggtgaattgtggttcgttttctactttgcgcgatgttcgagancgggctctattt

SEQ ID NO: 417508 - DNA, 1059 bp, Homo Sapiens
  misc_feature (257)..(477): n is a, c, g, or t
atcaccctcacactcaggcctgaagcaaccccctgtgcccccctccccgagctccagcttcccagtgagatcaaagatccttggaaggcgggttcctgccacctgcaccagtgaggacaaaggtaaggtgagaggaattgtacgccttggctttatcctcaatctgctcgttcacctgttcccaggccaatcaggccaaaaatgcttctggtttccagaaacaaccctactacactaatataaggtggctttctgcnnnnnnnnnnnnnnnnnnnnnnnnnnnnnnnnnnnnnnnnnnnnnnnnnnnnnnnnnnnnnnnnnnnnnnnnnnnnnnnnnnnnnnnnnnnnnnnnnnnnnnnnnnnnnnnnnnnnnnnnnnnnnnnnnnnnnnnnnnnnnnnnnnnnnnnnnnnnnnnnnnnnnnnnnnnnnnnnnnnnnnnnnnnnnnnnnnnnnnnnnnnnnnnnnnnnnnnnnnnnntctgggctcctaaaccctgccccctgccactcctagcctggcgccgactataaatgaaccctccggcccttgcccggaacaccctcaatctagcactaccgattcccatggctgtcggtcctgggaagcggcaatctcatacccgctgacgccccttccaacaccaacgccacaaagctgccgtatgtaccattggaacgcccctaaacaaatgtagcgcaaacccacccatggccaaaataacccttcccttggtggcgcggcataaccctagtcgtaatctccctttccttggaccaccctcccttaacccaaatccctaataaatccgccccctttcaagcccctcaccgtcctgccacaatgggagcgccccttgcccgggctttcggggacgagggtggaatttccgtaacctgcttcccctagaacgcctccgcggtgtcccgaattaaggaagaacaccgcttgtgaattctcgatcccccgcatccgcgcgggaaataccttcttgcaaaggggtgtctcgctctttggaccggtctccacccacacccccggcaacggcgagtcgcgctccat

SEQ ID NO: 417509 - DNA, 587 bp, Homo Sapiens
ttccctgagcacatgctgttgagtaatcctgcctggaccagtacttccctcaccctagacttcaccttcagttcccctttataccacctgctgaagctgccagccagccttttcgaccaccctccctcccccaggggtgtttggcttctcagaccccagcctgagctagtgcccttggcttcctagggtcttgccaggaaagcaaaggagaacatgcataccgccaaagagtacctaataataagaactcccatcctgaattgtgatttatagtcagcatagcacatgtgtcaggtgattatacttaggctgattttagccttaataatctgcttctgtgatcctgtatgtgggaagcctagaaatttctctgtgatcctccttcctggatcactaagagacaagtcaagacataggtccattctaccacctgtgttaatctgggccttgttgagaccatttaaagaaaggcgtgatgctagaagtaaggtccaggcctcctgcacactgtttcaaggctgtgaccatagtcagatcctgttgcttgagtccaaagagtttagaatagtgttggaaaactcctaggg

SEQ ID NO: 417510 - DNA, 908 bp, Homo Sapiens
  misc_feature (42)..(215): n is a, c, g, or t
  misc_feature (279)..(279): n is a, c, g, or t
  misc_feature (527)..(535): n is a, c, g, or t
  misc_feature (697)..(709): n is a, c, g, or t
  misc_feature (777)..(787): n is a, c, g, or t
ggcgatttcaacaacagcgccgcgcatcctgccaggcctccnnnnnnnnnnnnnnnnnnnnnnnnnnnnnnnnnnnnnnnnnnnnnnnnnnnnnnnnnnnnnnnnnnnnnnnnnnnnnnnnnnnnnnnnnnnnnnnnnnnnnnnnnnnnnnnnnnnnnnnnnnnnnnnnnnnnnnnnnnnnnnnnnnnnnnnnnnnnnnnnnnnnnnnnnnnnnnatgggagtggagggctgcaccaagtgcatcaagtacctgctcttcggcaactttgctgatttcnggctggctggaggcgagatcccgggggtggtcctgtggctccgccatggacccggagaacccccaaccctccctggaattcgggaggctgggggaaaccaaggcccggggggcgaaacacccttcccaatggggaaagggcaacctacaattcccctccatctcccctggggggggcgcgccttgccacagggagaggtttcccggcgtgagcgctttttccctgggggggccctgggcgttaaagcnnnnnnnnncctaacctccccacggggagaaactccccctcccgcctgggccccccgtcgccttcggggtgacaaaaaccctttcctctattcaaacaaccggggccccttgggcggcaaacgacacccgccgggcgcttgtggccccccgctagagaaggggcgaccgannnnnnnnnnnnngccaacattttccgcgggggcggctctctgtctagcccactcccgggggggagggccctccataactnnnnnnnnnnngcggctaggggccgagaaacacgtacgccttctttttactgtcgcgcgacccgcggccggtccccacaccaacgacgcgcgcgagccgccgtgcgagtacggggcgcaccaaaatcaaccc

SEQ ID NO: 417511 - DNA, 608 bp, Homo Sapiens
  misc_feature (44)..(53): n is a, c, g, or t
  misc_feature (223)..(272): n is a, c, g, or t
  misc_feature (489)..(489): n is a, c, g, or t
gtcaagtctacttaactttacccttggtttagcccaatagccannnnnnnnnnctgatttaatcaaatagttttcttattcatttgaaaatatcatgctgtaaattctattacttgagaaggaatctgttttagaaatactttataaaagcctcatatgttcttgattgaatactggattcctaacataatgtgaattatgtgaatccagagattacacatgnnnnnnnnnnnnnnnnnnnnnnnnnnnnnnnnnnnnnnnnnnnnnnnnnnatacgatattaactttgaagtagacaaaaatttaggtgatattttgaaccgagttaaactgaaactagtgatgattaaaggtaaaagaatgagatagatgtggaaattaatttgtgacttctgggatgtccatgggaaaatttagggaaaatgtattcaccgtggaggtaagtaataattaattactgcccttacagtgttaccaagattaaatgangggaaagtatgaggaaaggtgccaagtatagaatcttggctcacagggaactttactactgaagtagtaaataagtatggaaatctttccttgttagtatgtattgaaaaatttacctt

SEQ ID NO: 417512 - DNA, 1099 bp, Homo Sapiens
  misc_feature (751)..(751): n is a, c, g, or t
  misc_feature (851)..(851): n is a, c, g, or t
  misc_feature (1027)..(1027): n is a, c, g, or t
  misc_feature (1057)..(1057): n is a, c, g, or t
cggcaaccagcggaatatccaagtggatccgggagcacctggatcttccgcgggggggagaagggggcgaagcggggagtggcaccacgtaattgccacaccgaccgtgtgaatctggacaaccctttcctgatgaaaaaatcaggtctccccactttcgattctgggcgttgctcagctgaagaggcgttgccctctcaacatgaatctgaacaaagctcctcactccctctcgacgagcaagactcagacaatgaccacggtcttaccaccaacctttccgggccttcgccacccaccatcggggcaagaactgcgggcctcaggaagttcacttgatcaaacgcgccgatcatcgccaactctacctccccacacgccagacagactcacatcagcacataaacatcaactgacgtcgcgatatgaacgcccttcggcattccccctccaacaacatcacccgtcacgaccttttttcgaataaatatgaaaggctggggctgggcctttgtcttggcgcgcacagcccggggagacggagaacctcccggataaccgctgacgggagagaacgctcgtattgtgcacctggcaaacatcgcggtggaccgtcgccccaatgctctccactctgtcccttgcaccccacaaccccaaccgcataggaatgcgcccgctccctcaccgaaccgcccacgctgtcctcgtcgagaggtctccgagaaatatcagtatagcttacataagntaactgtgcccagttgctcaatatatccctctcgacgtctccccgacgtcttcggcttcctagcaactcccttttttgggacgccttgcctccccgcagncgacccgtcactaggggggggcaatgcaaggacgccagaaatggaaacgtaacccccatgtcattgcgcggcgacgcgggcaatcctcaaagaggggctcctccgacttagaggtgtacctatttgccggaccccccgccaccctgtgccgcgaaacaaccatcactccgtgggtntcgcggttgtacctccgacctctgagccgntacgacgttccttagcctgtgcgtccacgcggaccgcagctt

SEQ ID NO: 417513 - DNA, 889 bp, Homo Sapiens
  misc_feature (161)..(224): n is a, c, g, or t
  misc_feature (656)..(679): n is a, c, g, or t
gttgaagggggctatattcccttgaaaggatcttaattgcaaagacactatagcagagaagacaacagcaagtgggtgtgaagatggctgagaagagaatgcccctgggctgctgcggcctaatgcggagctgggagctgtcggagctgggagctgtcgcnnnnnnnnnnnnnnnnnnnnnnnnnnnnnnnnnnnnnnnnnnnnnnnnnnnnnnnnnnnnnnnnctgggccctccaggcctcctcacgtgatccctcccggcctcctcgttctcagccccccgaacctcttcgtcttcctggaccccacaagccgcctcacatgctttccccccaccccgcctggtctctcttggccctgtcagtctcacctcctaccattcatccttaacaattgacagcagcagaagtcagataaacctccaggtggacacaggcaggtccccagggaaacccaacctccaaaccaaagacagcttcacgtctgaaagccaaaccacatgtctcggatgaatccacagacgggattgagaacctcttttcctgtttggcatgctttcctctgattggcccccacccttcacctattttacatattcccactcctccctaattggtttttgacaactgctgtgcccatctttgagtttggacccnnnnnnnnnnnnnnnnnnnnnnnngcatagtcacaaaccaatcaacattgcactcccccattctgagtccataaaaagcccccaactcagccacactggggggaccaccctgactgaggggaagggggctgccctcctccgggtccccttctctgctgaaaagctgtcaccccaataaaaactcccccacctggggtgcaattgggctcacggccctgtaaatccccagcacct

SEQ ID NO: 417514 - DNA, 1598 bp, Homo Sapiens
  misc_feature (44)..(79): n is a, c, g, or t
  misc_feature (127)..(186): n is a, c, g, or t
gaccgagcgccagcgagtttaagtcgacgcgaggaagcggccgnnnnnnnnnnnnnnnnnnnnnnnnnnnnnnnnnnnnagctcgacggtaccggacatatgcccgggaattcgcgccattacggcnnnnnnnnnnnnnnnnnnnnnnnnnnnnnnnnnnnnnnnnnnnnnnnnnnnnnnnnnnnntcactgccgctctcttacgtaaaacatacacacaaacttagcatggcgcactgcactgcgcgcacgctgctcctgctaactacccagactatcctcagcgaacggccctgacgcgccgcgcgcacgacactctacgtatgcacaccccctgcggcaagcgcccacgcacgcgctctgtcagctgacgccctgcaagactcggcggcctaacgtgccattgtccaggcccctggggccggccgaagaacctagactggcccagtgagcagcttcgcgatggccgtggagccggacgtggaccataacaagcttccgtggctctttcgagaagacagaccacacgccggaaagacacggggctacaggcctgttctacatacgttctaacactgacacaccgcgtggaccatagccccgtgtgtccacgcgtggcgctgcccaacgaggtcgctcgacaacgcaaggcgcaaaaggctacttctctgtcgctacacaacattaaggaagccctagatcggcgtcccttcgtctgacccctttgtctacgacgctagtaaggaacgagaaatctagtgggtgtcggtaacatgttactccgagcgggcgtaggcgttcccttcttgctgcagtgtaagtgcccgacgactggcgatctttctggacctcccccagcacgaacacccgaacgtcggacttgtaggacttcaagcgagcatgcgctggtcttagaacattgttcatctctacagaacccttggcgttcccacgtggtcacgaaaagattaaccgctgggcttaacactttaggccgggcccaaccgccccgttcttcaggccccttcaccagcgttactagcggcgggacgccacagtcttgggcggctccattcccccccgccttatcttccgccagactgcgtctcacgctgtggggggcacaacaacgggtgtctgcgccgctatggggctcccgactagccctcgcacacctacctttgccggcgcctgctagagcctccgttggaccttggctttgtcccctggtttctggtaagctttggctctatccgtaacgctctgtcgtccgcgccgcgtttagttgactgacgtacgcgtcctttgcgctcacccggatgggtgccagttgtagcagcgtctgatcgcgcatttacgcttggccgtggtgcgagctcttacccttctctggacactacccccacctctctcactcaaccatacccccaccaatcttccagctcagaccacgggctctcacgcgacgctggtcgacgcagcagcttctcgatgtggtgcatccgtgtgtgggatccgtcccgtctgtgtgagtccccggatcttccctcccatcgcttgtgctgtcggtggtcgtgtatgtgttcagagggataggc

SEQ ID NO: 417515 - DNA, 1411 bp, Homo Sapiens
  misc_feature (58)..(102): n is a, c, g, or t
  misc_feature (105)..(140): n is a, c, g, or t
  misc_feature (178)..(598): n is a, c, g, or t
  misc_feature (602)..(616): n is a, c, g, or t
ggagagaagcagaaaaaaagaagaacgtgactgatcactatagggcctcagcgtgtannnnnnnnnnnnnnnnnnnnnnnnnnnnnnnnnnnnnnnnnnnnncgnnnnnnnnnnnnnnnnnnnnnnnnnnnnnnnnnnnnagtcgacggtaccggacatatgcccgggaattcggccnnnnnnnnnnnnnnnnnnnnnnnnnnnnnnnnnnnnnnnnnnnnnnnnnnnnnnnnnnnnnnnnnnnnnnnnnnnnnnnnnnnnnnnnnnnnnnnnnnnnnnnnnnnnnnnnnnnnnnnnnnnnnnnnnnnnnnnnnnnnnnnnnnnnnnnnnnnnnnnnnnnnnnnnnnnnnnnnnnnnnnnnnnnnnnnnnnnnnnnnnnnnnnnnnnnnnnnnnnnnnnnnnnnnnnnnnnnnnnnnnnnnnnnnnnnnnnnnnnnnnnnnnnnnnnnnnnnnnnnnnnnnnnnnnnnnnnnnnnnnnnnnnnnnnnnnnnnnnnnnnnnnnnnnnnnnnnnnnnnnnnnnnnnnnnnnnnnnnnnnnnnnnnnnnnnnnnnnnnnnnnnnnnnnnnnnnnnnnnnnnnnnnnnnnnnnnnnnnnnnnaccnnnnnnnnnnnnnnngggacaaacggcaaaaagcacttggaaaccagcacaccagcacaacataacagtcacaaacgggtaacaacagacaaaaatcaagagacaaaactacaaaacaggcaccagggcacaccaacaggacaccacagcgggcaccacacatagagcacaaaggtattgccaagacacactcaaaccgtgcaacagcccaacggcaccccaaagcagcaatcagcacaaccacgagaagaactcaggggaaacacgacggaaaatgccacacacatgcgcaagacacagaaaactgacacacgaaagaggaaagacaacagacacacctgggagaaaaccgcgggcacaacaaaagtgcacacagaagtcaccgcacccaaacagaccacggtggaggggcccacgtctagcaccacaaaaaccagcacgcggagcacagcacacacggaacacacaacagcgagcgcgacaatcgaccagcaggagagacagacgcgacagagtgatcacccacagcaggtcgagaaagcaaaccagagtgtgtcaacacaaagagagaaaacaacccgtcgaggaagacagcaacgacgataaacaacacgaagcaagcaggggtacaaaacgacaagacgacccaatcgcacgcgtccatagaacacggtccgaccacacgagaacccgacgtctcaaaatcaatcacgcgtcgacggatatcatgcagtgagagaaagaataaaaaagaccagcagcagagcacatgacgaacgaacacaagagacgaagcacacaagaaacaca

SEQ ID NO: 417516 - DNA, 1099 bp, Homo Sapiens
  misc_feature (89)..(355): n is a, c, g, or t
  misc_feature (438)..(486): n is a, c, g, or t
cagctcgacggtaccggacatatgcccggagaattcggcacacttacaggcccggcgtactgtggattttcttatgatattgtaatgcnnnnnnnnnnnnnnnnnnnnnnnnnnnnnnnnnnnnnnnnnnnnnnnnnnnnnnnnnnnnnnnnnnnnnnnnnnnnnnnnnnnnnnnnnnnnnnnnnnnnnnnnnnnnnnnnnnnnnnnnnnnnnnnnnnnnnnnnnnnnnnnnnnnnnnnnnnnnnnnnnnnnnnnnnnnnnnnnnnnnnnnnnnnnnnnnnnnnnnnnnnnnnnnnnnnnnnnnnnnnnnnnnnnnnnnnnnnnnnnnnnnnnnnnnnnnnnnnnnnnnnnnnnncgccaagactccatctcaaccacacaccaacaccagccccacacacacgcgaccgtcagcccaccctcccacagcgccgtggnnnnnnnnnnnnnnnnnnnnnnnnnnnnnnnnnnnnnnnnnnnnnnnnngagaagcgccacttagccaccacacgagccgtctcaacaccaccctggcgccccacaccgggcgccacacacaccaaccccgcaaacagacaatccacgagcggcaaacgtagaggcgcaaacaccaccggagccacaacgccacgacaaaacaggggaacaggcacacggcgaccgcaccgcatgcctagacccctcggccacacaatatgacccacgccccggcccgccaccacgctgggcgagacacccacccccacccgaccccaacacggggacgcgttaggcaacaaccatgattaacaacgcgagcagacagtcgacgaaccacagagccaagcagagaagagaacaactgagcgcgaccaccaagacgccacgacaggacaaaccaacgtgcgtaagacgccaataatcatatctagtacagcaaacgacacgccccacaaaccgataatcgaggggtgcctgcgatccgttgcacagcacagaacaacagatgacggagagaactcccgcacgtaggggcacaagagcgagcacaaggtgacagctcgaaagctgccaaacttaacacacaagcgacaggacaaagaaccgcaagccgccacgg

SEQ ID NO: 417517 - DNA, 1048 bp, Homo Sapiens
  misc_feature (91)..(126): n is a, c, g, or t
acgcgcgacagcaagctcggatcatcatatagggcctagcgttatgagcgaacgacgagcgccagcgagtcagtgagcgaggaagcggcgnnnnnnnnnnnnnnnnnnnnnnnnnnnnnnnnnnnnagtcgagcgggcggacatatgcccgggaattcggccattacggccggggacagctattggggacgcgctcagcgtctcgaggcacgtgcccagtttcctttcaaaatgtcgtactgtccagccgaaatcctgtgtcaagtctcaggcattggagggtgaggcactctacgaccaccgcaaggtgcagtatgggctgcgtgtcaagagaccatataactatagctctttgatgctctagcgggatgcttctgcaacattgaaacagccatcaggaccaaaggtgttggcagtgaggtcaccgttgtcaagattttgacgaatcgtagacaatgcatagagacaggatatagcctacgcttaccagagaaggagccaagctgggaagcttgcatcagatagtggccgtcaggccttatctggccacctggagacggtgatccgggcctattgatagaacgacctgctcggatagtgacgcttctgagtctaaaagcttccatgatgggactgagaaccgacgaggatctactcattgcgatcatctgttgcagaaccaagcaggaggtgggggaaattaacggagtctaccgaggcaacgtgtgctgtgagtgatctggagtgaggacttaattcgggagacaatctggtgacttccgtaccgctggtaggttgccctgtgcaaagggtgagaacagcagaggaatggtctgtcatgattatgaccctgttggcacagacggtcgggatctctattgacgctgcacgttaacacaggcaagggactggctgttcacacgtgggtcagcctcatgaccgagaggacgtgcccactccagaaggtgttgacaggacacgagctcccgcctttacattgtgacgctcacgagagtaacggggcgcggaagctccgaaccgctagcac

SEQ ID NO: 417518 - DNA, 1024 bp, Homo Sapiens
  misc_feature (25)..(25): n is a, c, g, or t
  misc_feature (79)..(114): n is a, c, g, or t
acttgatagatcatatagggccctnagcttgatgagcgaacgacgagcgccaaggagttagtgagcgaggaagcggcgnnnnnnnnnnnnnnnnnnnnnnnnnnnnnnnnnnnnagtcgagggacggacatatgcccgggaattcggccattacggccggggttctttctagacctgccattgttccaacttcaaacaagtgacctctctttttcccctccctcccacttttttgttgttgtttctaatgccactgtaacgggttgcaactattgaaagcaacagcattctctgagtatctaacgtaaatgtagaatttcagttttgcagccctgataattgtaacttcctaaagagtggtgtgaggttcttaggaagtcacaatttcagagttaactattaagtagaagcagttgttaacaaaacccctttagcaaataatgcagcctctgttgctctgttgtcaaattaattggtatttgattcctttgttgtgtagagaggtctgtcaccttccgcattgacacctctccaagagcgcttccctgttagaatttttctgtttcctttggactaaacatggagaaactggtaacagttctttcttccttgctcatactttggaaattctgccatactctgaagaacactgaagagtcagtagaggcttcacgtatattgcagcaagtgaaaaacgttgagaaacttactttctgccagcgcaatttttcactagaaataccaatttataattcccttataaagaagtaccatttcacacttcatattatctcttgcgagtctaagcctactacaactgttctctgtttcaaatgtaattttgtcaactaagtcttggcataacctacacgcaattcacaatctaagctgggcgcaaatatcttttaggcgctccaagctctaatgggtgtaatcggctcccaaggacacagttagggcacatttactcctttaccatgggctcctgcaacaaccacgcgctatacggcatccatcccacatc

SEQ ID NO: 417519 - DNA, 640 bp, Homo Sapiens
  misc_feature (51)..(82): n is a, c, g, or t
  misc_feature (86)..(121): n is a, c, g, or t
  misc_feature (171)..(424): n is a, c, g, or t
  misc_feature (461)..(600): n is a, c, g, or t
gacaaaaagaaatgaataagtcatatgggcgccgcgtgttgagcgaaggannnnnnnnnnnnnnnnnnnnnnnnnnnnnnnnccgnnnnnnnnnnnnnnnnnnnnnnnnnnnnnnnnnnnnagtcgacggtaccggacatatgcccgggaattcggccattacggccgggnnnnnnnnnnnnnnnnnnnnnnnnnnnnnnnnnnnnnnnnnnnnnnnnnnnnnnnnnnnnnnnnnnnnnnnnnnnnnnnnnnnnnnnnnnnnnnnnnnnnnnnnnnnnnnnnnnnnnnnnnnnnnnnnnnnnnnnnnnnnnnnnnnnnnnnnnnnnnnnnnnnnnnnnnnnnnnnnnnnnnnnnnnnnnnnnnnnnnnnnnnnnnnnnnnnnnnnnnnnnnnnnnnnnnnnnnnnnnnnnnnnnnnnnnnnnnnagcgggggtggagcgcgagtgagagaccactactctnnnnnnnnnnnnnnnnnnnnnnnnnnnnnnnnnnnnnnnnnnnnnnnnnnnnnnnnnnnnnnnnnnnnnnnnnnnnnnnnnnnnnnnnnnnnnnnnnnnnnnnnnnnnnnnnnnnnnnnnnnnnnnnnnnnnnnnnnnnnccgcgcacaaaagggaaacacagaacaacacagaagaaaa

SEQ ID NO: 417520 - DNA, 772 bp, Homo Sapiens
  misc_feature (44)..(83): n is a, c, g, or t
  misc_feature (86)..(121): n is a, c, g, or t
aaactttttcatagttacatataggtgcccgctcgcttgaaagnnnnnnnnnnnnnnnnnnnnnnnnnnnnnnnnnnnnnnnncgnnnnnnnnnnnnnnnnnnnnnnnnnnnnnnnnnnnnagtcgacggtaccggacatatgcccgggaattcggccatatatggccggggtttgctcctttgagtagaacagtgggtttctactgctgcatgtaaacgagtgcgagctagaagcaattaatgcacgtaacgtagttgactaaatgagtatacactgtgcctcgtcccactatcgtcccgataacgagggaacagcaagtagttccgaagtttatatttaacacatgtacatgtgggaccataaaaacatgtgccaaggttgcacaacgaggctttaaacgacccgtattgctcctgagggtcttgtttatcggtgtcactcgttatgcagaatgcttcagcagggtcgtaatgggcacatcaatccattgtcacaccatgcaccacggcaattcgtccttgctatatttgaggttgctttgcaaaactttgcacagttcccatcaatactgtgcgaaacaatctaaacagcagagtcgggagtggggtgtacttacaagagtggcatttataaagaggtccaaatggtggtgagaaacacaagaatttcttacagtggataaattcccaaaaagtattgtgaacttgatataatacaataataagagataaaagggaaaagggttaaaagagtaggtggtgatagtagaa

SEQ ID NO: 417521 - DNA, 1026 bp, Homo Sapiens
  misc_feature (72)..(107): n is a, c, g, or t
  misc_feature (146)..(292): n is a, c, g, or t
  misc_feature (313)..(342): n is a, c, g, or t
aatttgtaatatctatagggcgctgcgttaagcgaagactagcgcagcgagtattgagcgaggaagcggcgnnnnnnnnnnnnnnnnnnnnnnnnnnnnnnnnnnnnagtcgacggtaccggacatatgcccgggaattcggccannnnnnnnnnnnnnnnnnnnnnnnnnnnnnnnnnnnnnnnnnnnnnnnnnnnnnnnnnnnnnnnnnnnnnnnnnnnnnnnnnnnnnnnnnnnnnnnnnnnnnnnnnnnnnnnnnnnnnnnnnnnnnnnnnnnnnnnnnnnnnnnnnntctccagaacacaaggaaacnnnnnnnnnnnnnnnnnnnnnnnnnnnnnnctgtggtgtgggccggcacgctagccaccggaagaaagtttttaataacaacaatatctcgttggtgggcaccacgggcccacacaaagggtacaaggtgcaaacatgggcaccaaaagggtgtgtccccaagaggaaaaccgcggggccacacgacacataggtgtgcggggattctccccacactatataaaacacagcgccgccggggtaacaaccgagagcgtctccggataaaaacatcttccaagagggcggagttacgaaggggccacacacgcgggggctttatcacgacggggcgcccagaggaagaaacacgaatatactaacaattaaagaccgggcgcgtggggaccaagatggaacaccatacacacaagacacagaaaggaaacacagacgcagcaccaacagccaccaaaagccacaccaacaggggaaaccattcggagaacaacagcaagaacaacgagcgcgaaacaccaaccacaacatgacaacaacatagaaccaacgacgaagaaaagcacaaccagcgagagagagaaaccaaacagccacaacacacacatcacaaaacaaaaatccaaccgcgagaagcaccgacacccgaagagagaagagacaccacgcaagaaccgcaacaaaccaccgacacaccacacgaaaaggaaacaaaac

SEQ ID NO: 417522 - DNA, 1433 bp, Homo Sapiens
  misc_feature (35)..(35): n is a, c, g, or t
  misc_feature (89)..(124): n is a, c, g, or t
  misc_feature (181)..(237): n is a, c, g, or t
  misc_feature (819)..(858): n is a, c, g, or t
tgaagagcagcacttgccatgctatatgggcctangtgttaagcgaaggacgagcgcatggagtcagtgagctgaggaatgctggctgnnnnnnnnnnnnnnnnnnnnnnnnnnnnnnnnnnnnagtcgacggtaccggacatatgcccgggaattctggccattactgtgcctgggggcnnnnnnnnnnnnnnnnnnnnnnnnnnnnnnnnnnnnnnnnnnnnnnnnnnnnnnnnngctggatcatgaggatcaggagatctgagacatccttggctaacatatactgtatctttgtggctgtgatacgtgagttatcacactggtgctttgcgccagagatgggaacttagatcatagttgcaccatttgttactaaaaacacatgcacatcaattaagtcctaaacattgttgcattgggagattacacatgagcacgatggaacaccccacctatgcccgcacccaacaccacagctctcgatcaccgaacacaacatcacatactcaaaacatctcaaaacgccccatccataccttgcatcgccgtgatcatagatcattttactcacaccacataggtgcaccaagcggaccacatcacttaccaattgggactagcgtacaacacacacaggccgtcacaccagcggacagcacgaggagcccaagccaccacaacagaaggcctaccaaccaaagtcggaagacgcacttggcaacaagaggagaaccaccgggggagcccccatatagtggacgacacacaacaacgaccagcccaccagagacggaagaacagagcagaagaccagannnnnnnnnnnnnnnnnnnnnnnnnnnnnnnnnnnnnnnntcgcacccgaggagaataacagcaccatgcgacacagcacgtaacaggagtcactcaactaaggcgttggcactccagacgtagcaatagtacagacacaacaaatcgggtaggcaacgaacaagaacgtacttatagacatcagcactctaacatcagtactattcatcatatcgcactagtttggactcctcactgaacaacaatataataactaacgacgcacgaagcacagaacgacgtagtacacagaccgattcgtggtaatactagagacacacaagtagcagagagcacgctcgacccgacgcagtacccccgcaccgtagtaactaggtctcacagcacaatcgacatcagcattaccactcacactacgtacacagtaacacagtacatacgcagacagtgagccaaacacagcgacgcacaccacgcaggacaacaagcccaacgcacactaagaagcaagccagcgacacgcacgtcaccaagaagacactacgagaccattaggaccccgaacatccccaatgaggagagacccttacatatgaggcggacgacatatgacg

SEQ ID NO: 417523 - DNA, 1400 bp, Homo Sapiens
  misc_feature (62)..(101): n is a, c, g, or t
  misc_feature (105)..(135): n is a, c, g, or t
  misc_feature (190)..(198): n is a, c, g, or t
  misc_feature (202)..(229): n is a, c, g, or t
  misc_feature (1186)..(1247): n is a, c, g, or t
  misc_feature (1253)..(1340): n is a, c, g, or t
accaacccaaggccaaaacgccacagcttttgaatacatctatcggggccgctcgttgaggnnnnnnnnnnnnnnnnnnnnnnnnnnnnnnnnnnnnnnnnccgnnnnnnnnnnnnnnnnnnnnnnnnnnnnnnngttatcagtcgacggtaccggacatatgcccgggaacttcggccattaacggccnnnnnnnnnaacnnnnnnnnnnnnnnnnnnnnnnnnnnnnccattttcggggccgctcagcggcccatgagacaaagcttttataaagaccaattcgtgattgggcgcggcggacaccacaaaaaaagaaataggggcaacactgtgtggctccactgcgcgtgtgtccacaaaagagaagaatcgcgggggccatagtcgccataggaggcagcgggaaactcacacacacccaatctacacaaacaaagcgcacgaggggggcgaacaaaccgaggagccgtgttccgtggcgacaccacaaacctcccccgagagatgggagcacgatatctgaggagaagaaggcccacaaatcacgcgggcgaggagccactctatcacacaccaccagaggagcgagacgctcatcaacaagcgcgcgacgacctcagcgacgaattattctcacacatatatgaagcggagcaccccgcagaccctgctgtggtgtcagcaaccccaaccaggcagcaacggagcacggaccgagcaacggagcgagagccaaccgcgaaagtggagaacgaccgacgagaggaagcgggagagagccgccgagaccaaagaagacgaggagcacaagaggagacgactaggaggaagacacgacgactaaagaacagaggggtcaaggagaaaacgggaacaagccagagcgaagcgcggagatgacaaacaagaagtgacgaggaagaagatagaagatccacgactcagggacgagaccgagaaagggagacagggaaggacaacaggacagcagaagacggcagtgaagaggcagcgaggacagagagagagagcagagaagacaagacgaaaggaagagcgaacgcagcggcaggacccgagagaaagcgggacggcacgaggatcgacacacccggcaagtgcaacacgacggaggcgcggcagagcagccagaggcgagacaggcagagcaacagaagagccnnnnnnnnnnnnnnnnnnnnnnnnnnnnnnnnnnnnnnnnnnnnnnnnnnnnnnnnnnnnnngaagcnnnnnnnnnnnnnnnnnnnnnnnnnnnnnnnnnnnnnnnnnnnnnnnnnnnnnnnnnnnnnnnnnnnnnnnnnnnnnnnnnnnnnnnngcaggaagaaagaggggaggagaagcaagaacacgggagggagagcgagggagaagaggg

SEQ ID NO: 417524 - DNA, 1155 bp, Homo Sapiens
  misc_feature (49)..(94): n is a, c, g, or t
  misc_feature (97)..(132): n is a, c, g, or t
  misc_feature (283)..(283): n is a, c, g, or t
ggagggacccacgaaactttgcaaccatatgggcgcctaacgcggttannnnnnnnnnnnnnnnnnnnnnnnnnnnnnnnnnnnnnnnnnnnnncgnnnnnnnnnnnnnnnnnnnnnnnnnnnnnnnnnnnncagtcgacggtacccggacatatgcccgggaattccggccattatggccggggtaaaaggaactcgtgccaatcttactcgccgtccttgtttaccaaagatgctatcgaggctgcgtagcagtctaccgaggtattacgtacgtgcaccngcctgcgccacgggcactcagtgtttaactggccgcgggtacccttaacgcgtgccatgtgtactcataactctatttgtgtctctctagattaagcggaccatgtatagatatgggtcgcatcgaagcgtgctctcacgttggtcatactctaactctatgaagctacgtgaaatttgatccctgacactcgatgtacacaagcgcgggtgatgagccacgagccgaagaaacgaggaatgagtccatatgtgatgactctgacaatgtgtattcactagcaaaatagttactctaatgaagactccatatgttcgtaacgctaatcaatagtgtgtctgaaaaagtgtcggtcgggtgtcgtatcctcggaagtcggaaccgcgagaagcatcgcggaggaaggtgactatgcattacgacttctgccagttgcagcgacctagctatagctcagtggaacccatttaagctaggatcaaagggaacaggtgtaccctagggtgtgagtagagcaatagtattctagagtgcagatcaggcaactagggttttaaagacgtcaaatgttggggatcaggacatttccaaggggtggaggtcgttgatcaagaaaggtacgtcggttctaaggagaaaacgtggtaaagttaactgcgtgatgaagaagtgaatccaggtcggatcatatgtagttcaaattacctacctgtacgagaggcatgacaggtagggctactgacaaagatctttccccggagatgatatcatgcagttagaatttccgagaaaaagattgaaaggcttggtggggggggcgaaaagttttaaacagggggggcaaaatagaaaagcaggaaattgggaaaagg

SEQ ID NO: 417525 - DNA, 749 bp, Homo Sapiens
  misc_feature (53)..(95): n is a, c, g, or t
  misc_feature (99)..(134): n is a, c, g, or t
  misc_feature (182)..(306): n is a, c, g, or t
  misc_feature (308)..(345): n is a, c, g, or t
aaaaaacaaccaagagacctttgatatcgtcatatagggcgctagctcgttgnnnnnnnnnnnnnnnnnnnnnnnnnnnnnnnnnnnnnnnnnnnccgnnnnnnnnnnnnnnnnnnnnnnnnnnnnnnnnnnnnagtcgacggtaccggacatatgcccgggaattcggccattacggccgnnnnnnnnnnnnnnnnnnnnnnnnnnnnnnnnnnnnnnnnnnnnnnnnnnnnnnnnnnnnnnnnnnnnnnnnnnnnnnnnnnnnnnnnnnnnnnnnnnnnnnnnnnnnnnnnnnnnnnnnnnnnntnnnnnnnnnnnnnnnnnnnnnnnnnnnnnnnnnnnnnncttgtgtcggcgcggaatagagggacccttggaaaagagtttttagaaaccaactccggagcggggcgccgcgaggccaccaagaaggggaccggtggcccagttggcaacaacggtggtcacccaaagagagaaaactcaggggacacatagacacacgggacggagaattaaccacacaaaactaacaagaagcacgggcacgggggggcgacaaccaccggaagaaagagtattcgtgagcaacaaacgcctcccagagcagggagagcactacaggaggaggagcaaaaataaaagggggggacacctaccacacaccaagggggagagtgtccaaaggcagaagagacctcgcgcgatgtatacgacatagtaggcgcgccccggcgcacgggggggga

SEQ ID NO: 417526 - DNA, 383 bp, Homo Sapiens
ttttgtggcgccggctctgggccctgaaaaagttttttaaacaccaatttcgtgttgggcgccacacggggggcccacagagagagagtatacagggcagaccctggggcgccaaaaagcgtggtgtaccacaaaaggagaaatctccggggcgccaaatgagacaaacggcgggctgggacattcacaaccacacaattaaaaacacccgccgggggggaaacacacagaaaacggtttctgagacaaaacatctccaagagtggagatatcacagagagggcaaaaccaggggcgaatctataacaaaacagaggaggtcccaaaagagaagagccagaaaatttcgaaatataaagcgccctgacagtcgtgctacgact

SEQ ID NO: 417527 - DNA, 1767 bp, Homo Sapiens
  misc_feature (46)..(90): n is a, c, g, or t
  misc_feature (94)..(129): n is a, c, g, or t
  misc_feature (181)..(190): n is a, c, g, or t
  misc_feature (193)..(262): n is a, c, g, or t
  misc_feature (724)..(978): n is a, c, g, or t
  misc_feature (1076)..(1156): n is a, c, g, or t
  misc_feature (1253)..(1312): n is a, c, g, or t
  misc_feature (1398)..(1481): n is a, c, g, or t
  misc_feature (1524)..(1584): n is a, c, g, or t
  misc_feature (1624)..(1688): n is a, c, g, or t
caacaatcgccctttagaatatcatcctatgggcgctagctcgttnnnnnnnnnnnnnnnnnnnnnnnnnnnnnnnnnnnnnnnnnnnnnccgnnnnnnnnnnnnnnnnnnnnnnnnnnnnnnnnnnnnagtcgacggtaccggaccatactgcccgggaacttcggccacttaccggccnnnnnnnnnnacnnnnnnnnnnnnnnnnnnnnnnnnnnnnnnnnnnnnnnnnnnnnnnnnnnnnnnnnnnnnnnnnnnnnnnttgtggggcggccccggggcagcaaaaacaacggggccccagtggcaaaagacttattgccaacacgcaacgcgtgaaatggggaggcgcggcgggccacacaaagaagtgtaaagaagacaacagtaggaataataagggagggaaccacataggagaagaacctaggggggcgaaaagaataaaaacagagaaccgaggaaccatccaacacacaccataatagaaaaaacaccgcgctcgagggagatcaaaacaagagcgacgcgacatgtgcgcgaaccacacacaccccaccaacgagtgcgagacactacccacgagggaagagaacaaaatcaaaagaggggagaatgctaccaatgaccaacagcgcgggagcctacctcccacaacagcgagcaggacccggcaggaaataaaaagacaaaaattacgcgacccgccgggcgcgtggggggnnnnnnnnnnnnnnnnnnnnnnnnnnnnnnnnnnnnnnnnnnnnnnnnnnnnnnnnnnnnnnnnnnnnnnnnnnnnnnnnnnnnnnnnnnnnnnnnnnnnnnnnnnnnnnnnnnnnnnnnnnnnnnnnnnnnnnnnnnnnnnnnnnnnnnnnnnnnnnnnnnnnnnnnnnnnnnnnnnnnnnnnnnnnnnnnnnnnnnnnnnnnnnnnnnnnnnnnnnnnnnnnnnnnnnnnnnnnnnnnnnnnnnnnnnnnnnngaaagagagcgcaagagcagacgggtagcagaaaaaagggccggagagcagaagagaaagcacagagagaaggaggagagaacagcacaaaccaagannnnnnnnnnnnnnnnnnnnnnnnnnnnnnnnnnnnnnnnnnnnnnnnnnnnnnnnnnnnnnnnnnnnnnnnnnnnnnnnncaacaccagaaaggagacacaagggaggaacgcaccaggaaagagaaggaggcacaggagaggcgcaagacaggaagagaagaggaacgggggaggnnnnnnnnnnnnnnnnnnnnnnnnnnnnnnnnnnnnnnnnnnnnnnnnnnnnnnnnnnnngaggcgggcagagagcggaaacagcgaggagagacagcgcaaaagacagagaaagcgaaggacaggagaacggcggaacgaagacnnnnnnnnnnnnnnnnnnnnnnnnnnnnnnnnnnnnnnnnnnnnnnnnnnnnnnnnnnnnnnnnnnnnnnnnnnnnnnnnnnnnggcgagctagtgagcgagcacggccgcaagccaggagaacagnnnnnnnnnnnnnnnnnnnnnnnnnnnnnnnnnnnnnnnnnnnnnnnnnnnnnnnnnnnnncgagcaagaggcgaggcgaagagggagacgcaaggcacgnnnnnnnnnnnnnnnnnnnnnnnnnnnnnnnnnnnnnnnnnnnnnnnnnnnnnnnnnnnnnnnnncacgccggacaagcgaggggacagacggcacaggagggcgaggcaggggaagcaggaagagagagggacgcaagagaga

SEQ ID NO: 417528 - DNA, 1109 bp, Homo Sapiens
  misc_feature (87)..(122): n is a, c, g, or t
  misc_feature (181)..(207): n is a, c, g, or t
  misc_feature (336)..(344): n is a, c, g, or t
gaaacaaagaagaaaaaagacaactgtttaatatagggcccagcgttagcgaagacgagcgcgggagtaggagcgaggaagcggcgnnnnnnnnnnnnnnnnnnnnnnnnnnnnnnnnnnnnagtcgacggtaccggacatatgcccgggaattcattctagaggccgaggggcgacatgnnnnnnnnnnnnnnnnnnnnnnnnnnngggccaggggaaaacaaaaattggggaaacaatcagcgggtggcaaactgcggaattctttttttagaagcgccgggagcctttattattccccagattttttctcaaacccctttttaaatctcctcnnnnnnnnnttttacacaccataaattttttccccccattcattctttttttcctgtgaaacacattgtggacccacctgagatgtaatatcctctcctcattattattttatttataatcgcgacttaaaaaatgagccgcgcgggcggtggttgggcaccagcgacacatttgtcgggttcttcgttggtggcgacacaccatccaaacacactctaagagtttttgtgggaagtgtgtacagcggaggcgggcggggagaagattttttctcacaataacaaccagtaccatgtgggactccacggcttctttattaaccacaggaaaaaattttggacgcaaggggccgcaccaagggacttgggggagaaaaatcctccacacggcagcgacctggataaggtgggctccacacactcctttgctgtctaggaatataaggccacgggcgccttacacacttgtgtgtgtgggcccattaacacagaacacggggagcaacgctttgtgttgacagcaaccacggggagaagactcgttggttgatatacaacacctcgtggggggtcaaacgaacgtctcccggtttgtaaaagacccgcgtcaacaagtatgtgtgtcacaaattgttctcgcccccgcaacaagggttttctttaaaactctgaaaaggccacgaccggtgttcccagagaaacaatggccagtctaagtcaaagcggcgcgggatagggccctttggcgacaagaaatcttcgaaaacggaggga

SEQ ID NO: 417529 - DNA, 1014 bp, Homo Sapiens
agtcgaaggtaccgtgacatatgcccgggaattcggccattacggccggggccggggcttgcgtcagcggtgtgccagaagcgggtggtgccaggctctgcgcaccgtggggttcggggccgggacgcctggcgggaggagggcaccggccggggtcccgaacgccggaggcggtgctcggacacgccggggctgcggagtgcatcacgcggcggtacaagcctcagctctgccgggcgccgaggcgttccgcgccgggacctgggttgggcagcctggtggccttatggcatcgggagcgcttcggcttggccctgcggggggagcgcatccggctttgaaccccggggtagtagccccggctggcaagggctgggccgcccgaagactcaccagggttatgggactcagggacaggagagaaattgaaaggccgagcgccagttcacatccaagaggggggaccacaacggcgaattaacataaacccggtgtcgaactgcaaaagcaaactactaggccggcctaataacccccacaagcaaacacttacaggtacccccgggtctatgtgacccactggtgcgtgccagacgcacccaatactctcaggtatggagggcacaccagaggactactagcacagggagatgttgcaccgtagcacagtgacggcgacgcgattaaaactatcggcgcccactgtaaggaatgtcttgtagcgacccctgcgccaccgttaattaccaccacggcaaatgacacccaagacgatgccgagcaccctacgctcttaaaccaaaaatcttcccaggtatggatgccaaagacacataagtgttcgggcccctcataattagagagcagaggtcacatggcgcagagacaccgtcgcttgtttgtcacacacagcgcggcacaacacgattgacgcttacttcccatggctacaactatgcagtacccagttacgaccactaaatcagggaaccggcgtactgcagcaacggtgtc

SEQ ID NO: 417530 - DNA, 812 bp, Homo Sapiens
  misc_feature (103)..(138): n is a, c, g, or t
  misc_feature (203)..(245): n is a, c, g, or t
  misc_feature (673)..(736): n is a, c, g, or t
tcccccccagcccacacaagaactctttgatgactcatatagggcctacgggttaagcgaacggaccgagcgcaggaagtcttttgagcgaggaagcggccgnnnnnnnnnnnnnnnnnnnnnnnnnnnnnnnnnnnnagtcgacggtaccggacatatgcccgggaattcggcgcattacggccggggggggacccaagatnnnnnnnnnnnnnnnnnnnnnnnnnnnnnnnnnnnnnnnnnnntttgttgggccgcctctcggcctctctcaaaacaacttttaataaacacattctgcgtttgggtcgcgtgtgcccccaatagtggagaatgttgtagaccctttgttgcgcctaataccgttgtgctcccctaagagagaacacctccgggtcaaatgaacatagtgcggatagagcatcttctcaccacatatataaaaaaatgcccgggggggaacaacactagataattttttcagaacaatattcctccagacaatggaaacctacagagagcgaaaaccacaatcgtcgggtgactttttacttacacaggggagagtccccacagggacagatcctctgagaattaacacacattttgcaagcccccccagatcctgtgtgtagtaacatcacacatactaacaataacaaaaaagacatannnnnnnnnnnnnnnnnnnnnnnnnnnnnnnnnnnnnnnnnnnnnnnnnnnnnnnnnnnnnnnnaataaaactcaaccacataacctccgaataaataacctaaacacacaaaacaacaataaacagaaaaacactatac

SEQ ID NO: 417531 - DNA, 904 bp, Homo Sapiens
ccaacgcgcatgattatgttaggaaaactgttctggcagcaatcatagagcctcagaactgagagtgacgtcgcctgtggatagatggcaggcgtgtgaaacaggggcatcgacattgttacgagttttactggggagcatggataagagctcgatctaagttttccggatgccagaggccggctaccttctggagactgtttcactcaaccatgtgcacccttggaccagtttgataggtggcttaagtagcggactagtacccaagtatgtagatttggctcaattcagtaccattgaaaaataactttgacgctggtcgcttatccttatgtacaccgttactagttcttaagtgcgtctgttgttcatacgttggtcgtgtcgttcgtcatatggactcaacatcccttgtggaaagttgactctcccacctgcacctgtttatcactgtatactatttgataaattgctcatgtggatctcatcgtgaaatattggctccatggttgtgtctaacttcaagcatatatacctggtcatttaagttactcactaaagaaccataacaagcgagctaggtattgaatagtcagccacgcagactttttgttgaagcgtctcatttcatcggatattacccgatgcactctgggagtagacatgtgtacgtctaatcatattgtgatttgcgctcatgccgaactcccatccttagtgtcatgccagtacccttgataaggtcctcggcaagttggcgttgccaacttgtttttggacgcaggaaattggcgggttacagcgtcaacgactcatccggtcaggggcaaaacaggggatatgggggaattcttgggggacaaaccttcgccgggacagatacacggtttttgacagtattcgc

SEQ ID NO: 417532 - DNA, 999 bp, Homo Sapiens
  misc_feature (43)..(338): n is a, c, g, or t
tatcagtcgacggtaccggacattatgcccgggaattcggccnnnnnnnnnnnnnnnnnnnnnnnnnnnnnnnnnnnnnnnnnnnnnnnnnnnnnnnnnnnnnnnnnnnnnnnnnnnnnnnnnnnnnnnnnnnnnnnnnnnnnnnnnnnnnnnnnnnnnnnnnnnnnnnnnnnnnnnnnnnnnnnnnnnnnnnnnnnnnnnnnnnnnnnnnnnnnnnnnnnnnnnnnnnnnnnnnnnnnnnnnnnnnnnnnnnnnnnnnnnnnnnnnnnnnnnnnnnnnnnnnnnnnnnnnnnnnnnnnnnnnnnnnnnnnnnnnnnnnnnnnnnnnnnnnnnnnnnnaccaaaacacaacaccacgaggatactttcccccacgggctgtccttatccaccctctccaaccagctgcgcggcaccatcaccacacaagagcgctccaactgacaccacttgtctgttccaccacttgtacgcgcgcactcctttacagaccttatctccacccacagcggcatctcaacctcgcccttttcaaaccccccacttaacgagatgcactgcctcaccataccagagcggcagacgggcaatatgtgcgccccttatctcgagaacaccaagatttcaaccaccctggtgtctcccaccgcagcccacatgggaagctggcggccgcactccccgggtgtgccccccaccccacatctcttcaccaccacagttgacgccggacacagtctccgcaaactcctcacacaagcgacgccctcgccaccactcactcccttcacgccaacacatcacggacggggcaagaacatgcacacacactccgcggccgacaactgcttcttctcacgcccacgatcgtcgtgacccccccgactttcacaaccgtgcccgtggacaacatctccccaggctaacacactttggccccgcagttcccaacatgctcgccttctatccgccacacctcttgcgaactcgcgcgacccct

SEQ ID NO: 417533 - DNA, 1013 bp, Homo Sapiens
  misc_feature (74)..(109): n is a, c, g, or t
aaaaaacattgatgcatatggggccacgggtaagcgaacgacgagcgcccgagctttgagcgaggaagcggcgnnnnnnnnnnnnnnnnnnnnnnnnnnnnnnnnnnnnagtcgacggtacggacatatgcccgggaattcggccattactggccgggcacacgaaaggttaaattagattgcacagttaataatcacgttgatatttatggtactatgtatgtgggtgatgcctttctcttttggtgcccagtacatatattatgcctgtctaggttctgaactggggctgtattgcagctagtggtagaatcatggagtatgttaggttttgatagcgtagatgtttaattgtgggatctgcgcagttgtggttctggcacaagagtcattgacaaaccatctgagtaatggtcaaatattataagaaagatattcttcctgtaggggaagtacagtttttagtcaaagtggccgttatatcctcttgttgaattgtacataatacagatgttgtgagaaagtagttggggtgtagtatgccaatgaaaatactgttttatgggtgcctatattggtaactaagttattgtactaagtgcgatatgtatttttgaaggtaacggtacaagtttaacatgttgtgtcacctgctgtgtgtcctgaaacacgaagttagcagtgttataatcatctgtagaagtgctgacagaatagctttttgcaatcatgttatgggttcacaggaatattttgtaaaagtaaagcacaaattggattaactgattattggaacgtgactaagataagtgcttccaaatacaagggtatgttaagagatataggtatcgccggtaagatgtctagtgaacatatcagggtaagggttggaataatataattttcaggagaaaacagaaaaagagaattgggcgggcgagatacacatcgtgggggcaaggaaaaggatagatacaaacggcatgtgtcaaaacgggggcaagagggtgttg

SEQ ID NO: 417534 - DNA, 1156 bp, Homo Sapiens
  misc_feature (83)..(118): n is a, c, g, or t
  misc_feature (166)..(278): n is a, c, g, or t
  misc_feature (489)..(497): n is a, c, g, or t
accggaactggtaagatcatatagggggcccagtgggtaagcgaaggacgagcgcaggagtcatgtgagcgaggaagcggcgnnnnnnnnnnnnnnnnnnnnnnnnnnnnnnnnnnnnagtcgacggtaccggacatatgcccgggaattcggccattacggccgnnnnnnnnnnnnnnnnnnnnnnnnnnnnnnnnnnnnnnnnnnnnnnnnnnnnnnnnnnnnnnnnnnnnnnnnnnnnnnnnnnnnnnnnnnnnnnnnnnnnnnnnnnnnnnnnncaaggatcaggtagactaggagagaccgtgagttgtggccgtcagacgtcctgtgtaaaagcttgtttgagaaacgtcgccgattgtggtgccagcggaatcgcagagtgacgttggcggaatagtggcgatcacaggaagagggctcaagggaaacccggtgtgggggaaaacgggagggacggcgtcaccgtatagcaaaagacaggcnnnnnnnnntaaccgatggacgattcgggcctcgcatgacccgggagcggggctaggaagagacacatcaagggggagatttgaaaggcgcgggtaatcctgggagggaggatatcaatatattacaaatggtggcgccgtgggtctggtggaaaactggagaaaagcgacattatctgccccattggaattgagctcgggcaagacatagtgggttaccacaggtgaaaacacagacgattcattgcacacaggtgacgggtggcaattgaacagagtctgggggactgcaagggcctggattgaaaagctattggcaggttctccacagctcaaaagcaatcatcacaggggagagactggactaaacgcaaggctgggttgaagggtcataaaggccatgcaagataaccaaagaataggcggagccaccccaataatgctccacctccagggagaagtaatcgcagaaatgcgaggccaaagggagttgagagaagagcgcctacagccctcgggtctctggaaggcctggcgaagaccgggaccatatacatgaggcgacaaggaaagcggtcgaacaagacaaaaagcagccaggcagacggcccagaggacgggagccagagacacaccgtgggaaacaagagaaaaagagccacaacagg

SEQ ID NO: 417535 - DNA, 1155 bp, Homo Sapiens
  misc_feature (50)..(88): n is a, c, g, or t
  misc_feature (92)..(127): n is a, c, g, or t
  misc_feature (177)..(441): n is a, c, g, or t
  misc_feature (444)..(475): n is a, c, g, or t
  misc_feature (801)..(847): n is a, c, g, or t
cgcccacccccgtcaaactatatgaccctcatggcgctcttggtataagnnnnnnnnnnnnnnnnnnnnnnnnnnnnnnnnnnnnnnnccgnnnnnnnnnnnnnnnnnnnnnnnnnnnnnnnnnnnnagtcgacggtaccggacatatgcccgggaattcggccattacggccgggnnnnnnnnnnnnnnnnnnnnnnnnnnnnnnnnnnnnnnnnnnnnnnnnnnnnnnnnnnnnnnnnnnnnnnnnnnnnnnnnnnnnnnnnnnnnnnnnnnnnnnnnnnnnnnnnnnnnnnnnnnnnnnnnnnnnnnnnnnnnnnnnnnnnnnnnnnnnnnnnnnnnnnnnnnnnnnnnnnnnnnnnnnnnnnnnnnnnnnnnnnnnnnnnnnnnnnnnnnnnnnnnnnnnnnnnnnnnnnnnnnnnnnnnnnnnnnnnnnnnnnnnnacnnnnnnnnnnnnnnnnnnnnnnnnnnnnnnnncccgggggcggggggcaccgggcccctggaaaacgcgtccaacaacaacacacagaagagcgcaccggcgccacaaaaagaaacagtcacactggtgacaacacgtggcaccaaggagaaccccggggcgcaaacacacaaggaggggaatccacccaattaaaaaaagccgcggggagccaaagacgagccgttcttgacacccaaaatccgagagcagggaacaccgagacgcccccacgcgggcataccacaaccggggcgccacaagcggacgtgcaaacaaaattagccacacgagggggggaccaccaccaccaacagannnnnnnnnnnnnnnnnnnnnnnnnnnnnnnnnnnnnnnnnnnnnnncgggactaaaacgaaacagacgcgacacaagacgggcaaaacgcaccaaagaacacgccagcaccaagaagcaaacaaaaaaacgaaagcaaaaacaatcagcaacaagggcgagccaacaggaagcccgccgaccacggagaccgaggagcgcaagaaagccacacgcaccaccacagcccgacgcgagacgacagagcagagagagaaggaaaccagccacagagaggcgagagccaagcgcacgcagcagaaacacgccagcccgcgggcagcaccaagggaccccacaacgggcgagaaagcta

SEQ ID NO: 417536 - DNA, 934 bp, Homo Sapiens
  misc_feature (59)..(102): n is a, c, g, or t
  misc_feature (105)..(140): n is a, c, g, or t
  misc_feature (190)..(309): n is a, c, g, or t
  misc_feature (312)..(342): n is a, c, g, or t
taacaactcacgggcagcaagaaccgttgctatatcactatagggcgctagcgcttagnnnnnnnnnnnnnnnnnnnnnnnnnnnnnnnnnnnnnnnnnnnncgnnnnnnnnnnnnnnnnnnnnnnnnnnnnnnnnnnnnagtcgacggtaccggacatatgcccgggaattcggccattacggccgggnnnnnnnnnnnnnnnnnnnnnnnnnnnnnnnnnnnnnnnnnnnnnnnnnnnnnnnnnnnnnnnnnnnnnnnnnnnnnnnnnnnnnnnnnnnnnnnnnnnnnnnnnnnnnnnnnnnnnnnnccnnnnnnnnnnnnnnnnnnnnnnnnnnnnnnnctgtgtgtgtggggcgcgccttgggaccctggaaagaagttttttagaacaccttggcggtgtgggccgcgggggcccacatgaaggcaacacgggagaaccgtgggcacacaaagggagatccaccaaaggagacacacccgtggggccaagagaacaagcggcgagaggaggatttccacaacaacatataaaacaagcgccgggggcggaacacccgcagagggttcgtgagaacaaaacattcccgagagggtgcgaccgcaccggagagaggcccacacaacgagggggacactattatcaaacacaggggaagtccaaaagggggtagcctcgagaatatatccaaaatttacaggccccgcacgccttggggaaaaacaaaaatacatacacaaaatcacaatagctaatacaaaaccataataatcacataccaaacaaataataaacaaaaatacacaatcagaccaacacaacagtttgattccaataaaattgctgcacacaaattaataaaaatcatacacataaagacttcaatatatactatattattcaccattagatcacaacctgaaaattgtta

SEQ ID NO: 417537 - DNA, 1210 bp, Homo Sapiens
  misc_feature (41)..(80): n is a, c, g, or t
  misc_feature (83)..(118): n is a, c, g, or t
  misc_feature (156)..(456): n is a, c, g, or t
ggacacacctgtatatcatatagggcgctacgtcttagagnnnnnnnnnnnnnnnnnnnnnnnnnnnnnnnnnnnnnnnncgnnnnnnnnnnnnnnnnnnnnnnnnnnnnnnnnnnnnagtcgacggtaccggacatatgcccgggaattcggccnnnnnnnnnnnnnnnnnnnnnnnnnnnnnnnnnnnnnnnnnnnnnnnnnnnnnnnnnnnnnnnnnnnnnnnnnnnnnnnnnnnnnnnnnnnnnnnnnnnnnnnnnnnnnnnnnnnnnnnnnnnnnnnnnnnnnnnnnnnnnnnnnnnnnnnnnnnnnnnnnnnnnnnnnnnnnnnnnnnnnnnnnnnnnnnnnnnnnnnnnnnnnnnnnnnnnnnnnnnnnnnnnnnnnnnnnnnnnnnnnnnnnnnnnnnnnnnnnnnnnnnnnnnnnnnnnnnnnnnnnnnnnnnnnnnnnnnnnnnnncaccgcgctaacctcggcctcccatacgctcgtgccccaatctcgatgacaaacctcaggactccacaatttcacactcaaatcccataacttaccaacaaaggactggcctgtacgccatgacatacccaccatggcaaatacatcgtgtctccccggtcacatccactctaccgtgtctcacgaccctatccactccccctgtggcaagaactcatccaaccactcaccacaaggctcagcacacgccaatccccaaaccactcaacaccccccatataacacggggcgcaccacgaatcccttacaatgcgactacccaccgccacccacccggccaaaccctgcccaccccctcaacaccgcccctctattcaacactcccaacttaccagtaccacaaatcatccacagaccccttacatcagactccccataaagcatcacccaacagtgaaaccaatccacacgcacaccataaactaaatatgcgacaaccacaaatcccttaacacccggaagcgcccgacgcatgccagagaacaccgggacgccagcgcaacaataaccacacaccaccgcatcagcacagacacaggacaccgacgcgcccgcacgcggtcatacaacccaaccccggccgactcccagggccacgaacccgcacagccacgcgacaccccgaacacacgcgcgacaataccagaagccccccgtgaacggcacccgcaaattcatcaagcggccaactcaa

SEQ ID NO: 417538 - DNA, 149 bp, Homo Sapiens
  misc_feature (73)..(108): n is a, c, g, or t
agaactttataatataggggctacgctagagcgaacgacgagcgccggcgagttgtgagcgaggaagcggcgnnnnnnnnnnnnnnnnnnnnnnnnnnnnnnnnnnnnagtcgacggtaccggacatatgcccgggaattcggccatta

SEQ ID NO: 417539 - DNA, 915 bp, Homo Sapiens
  misc_feature (50)..(233): n is a, c, g, or t
agtcgacggtaccggacatatgcccgggaattcggccattacggccgggnnnnnnnnnnnnnnnnnnnnnnnnnnnnnnnnnnnnnnnnnnnnnnnnnnnnnnnnnnnnnnnnnnnnnnnnnnnnnnnnnnnnnnnnnnnnnnnnnnnnnnnnnnnnnnnnnnnnnnnnnnnnnnnnnnnnnnnnnnnnnnnnnnnnnnnnnnnnnnnnnnnnnnnnnnnnnnnnnnnnnnnnggttagcggaaagaaagggattccctttagaagtgtgggaaagaaaattcttaaaattattggagctgtgatgtgccgtgatatttattagaaaattaaggggttttcttcgaaaagcgtgtcctagtgttgggcggtaattaagagtctaaatcactctctccttaagcgtggggagaaccaaggtcccatttggaagggagatacttcaaatatcgggtcattgagggttccgggtcaggtagaattacccatttggtggctacccacatttttctggtgaagaactggtttccagcgggttatcatcatattctaattataacctccccacatagttatggaaggagtacacctgaaaagtggcccttatgtgttggacctgaggattactcggtactttcgggtgacacgaatttacttctcagcggaacttctttacaagggtttttaccgttacacaaggatcactatgaattggcaacgtggcaattttaccctttctatataaccctggccatggtgggttgggcaccaacaggacgagtgctatactagtaagcctccgagaaagaaaatatcacagggcgggtcacaggaccgtacagacactccaggatgcacggcgaattgggtgaccctttccactttcaatggagcgcgccgttcggtatacccctcg

SEQ ID NO: 417540 - DNA, 959 bp, Homo Sapiens
  misc_feature (46)..(63): n is a, c, g, or t
agtcgacggtaccggacatatgcccgggaattcggccattacggcnnnnnnnnnnnnnnnnnnaacaaaaagatatgaatctatagaaaaaaacagatgtttgggcgggcccggaatccggggaaagcttttcaaaccactgatgggcgccggggccctacttcggttttgtggagccttggggtcaacattgtgcttcggaggaggtcctggggtctggagaccggcgcggggtctgttccccgagggaaaacatgcgctccgtggggcaaccagaggcggtttttggtgcccagactccaggtgggaggttttgggcggcgcagatcgttggggcgcttgaccagacagaggaggtccttggcagagtttgtgtatcttggaatgtttatcccaccaggccgctgggggtcgtctctgggattgctattttcgaccgcgactgaatgtggctctggacatcgcgtgagcccacatatcttaccggcgagatgtgccgccaagagaaagccgcgaaggtgctaacgagcacgttcctccgtgaacgacttgccaaacacacagacgatgaacgggcacgacgctcctactatacaagaggaacctttcgagaaacgtccaggtaggaaaagaattgaggtgggagtaaaaacccccgagaaacggccaatgaaagctgacctgtggcgtcactgggagaacaaacggtgtgaaccccggccccttttgtaggaaatctggcaatgcccagtgcggtaacatgccaggaaggggacccccgaagtcattggtaacttcctggagactcacgttccaagaatgaaggacacgtgacagtgtatcagagaacgattggggacaactggacaagacttccgacaggtgagtgccaggaagttggggatgggagaagaaataattacgaaaggtcaactctcagacagatagagcttgggacc

SEQ ID NO: 417541 - DNA, 1121 bp, Homo Sapiens
  misc_feature (74)..(109): n is a, c, g, or t
  misc_feature (241)..(241): n is a, c, g, or t
  misc_feature (650)..(650): n is a, c, g, or t
gaggaagactgcattgactataggctcccgctgacgaagacgagcgcaggagtcagtgagcgaggaagcggcgnnnnnnnnnnnnnnnnnnnnnnnnnnnnnnnnnnnnagtcgacggtaccggacatatgcccgggaattcggccattatggccggaacacctctatcagctgtgcggtagaagcatggagcttggtcggcttggtgaagtttatctggcattgttgggtgtagtcactntgtgtctgtgagaagctgctagtcagacgaaatcgcgattaaatacaggcccctgatagaccagacctgagccgtggcatcagacagccctgcactatcggcgcagctggagagtcccttcgttagtgcaaccttgccagtaatcagatcgtatgcggaaccacagtatttccaaagtgggcgtccgcgaccgctgcttatatccgaattacctatctcatcaatccatatgcatcctccatcatcctatcgggctctccaatgatctcttgtcgccaaacccaagtgtccttcttccgctctgggaaagccaccccttctgtcatatatacgggctcacctatcccggcgtaatggtctcaatcgatcctcaaaaactcggtgctgggaagataccacaacctaaganagcgataaagtccgttattacctcatcctattacggctcggtttaattcacccgagtagggtagcacctacgagaaatcctcgactattttcactcctttgcaccaagatagacttctcctaacaatgagtccctgacgaacgcatcttccatcagtgggctcgaattcctgatcatacttgtttttcacacagttttcggctacagacctgtgtatctgtaacaaaaaacattgcatctaggaaaatcaaaacgttggaacagtatctcccaggatcaggatcgaaggaatcattgcgagggacacgtggcaaattctgcgtttaaaagagatttacctttttagattggtgcggaaaatgtcctaatgcctctttgcaagagccacaacaacaaatgtcagatacccagttttctggcacgtaggattaatctctctaaatggtttatctcacctttgcgggtacagaa

SEQ ID NO: 417542 - DNA, 938 bp, Homo Sapiens
  misc_feature (46)..(81): n is a, c, g, or t
agtcgacggtaccggacatatgcccgggaattcggccattacggcnnnnnnnnnnnnnnnnnnnnnnnnnnnnnnnnnnnncagagggatagcgaagcagggagtatgcaggccgcagtttgtgctaggccgaggcgaagttctcagcacttcctgtgctgtagatgtgagactgtagaatacattagatgcttgccgaaaagatgttgcaacatctgtaccagtctctgatggcctccatactgcgcatacggccgatgatccagcgcgtggcacgcttgccgcagtgcactgattggctcttagtcgggtacctgctgaagctctatgaccgtgttcagctggtccgcgcatgaaagcgcagacatggtccgtcctggtgaagcggtaactcatgcaggagaattgcagagtcggtgcgtcggtgggttaatctggcagttgatagttcgccagcagttccaagctataccgcggaaggaattgcagccagagatgcctcggcaagcggagttgcgcacatgcaccaggcaaggttgaggagcggatgcaccccgggttctcggggcactccaggttagccaagcgtacggtcatcgcatcatgttgcctcttttgggcacaggcggcgaactaatggtgtaacgcattcatacgtgccgcgacgtggaaggttggagaagctcaagtgggtgtgaggccatgactcgaaggacataggatggaatgcgaaagtaacattgaacgagattgaatgcctctatcgctaggcatgcatgacctttccaagggtggggacttactaaaaagacaacggaagtggcaagtatttggcgttcaatggtggggcagagggggttggaaaatgtggctctggaactgggtcatacggcaaataggaatttcatgtcgcattgtggtaggagcaacgtttttgc

SEQ ID NO: 417543 - DNA, 1049 bp, Homo Sapiens
  misc_feature (43)..(86): n is a, c, g, or t
  misc_feature (89)..(124): n is a, c, g, or t
cgacggaagcactttgaaacgactatgggcgctagctcggttnnnnnnnnnnnnnnnnnnnnnnnnnnnnnnnnnnnnnnnnnnnncgnnnnnnnnnnnnnnnnnnnnnnnnnnnnnnnnnnnnagtcgacggtaccggacatatgcccgggaaattcggccagttacggccggggtaactgctgctatgggacctcgatgtggaggtctggcaatgcgttcgcctgtctgtatcccgtgaggatgcattcgaggggggagtgccattatcaacgcagacgatggtgttgcccgtggatcgtggcgatgcacaggcacttgtgcagagcggtaaggtgagccggaaacagtacaggtgctataggggccgtttcgctagcgtataggtaagtcctgactcgctatccgattaaccatgggttgagtattgaaagcgtggaatatgaaattgctgtccagagaggtacacagaggcaagtacgatgtacacatctcactacatattatgtctttaccactctctaccaatggagattcaacacggtggctggtttccattccacgctacgtcgtgcaataatatcttcccactagcacagaaaaacacccgtttatcgtaactatttccacggcagctgaatgcggcgatccaccactacagcgttttccaatcatagaccgagctagaagcgggaaagttaaccaccaaaggcgagtcactacggtctcgcgtggaggaatccatgtgcggtgggttgggtgactctcggccccttcccaaggtacactcgtcttacggtcaaccattgagcgattgctcttatcgctgagttggtgtccacaaggcagagacgcaccaagtcccttggaacatacgataccagcgcaggaggagcgccacgtccccagctcagtgtataagctcacgccacgacgtcaggctgggaagggaacaatctgtcatcacatcgcaatttggagcgtttgactacccccatgcctttgtagtttcacaaggtgtccaaacagagattcgctcaggggtggac

SEQ ID NO: 417544 - DNA, 865 bp, Homo Sapiens
  misc_feature (44)..(82): n is a, c, g, or t
  misc_feature (86)..(121): n is a, c, g, or t
  misc_feature (169)..(681): n is a, c, g, or t
gaaagggcagaacgtgtatgactatgggggtagctcgctgtagnnnnnnnnnnnnnnnnnnnnnnnnnnnnnnnnnnnnnnnccgnnnnnnnnnnnnnnnnnnnnnnnnnnnnnnnnnnnnagtcgacggtaccggacatatgcccgggaattcggccattacggccgnnnnnnnnnnnnnnnnnnnnnnnnnnnnnnnnnnnnnnnnnnnnnnnnnnnnnnnnnnnnnnnnnnnnnnnnnnnnnnnnnnnnnnnnnnnnnnnnnnnnnnnnnnnnnnnnnnnnnnnnnnnnnnnnnnnnnnnnnnnnnnnnnnnnnnnnnnnnnnnnnnnnnnnnnnnnnnnnnnnnnnnnnnnnnnnnnnnnnnnnnnnnnnnnnnnnnnnnnnnnnnnnnnnnnnnnnnnnnnnnnnnnnnnnnnnnnnnnnnnnnnnnnnnnnnnnnnnnnnnnnnnnnnnnnnnnnnnnnnnnnnnnnnnnnnnnnnnnnnnnnnnnnnnnnnnnnnnnnnnnnnnnnnnnnnnnnnnnnnnnnnnnnnnnnnnnnnnnnnnnnnnnnnnnnnnnnnnnnnnnnnnnnnnnnnnnnnnnnnnnnnnnnnnnnnnnnnnnnnnnnnnnnnnnnnnnnnnnnnnnnnnnnnnnnnnnnnnnnnnnnnnnnnnnnnnnnnnnnnnnnnnnnnnnnnnnncagtacagccaagcctcttgtgcttctctgggccagcctctctggagctgaatcgtggctggctgaattgaggagctgattgggcgcactctctctctctgaatccagtagggccctcctggtgtattactagatcagtgggtggaattccaagcctctactctttaagggaggcctccaatag

SEQ ID NO: 417545 - DNA, 1122 bp, Homo Sapiens
  misc_feature (74)..(109): n is a, c, g, or t
  misc_feature (147)..(441): n is a, c, g, or t
ctggatatcaatagggcgctagctcgcgagccgaagacgagcgcagggagtcaggtgagcgaggaagcggccgnnnnnnnnnnnnnnnnnnnnnnnnnnnnnnnnnnnnagtcgacggtaccggacatatgcccgggaattcggccnnnnnnnnnnnnnnnnnnnnnnnnnnnnnnnnnnnnnnnnnnnnnnnnnnnnnnnnnnnnnnnnnnnnnnnnnnnnnnnnnnnnnnnnnnnnnnnnnnnnnnnnnnnnnnnnnnnnnnnnnnnnnnnnnnnnnnnnnnnnnnnnnnnnnnnnnnnnnnnnnnnnnnnnnnnnnnnnnnnnnnnnnnnnnnnnnnnnnnnnnnnnnnnnnnnnnnnnnnnnnnnnnnnnnnnnnnnnnnnnnnnnnnnnnnnnnnnnnnnnnnnnnnnnnnnnnnnnnnnnnnnnnnnnnnnnnnngaactaaaaccaacagagaactttggggaagcccccaggtggtttggtccacggaaatatctgggagcattggagccttagtgtaacacctttccccccacaagtggtggtacattttacccttgtttcggctaaatttagttcacgacgttgaaaaggataaggctctagagaatgcaggggcgggaactgttccaagcacgacaaataccggggcaagggtctcttcaccaagaaatgagattacccaggagcacaagactagggtgagcaaggggtctcagactacactatccagggtattcaacatgacaaggcctggcgggaaaaacgttccggtccagagaaaacatccccaaagatggggaggtcatacccaatatcatactggaattacgcccaggccacggaccacgggtagctagcactagggagaaacagccactgaggacagggaaagcgctggaataaggagcaacgagacgcacctaacgtagaggggtagaccgctgagagtcccagccaggcggcacccacagttggccacgcgacgaaaacggacccgcgaaggtaggggctaagaacataatcagacaaatgttatacggtgcaacactggtcaaaaccgtgcagacgacgacaaagccaacaccgggatacacaagacagcaaggatgaaca

SEQ ID NO: 417546 - DNA, 265 bp, Homo Sapiens
cacacagactaccaggtcccaggccagaagcacaatcaattcaacaccgaaggggactaccactcttccccttccaccgctagaaacagggtcaccaaaagctttaaggacacgacggctgcacatccgtcccccacgccgggggatagccagccaaaaccctcgatggggcgggccaaacctacgggtccaagcaccggcgacaacagttcccccaagggccctcccctcgaatcgccactcgggccccacccggccaccagca

SEQ ID NO: 417547 - DNA, 814 bp, Homo Sapiens
  misc_feature (42)..(42): n is a, c, g, or t
  misc_feature (68)..(711): n is a, c, g, or t
agtcgacggtaccggacatatgcccgggaattcggcaattancgccgcccgccctggacactcatcgnnnnnnnnnnnnnnnnnnnnnnnnnnnnnnnnnnnnnnnnnnnnnnnnnnnnnnnnnnnnnnnnnnnnnnnnnnnnnnnnnnnnnnnnnnnnnnnnnnnnnnnnnnnnnnnnnnnnnnnnnnnnnnnnnnnnnnnnnnnnnnnnnnnnnnnnnnnnnnnnnnnnnnnnnnnnnnnnnnnnnnnnnnnnnnnnnnnnnnnnnnnnnnnnnnnnnnnnnnnnnnnnnnnnnnnnnnnnnnnnnnnnnnnnnnnnnnnnnnnnnnnnnnnnnnnnnnnnnnnnnnnnnnnnnnnnnnnnnnnnnnnnnnnnnnnnnnnnnnnnnnnnnnnnnnnnnnnnnnnnnnnnnnnnnnnnnnnnnnnnnnnnnnnnnnnnnnnnnnnnnnnnnnnnnnnnnnnnnnnnnnnnnnnnnnnnnnnnnnnnnnnnnnnnnnnnnnnnnnnnnnnnnnnnnnnnnnnnnnnnnnnnnnnnnnnnnnnnnnnnnnnnnnnnnnnnnnnnnnnnnnnnnnnnnnnnnnnnnnnnnnnnnnnnnnnnnnnnnnnnnnnnnnnnnnnnnnnnnnnnnnnnnnnnnnnnnnnnnnnnnnnnnnnnnnnnnnnnnnnnnnnnnnnnnnnnnnnnnnnnnnnnnnnnnnnnnnnnnnnnnnnngatccataattcggataggatactatacgagtatgggagagaagcaagcaaaggaaaaggaaacatggaaattggaaggtaagcgacaagaaagtgtggaaaa

SEQ ID NO: 417548 - DNA, 952 bp, Homo Sapiens
  misc_feature (55)..(55): n is a, c, g, or t
  misc_feature (57)..(93): n is a, c, g, or t
  misc_feature (353)..(438): n is a, c, g, or t
tgcatatggggtgtgcttagcgaagacgagcgaggagtagtgagcgaggaagcgngnnnnnnnnnnnnnnnnnnnnnnnnnnnnnnnnnnnnnagtcgaggtaccggacatatgcccgggaattcggccattacggcggggttaccttttaacatagttctaggaatttctcttaagggaataatgtaaaatgtgaaaggtgtatgcatgaagttattttttatagaattatttataatgggcaaaattagaagttgtttaaatatccagaagtagatgaacaattaaattatggaagctctattagatgaaacatgatgcattcatttaaaaataatagtgaaaagaattcnnnnnnnnnnnnnnnnnnnnnnnnnnnnnnnnnnnnnnnnnnnnnnnnnnnnnnnnnnnnnnnnnnnnnnnnnnnnnnnnnnnnnnaaaataatggttaagtgtaagcagcagcgtggaaaagtgaatgatgcagtattatagtggaataaaagcaaattttattatgatcaaaactttataagataatacatatcctttcatccttaagggaaaaaagactgaaaaaatttatcaaaatgttgtgatgtgaggtttaggatattttcctccctctgtgtaatagaattatctacatggtatatcggtctcattaatgtcccttctaaaacacagatttgactatgtcatatcctctgtgttaatcgtcaacccacccctaaacaatacaacaattaactattagcgcagattcaaaattgattaggttggtttcaaagacctatcacaggctttttctccagaaactatctaggcggagcctacattactttaatccggacctcgctaagaaaataccggggaaaaacttccttccctttcaccggtaaagcaatttcctccggtagcaaggtaccctctccccgcgggccaaaaaaac

SEQ ID NO: 417549 - DNA, 1026 bp, Homo Sapiens
  misc_feature (46)..(84): n is a, c, g, or t
  misc_feature (87)..(122): n is a, c, g, or t
  misc_feature (160)..(327): n is a, c, g, or t
aaagaacccttggtaatacactctatagggcgcttgctcgtcgagnnnnnnnnnnnnnnnnnnnnnnnnnnnnnnnnnnnnnnncgnnnnnnnnnnnnnnnnnnnnnnnnnnnnnnnnnnnnagtcgacggtaccggacatatgcccgggaattcggccnnnnnnnnnnnnnnnnnnnnnnnnnnnnnnnnnnnnnnnnnnnnnnnnnnnnnnnnnnnnnnnnnnnnnnnnnnnnnnnnnnnnnnnnnnnnnnnnnnnnnnnnnnnnnnnnnnnnnnnnnnnnnnnnnnnnnnnnnnnnnnnnnnnnnnnnnnnnnnnnnnnnnnnntcttatctatttgtccgggtgaattcagagaccatggagattctatttatcagaaccagggaagataaattccttcagagctattcaacggagtacttcttttccctcaaaactggggggactggtcggggaaagggggcccacaatttttggtcttggatatagctccaattctcataagtatatacgggccctataatggggcagaaaaagatgcttggagggaaaatctccataacccatgagggagacctgaaaaatcatccttaggggtataattaataatggggcaattaagtgccaatgatatttctcaccatggatgctcgggaatgtgaaagaacattaaacagatcctgcggaattatgtatattctacatgtgcgaggggacatcggggaaattgcttgtgaaatgatttgtggcttctgtacaacgattttcaactaagttttttaagtaaattcagtttccctccatatttaaaatgctgtgctaggtctcaattcggattggtatgcgaactgcctactaatactacggggagtggcggatactggtatccaaaaagagattggggaaaaaagggggctggaggaggagattggactaggataggaaaggttgtttggggcagggatcacagggcgtgttcatgggaagggggggaaatcaaaggtagggccgagagaattagtg

SEQ ID NO: 417550 - DNA, 990 bp, Homo Sapiens
  misc_feature (247)..(247): n is a, c, g, or t
agtcgacggtagcaggacatatgcccgggaattcggccattacggccgggggctttgaagtcaacatggaggagtactgcgcgagagcctgggtccatggcatacttgtggatgcatctgttgttgtggaggcctctttaggatgggtacccactttggtggtggatatcttgcgaagttggtcatagggttctcccgtgaagtgtctccagatggtatgtagaatcgagtggattagcgagggggntctggaacaggatatattaaaattaggggtggatagtgaggaggtagatcttgcagttagggtggagggacatgtgtcctagcatgatgggactgttaggtatggttcgaagtcgagaggtagctggaagatccagtgggagatgtcctatcaggaaggggtgccttaacgggagccatggtggctgtgagaaatggatgcagtggccatggttgggttaggcggaagtgggtggaatgtctactagcgttaattgagggagcgggtatctcgtggacaagatttgtctctgacaaggttgccaaatggtgctcaggtagatgaagacgccctaccagtgggctgaagctcaggtaaccttcctcaagctttttggggactatcggcagtatcaggaggacgttttacgaggaattgttaaacagaacgaggggtggtgcgagaaagattcgaagatcgaagtcagggtgtttgaaaacctaggtgggcaagtatggcataaggtttagagaattgggcgtttgttattaagaaacggggaaggtgcaagacaacgtatgttacagcctaatggtggggcaataaggtagaggtaggaaaaggagtgtaagtggcaatgggaaatggatactatgcttgaggatgggtggggtgataaaaacgggggacgctgaaagggggaaataaaaggacacacagagataagatagagattgttggatcttcttgtatgtttttgtctt

SEQ ID NO: 417551 - DNA, 1002 bp, Homo Sapiens
  misc_feature (62)..(102): n is a, c, g, or t
  misc_feature (106)..(141): n is a, c, g, or t
  misc_feature (191)..(466): n is a, c, g, or t
  misc_feature (470)..(481): n is a, c, g, or t
gccccactcgtagaacaccccagaccgtgtataataactatagggcgctagctcgtccgagnnnnnnnnnnnnnnnnnnnnnnnnnnnnnnnnnnnnnnnnnccgnnnnnnnnnnnnnnnnnnnnnnnnnnnnnnnnnnnnagtcgacggtaccggacatatgcccgggaattcggccattacggccgggnnnnnnnnnnnnnnnnnnnnnnnnnnnnnnnnnnnnnnnnnnnnnnnnnnnnnnnnnnnnnnnnnnnnnnnnnnnnnnnnnnnnnnnnnnnnnnnnnnnnnnnnnnnnnnnnnnnnnnnnnnnnnnnnnnnnnnnnnnnnnnnnnnnnnnnnnnnnnnnnnnnnnnnnnnnnnnnnnnnnnnnnnnnnnnnnnnnnnnnnnnnnnnnnnnnnnnnnnnnnnnnnnnnnnnnnnnnnnnnnnnnnnnnnnnnnnnnnnnnnnnnnnnnnnnnnnnnntccnnnnnnnnnnnnggaatttattaatcctgcctggggctctacatagcctcagtggcgcatcatgggatagctcagaggggcccttgattcgtgggcagggcaattaaagccagattgaggaatttaccatcttctattagaagaaaccaagagaaaaaaattttttatggctaaggagtgctttatgaccacttaatttttaatctaagttaaagtggtctctcccgtgtgggttactggtgaagtggcacctcttttgggagtgggggctacataataggtgccttacccccaaatcttgtggcaacctaataccatcttggtccttcggacttagattccaaacactgtctgtgatgtgggacagttgtgaaactattgggccaatgtgtgtcccacattaggcttataatgggagggttctcacaaggggttcccacgggtcattcagggacgggcgctaatatctctttcggggggtcagcgggccacaaaccactgggtccagaaaggttgtagacacgggtcaccgg

SEQ ID NO: 417552 - DNA, 1054 bp, Homo Sapiens
  misc_feature (72)..(108): n is a, c, g, or t
aaccgatgtaaaatataggggtaagctgcgagcgaacgacgagcgcaggagtagtgagcgaaggaagcggcnnnnnnnnnnnnnnnnnnnnnnnnnnnnnnnnnnnnnagtcgaggtacggacatatgcccgggaattcggccattacggcggggacagtgctaatagatggatgtagtgtggggcacgcacttaggagcatggtgaataaacagacggaaggatggtgagatcaaatggagtagaagcccagttggaattaggctagtaaagaatgtgaaatgggctgtcacttggtggttttgccaaacactgacaaggtaggattctagagtggttccacgtagatactgtacttgtttggccagtgaatggagattaggcatactccattagtgttgtcgtatgtgagaccctgacttcaagatcgctggacgtggtctaagaagaatagggatattagtgggaaaggaactgtcgtgtagtgacctggctgtgcattgtttggtgcctagtatcaatagattgtgcgtggtcaggtcaaagcatgaaatcactttcggtaaccagtcaagtcacctggtaacacagattctaccagttcgttcattcatgtcccatgctgaaggtgagtgagtcgatccagagtcaaattcgtccctattgtatatattctaggttctacatagatgaagggtgctttggatagctaggaagcctcatgtggtttcgagaggtactgtaaatggtagatataatggcaatcatgttgggccaagcttattacgaaataatagatggtcgttgtgcatgtgtcttttgacatttttgccaatggcaagtttaacgacatgtttcctaagcaagtccggatattgggaaggcctgcctaaggattttcgtgcacgttgatataattgttaggcatccagggtggcgtgtacacaacttgggcttgttggggacctttgtgggactcgggttgacatcaggacaaagaggagttgtaaatgttgggggctaagagcgcgaaataggggggcatacacacggg

SEQ ID NO: 417553 - DNA, 1074 bp, Homo Sapiens
  misc_feature (55)..(96): n is a, c, g, or t
  misc_feature (99)..(134): n is a, c, g, or t
  misc_feature (172)..(269): n is a, c, g, or t
aagaacctttttgtaaatacactatcactacttaggggcggcctaaggctcttgnnnnnnnnnnnnnnnnnnnnnnnnnnnnnnnnnnnnnnnnnncgnnnnnnnnnnnnnnnnnnnnnnnnnnnnnnnnnnnnagtcgacggtaccggacatatgcccgggaattcggccnnnnnnnnnnnnnnnnnnnnnnnnnnnnnnnnnnnnnnnnnnnnnnnnnnnnnnnnnnnnnnnnnnnnnnnnnnnnnnnnnnnnnnnnnnnnnnnnnnattcgccacgcgcgcatcagccacctctgtcgcacttgcgctatacatatttgccccatggtagaaacacgcggggcgaaagaacgttcgtccactattgagccacgatcttaaactcaaaaacctgcgtgaaaactacagcccacgggactcgcgcatgcagaccgacaaacacaatatctctacaaatcaacaccccttctaagggcaaaattcaggcccaggctttctcaacccgtacacagcgaccaacagtctgtgacgcaatcatactgctgctagaacactcgcacggaacatccgtccgctgcgtatttcaactcccacgagcgcatcgaaacacgtcttcaagttctgcctcactggcaaacacaggtcgctacccaccgcgcgtcgaaccagctaatccccatcatctacccagcctcaccagaccgtcttcactacgccgataccgacactttcccggactgcagcacttccatccaaggcgcggcaacacatgtcgacatacaaggccccggatcaaaaacctgatgcttcatctctccttcaccgtgtcatttaacaacaggccgtacatatccagcctgaacgggcacgctatcacagtaccattcgagcaactgactgaaatgcctccaaaacgtccttcacgatgccattgccgctcactttcacccgtgccatatccaacagacgacccccacactcttcacctcactagctccttgacaaatccataaccttcagcacacaaccatcatccaagccacagccgcccagaaccaatccccacccctcc

SEQ ID NO: 417554 - DNA, 320 bp, Homo Sapiens
gtctccacaagatacaatcaccaataagataaaataaaaacatacttctggacaaaaacatgctgccatggacaaatcattaataagggcatcataaaatattcgagtagaatgaaaacttccgaattgtgggatgcagtcaaggatgttgacgagaattttgatcccggtgatgggcccctttccgacgtctgactccccttgaagagagcgcataagatgcttccttgaacacaggtctccgggcggcacgcggccgcgggtaacgtcacacaattcctgcccgggggctaaaacaccggcacacagcaggttcccca

SEQ ID NO: 417555 - DNA, 572 bp, Homo Sapiens
  misc_feature (43)..(140): n is a, c, g, or t
  misc_feature (144)..(177): n is a, c, g, or t
  misc_feature (382)..(391): n is a, c, g, or t
agtcgacggtaccggacatatgcccgggaattcggccattacnnnnnnnnnnnnnnnnnnnnnnnnnnnnnnnnnnnnnnnnnnnnnnnnnnnnnnnnnnnnnnnnnnnnnnnnnnnnnnnnnnnnnnnnnnnnnnnnnncgcnnnnnnnnnnnnnnnnnnnnnnnnnnnnnnnnnnttgtgtggggcgcggcctcgggccccggagaagaaggttttatatagaccaaactgcggtggggggcggcgggcggccacaggaagggaagaggggaaccttgtgggcgcaagaggcggggtgtccacagagggaagagacccggggggccctgaggacaatagggggcgggagattcttccaccaaaatttaaaaaaacggccnnnnnnnnnnaaagcggagagcggtttttggtggaaacacaattctcacgagagatgggcgagattcgagaggcgaggagaacataataacggggggaaccttatatctacacagcggggggattctccaagagagagaagcgccgcgaataatcttcaacattttagagccccccgccccggggggggtg

SEQ ID NO: 417556 - DNA, 249 bp, Homo Sapiens
caaaggactccctaggtcctaggtaccaggagcatcattattcatacgtagtgataccctattttccttttccgatagaaaacgttacccatggctttaggccgaccgggtcaatcggtcccctacggcgggggtttaaccaggcttaaacctcgatggttggctaacttacgggccaagaggcgaaaacaaggttcaaggggcgagggtgtgatggccaccgggccccaactggtctcaccgctaggg

SEQ ID NO: 417557 - DNA, 426 bp, Homo Sapiens
  misc_feature (196)..(287): n is a, c, g, or t
  misc_feature (306)..(352): n is a, c, g, or t
gtgctggagtccatatcgaagcccacagccaatgtgtgacatgtgaatcttttatttttataatctgcctctctttgtctaagtgccaaatgatgctcacattgtgtgtaactacttccaccttgtgtctggcttctttttccttaagtatgcagaatcaggttgcatagagttctgagaaaataaaataaatccnnnnnnnnnnnnnnnnnnnnnnnnnnnnnnnnnnnnnnnnnnnnnnnnnnnnnnnnnnnnnnnnnnnnnnnnnnnnnnnnnnnnnnnnnnnnaataagagatcctgtctcnnnnnnnnnnnnnnnnnnnnnnnnnnnnnnnnnnnnnnnnnnnnnnnacatagcggactggtggccagtgtgtccagtatcagggggagctgagattgtgagctggggtggatggggggcg

SEQ ID NO: 417558 - DNA, 822 bp, Homo Sapiens
  misc_feature (50)..(339): n is a, c, g, or t
agtcgacggtaccggacatatgcccgggaattcggccattacggccgggnnnnnnnnnnnnnnnnnnnnnnnnnnnnnnnnnnnnnnnnnnnnnnnnnnnnnnnnnnnnnnnnnnnnnnnnnnnnnnnnnnnnnnnnnnnnnnnnnnnnnnnnnnnnnnnnnnnnnnnnnnnnnnnnnnnnnnnnnnnnnnnnnnnnnnnnnnnnnnnnnnnnnnnnnnnnnnnnnnnnnnnnnnnnnnnnnnnnnnnnnnnnnnnnnnnnnnnnnnnnnnnnnnnnnnnnnnnnnnnnnnnnnnnnnnnnnnnnnnnnnnnnnnnnnnnnnnnnnnnnnnnnnnnnnngttttctgttctcactactcaaattggggagagaatactacacaaaaacaacaacaaaacaccagaaaaaccagagaccattctcacaaaaagatacaaagtccatactaaaaggtattaaatccagcagggttttaaaacacctactgtggtttccgggatgtatcctcaggtggaaagaaaagtacctgtggagatgtgttgatacagttcaaagtgatttttaaaagcgagatggtgtaaggaaacactgagtactaagcaaaagaactttcagaatcattttcaagtaatgaagacctgggaggcaccggtaccatctgtgcataatgtggataggtgagggtaactttttcattgcgggtaacagggttatcggggaggtggtggaaatactaggatgcgtcagagggtgagaagaataattggcttatttcgattataccttgtctcttagccgagaagtagtatatacaatttaca

SEQ ID NO: 417559 - DNA, 171 bp, Homo Sapiens
  misc_feature (48)..(48): n is a, c, g, or t
agtcgacggtaccggacatatgcccgggaacttcggcaaattacgccnccgcccagacatcatcgagtactgtgtatcataagcatctgccgaatgagcatcaaaaggatgatgaactgaatcgcagggatcagactgtgctggtataatattgccatggtgaaaaggggg

SEQ ID NO: 417560 - DNA, 1063 bp, Homo Sapiens
ctggcatcagcaccattgtcgcccttgcgtataatactttgcccattgtgtgaaacacgggggcgaagacagctgtccactatgggccaccgttaacaatcaagacactttggttgcacactcaacccaaggcgcattgcgcctgacgactgaacaacacatcattcctcagataaaccccattcacggcacaatagcgccagcgttttcacccgtaacaccgccaacactcttcgcgaactcatactgtgtaagaaaacgtggcccgggacaatccgtcaggggcatactacaacttcacaagaagacgactgaacacacagttctccacgctatggcctcattggaaaccaaccggctgtaaaccaaggcgttgacaccactatccacatatcacacaagctcaccgtcattacaatttgccactcaccgaaaatcccggatgaccgcactgccaatacaagagaagggacaacgcacactgtcgcaacctcaaacgtcccgaccacttaaacactttggttgcgcccacgtacaccacataaacacgccaccaacaaccgcctgtaaatactcaactgaacgagccccaagcaaaaccaggtacacttcgcacaacccaggccatcgcaattggattcaaaaacatggtccattaacagaagttggcaattggggacatcttataaaccagagagcgatatatatcccagtatagttctagacactacacattaacacatctcataagaacccctcgaaaactctccgaaactctgacatatcagaatcacctagcacaagagactaacacaacaccaccacaaccacaaaaggatattaaagcgaaaaatacggaagacaaacttaagaaataagaattagacagaaaagtacatactaacataaaaaacagtataaatatagataagaaaagagcagacaaaataagagaccagaaaatcttcgcaataaagaaacaagtagtattgagaaagcacacgcaaaataacaaccactcgtaaaactgtagaaccaaaaaacttatagagacgaatactga

SEQ ID NO: 417561 - DNA, 211 bp, Homo Sapiens
cgcgtatacatactttgcaccatgggtgaaagacgggggcagaacgaagttgtacatatctggccacgtttaaagtcaaaacgtggtgaaactcaccgcagtggatgggaatggagacggaagaaagatattctcgaataaaggccttaagggaaataggacaggtattacaccagtaaaacgccagatcttgcgaatatatgtgtagaaa

SEQ ID NO: 417562 - DNA, 814 bp, Homo Sapiens
cccgtcttgtaaacacatgtaatccacatataacatggaagttttagcaatactaaagataacagaacttcgtaagcatggtcacagggatatcgtatgtgaagttagaataggtacggctttgcgataaggggatgatgaagacctacttgagcgcgcaaagcacgtggtcatgcgcagtccagggtccaagactgttcccgtgggggtcgcataggttacatgaatccagcctatcagccgcgaggtctggaacccaaaacttgctggcaggcctcagccaaatcgtcagaacgtactcttggggaactctggagacagcttccaaggaatgccccatttcattccttctatataggggacctctcagaccgcagggggtgatcgcttgaagcctggcctccatgcactggatgtgtcctccccccatgtgtggtccaggaacttagtccaccctgggcctcctgggccccgggtgtaggtgcagcaagcccccaaaacacaggcctttcctagaccaagggacttaccaccaagggagcgacggccgccattcgcgcctacaagaacgcacctgcgcaaggcgaccttcggataaggggatgccccctgtaccagacacgacagagcctcagacgtgctcaggaaggtgaaagtcctctgtgtccaaaaatcagcgtatgtaccaacgtaaaacgataaacgaggcgtacaactaacgcatacacacgtagccttacgcgacgcatgaggacgacgagtaaaagacaagtcgtgcaacatccgctggcgtctgccttatttcctcctctgg

SEQ ID NO: 417563 - DNA, 1043 bp, Homo Sapiens
  misc_feature (589)..(597): n is a, c, g, or t
agatcgacggtaccggacatatgcccgggaattcggccattacgggccggggggtatgaagaattgtctagacctgatatctatatacaggttagctagaactccatatgtatctactgctatgattttggcttggcaagtgcaacaggtatagcccgtgtcacacgcactcagaggatcaatggtaatgcatatatattcgacggcaatgactaatatgactgtgctactaggtgagcgcatgtccactaagagggaaggatactgactcaattggtaattactgtgcactgggaaagctgatcaatacaatacggatatcacgtccagctatgaatagggatcatagaatatatccatataattcaagtaagtgaccactgcgatatggattattggcattaagggaaatgagaactgagctctgctgtgtaatgagaaaaaggattctaataatggtagaatacatatatgtgggattttaagaagcagggagacattacatgatttgattgttaaaattgtgatggtcatggtgatagcagtcatgagacgtgtatggtatacactagtatatgctcacgtcatnnnnnnnnntagtgtacgtgtggattagtcgttcataagtttttataattcgatatggagatgtacgataacaataagtatcgtattagggtccaaagaacgagatggtgttggtgtccattactagtggttgggatgaatttggtgcctacattgtgcaaatactgtcatgatgctaagtaatcaagagtggatgagtccatgttcatagggaggggagtcacgcaatcaaggcttgtgggaaatcggagaaagctttgtctgaataatggggaactgttataaaagaagctagtaaaggaagttagagtgcaaagaaagaatcttctgtagaccgggtctgtgttcaatgaggtggcatggaatggggaaaatttggttaagcgctataatggaaaggtcacgggggttttaaaaaggcaagagggggggacaaccgttaacagggaaaaaag

SEQ ID NO: 417564 - DNA, 835 bp, Homo Sapiens
  misc_feature (60)..(626): n is a, c, g, or t
agtcgacggtaccggacatatgcccgggaattcggcaattacgcgccccgcgccgtggannnnnnnnnnnnnnnnnnnnnnnnnnnnnnnnnnnnnnnnnnnnnnnnnnnnnnnnnnnnnnnnnnnnnnnnnnnnnnnnnnnnnnnnnnnnnnnnnnnnnnnnnnnnnnnnnnnnnnnnnnnnnnnnnnnnnnnnnnnnnnnnnnnnnnnnnnnnnnnnnnnnnnnnnnnnnnnnnnnnnnnnnnnnnnnnnnnnnnnnnnnnnnnnnnnnnnnnnnnnnnnnnnnnnnnnnnnnnnnnnnnnnnnnnnnnnnnnnnnnnnnnnnnnnnnnnnnnnnnnnnnnnnnnnnnnnnnnnnnnnnnnnnnnnnnnnnnnnnnnnnnnnnnnnnnnnnnnnnnnnnnnnnnnnnnnnnnnnnnnnnnnnnnnnnnnnnnnnnnnnnnnnnnnnnnnnnnnnnnnnnnnnnnnnnnnnnnnnnnnnnnnnnnnnnnnnnnnnnnnnnnnnnnnnnnnnnnnnnnnnnnnnnnnnnnnnnnnnnnnnnnnnnnnnnnnnnnnnnnnnnnnnnnnnnnnnnnnnnnnnnnnnnnnnnnnnnnnnnnnnnnnnnnnnnnnnnnnnnnnnnnnnnncatgtgcttgacagatgacatgtgggatatagtcaagggggtatatgcagagatattgagatcgattttagtgtcttaagtactgaagagtcatacttgagtaggtaaataatagaagtatgagaccggagtcgataaatgagaagaagaaaatagcagaaagtatgaacagagagcctatgagaagagggctggtagcaggaacagaa

SEQ ID NO: 417565 - DNA, 296 bp, Homo Sapiens
aggttctttgctccggaaagatccctaacttggtgtgacatacattattcgaaggtatggaggcgagagcgatgccatgggaaagcagtacttgggcggcagttgccgacggtacgggccgatacaggggcacatgcaccaagtgtcttgcagatagtaacggcacagccacacgtactgtgcgcgaacacgcatagtctcaatgtcctcgcgcgaacacacagctcgcacctcacgcacgcgtcgcgcaaacaccttctcgactgcgctgtcttccattgatgtctatcgtcgta

SEQ ID NO: 417566 - DNA, 1033 bp, Homo Sapiens
  misc_feature (74)..(110): n is a, c, g, or t
gggagactgtatatcatatggggctgctcgctagcgaacgacgagcgcagcgacgtagtgagcgaggaagcggnnnnnnnnnnnnnnnnnnnnnnnnnnnnnnnnnnnnnagtcgacggtaccggacatatgcccgggaaattcggccattacgggccgggtgatacctttcaagatttgggatccctcggaggtgttaggaggtaacaactgaagatggagaaaggtgttaatgtgttccgaatgtccattgatggactggaaaataaccagtcctcttggtagcaaatatgtcttcaggttacattgttggaaaaactgggttgctctagaggattgtttagtaagccaatctagtgacagtgtggaaggtgatgggaggttttattgagaaagtcccagtttcgcagaaatgatcaggaacatggttcagttagttcagcagggtgttgaattggggtaagagaagaatcaggtttcgaaggcatccaattaggaccaccaaatatgttaggtccaattctcatagttgaaaatgactctgaaaaatgtaagaaacagcgatttgagtttcaatgcactcgctgtccagtgaaaggtcaatgagcgagattaccaagaggatctcattgtttggaaaagagatagagattattgaagatttcagagactgatgaggaacaaaggggtttgttctggcagattgagatgagaacaggatgaagatagggaggaatagaaaggttaatttgtggctttttagactgtccttgaatagagctggagtggtagtggaaagtaaattaagttataaaccttaataaaggatcgaaaggcaaagagtgcagtggaaagaaattgccattggtggcagggtatgccacggggtggtgacaggggggggactaggaaaaggacccaatgggtgtattataacgaggaggaaaaaagagagccactttgcgggacataattagggagggaacagaaaaggaacaagcgattaaacacgtgggttttgtatttatgtaag

SEQ ID NO: 417567 - DNA, 402 bp, Homo Sapiens
  misc_feature (213)..(221): n is a, c, g, or t
cccgtgtgtctgggccgcgcctgggcccctgagaagaaagttttctagacacccctcgcgttggggccgcgcgcggaggcccccggggaggctagagggaaaccgcgggcccaatagggcgtgattccccaagaggagagaactcgcgggcgccagtgcgaaccatgaggggcgggggatcttcttcacacatattaaaaaaacaggcccccnnnnnnnnncaaaagcgcggaggtgtcttgtggcgacaccaaatctcccgagaaggggcgagagatcgagagcgagggcaccaatcagggggggaatctctttactcacgaaggggagagtctcccaagggagagaaacgcgcgcgaatatttcccacaatttaaggcccccgagagcgggggggaagac

SEQ ID NO: 417568 - DNA, 539 bp, Homo Sapiens
  misc_feature (278)..(278): n is a, c, g, or t
tagccgaggtgcagagtaagtagaaacagctttggtcgggtgccgcgagctgactcaggaaaagatgtttgtcagggacaccaatctgctgtggggcgcagggagcgcgcgagtgctggtaagtggaagcctatggattggtgccgtgcgcacatcgaggacctcgggcgacatgaagctgagtgctctgggtctttccacccatataataaaaatcgcccgtggggtgaaaccagaagcgccttccttgtgaaaacacacttcgtgaggaggatgcngagcgaggacagaccgtgtgtgcttcacccgccagacctacggtgttgcccagagcgggagagttccgcgcagtgtctattattgtgaactgccgcgccgcgctgggtgttgagcccacagcatgaacaacaattcaaaccaaaggacagctgaccttccctgaaataacaaaacctcctacaggttacacagtttttggccaaacaagtaactatactgtttgactctctgactctatttggtaagaagaattgggcggc

SEQ ID NO: 417569 - DNA, 342 bp, Homo Sapiens
ccattgtgggcgaccagcaaggaggccctaaagaaaaacgttgtagagaaacccactcgtggttggggagcagcgggggccccaatgagggtaggtagagacacgtgggcgcaacacgattgacccaagagaggaaaaccccggggcctagagaactagggtgcttgggagttccctcaccaaaataaaaacacgcgcaggggggaaaacaggacggcgttctgaacaaactcaagcgggggagtatacgaggagcacaaaaagcgggggacctaataaccaaagagggaggatccccgaaggcgagagctggaattacaaaaaatggcccgcgcgcgcggg

SEQ ID NO: 417570 - DNA, 2020 bp, Homo Sapiens
  misc_feature (89)..(124): n is a, c, g, or t
  misc_feature (532)..(532): n is a, c, g, or t
ggacacagacaaaacgactttgatactctatggggctgcgcgtttagcgaacgacgagcgcaggagtcgttgagcgaggaagcggccgnnnnnnnnnnnnnnnnnnnnnnnnnnnnnnnnnnnnagtcgacggtaccggacatatgcccgggaattcggccattacggccgcgggatgtctgcgcctgtgcaggtggcccgtgttcagctatgctgtactgaagtaactgcctgggcgtatgattgggaaatccagtatatcatagttggatgcaacgaagaagatggacctatgacgaacgagatatactaactgggtacagtagagatagtggtgaatcattcattctaaaaacgcctatctatacgctggtcaagaatgttccaaggagactctagcatttgttccaccaagtggattacatacaacatacgttctcgtgacatgttgtacccacgtggatcaggatactatagatgctatcgcaatggcactggcgcattgccaacgaaagcggcttcaagttgaaancacatgatgggttcgacctccaaatttactttaccccattttttggtccacaagctatataggaatagatatatccatctcttactcatttattaaacccagaagagtgtgttcgggcgtcgaactcagttcgataccgagccatgtataacttctcggtgcggtggaggcgattggcattggagagccgaagtccgatttcgcaaagtccaactggtggcttcgagagctaaaacgtcgaaccgatatactgtacgctcatatatacccacgcaacatgtggatgcccatcccttatagtcggaggcaaacctacgtagagtggtagtagcgctatagtgaccaaacatgatcgcaccggggtggacaagtggccaaactgtgaatcgaattggcagtcatttgtgtcaactgtaaaacagtgcgcgacagatcgtgggtacttgtgcccgcgcaaacataactatgcggtggcacacattacgcggagaggaagcaacgtgcacgattgttacacacgcaccgcaaactgaggatacatggcccgatcaacaggcaaccaaactggataccggcccctacgtgcaacacgaagatacatacatgggatacgaaggggacgatccgggacacacaaggacagagcgcaatcgactaaataccacactgggaaccgaatgtccttcacccgacacaacgagaccaacattgtgtcagacacgtgatgacacactccaatgacagacatagcgggccaaaccaccagagaggtgcgcacgcacagcacacgcacacagactagcctgtacgacacgagagagcgcgcacacacaaaaccacggagacagacgcacacaaagatcacacactgtccacacaaatgtgcgcaaagcgccaggctgccacacaagcaaactatcgcagccctatccacagagaacaagcacacgacgagcccacttcacgtcgcgaccaacagtgcatgcacaacaccgatgtgacacacaggtgcaaacaaccacgggcccatcgcaaacgtggtgcatcagacacatagggagcacgcatcacaccaacaccgacctcgatctcgaccacactctcgcgccgacaagagcgaccacagaccacaggcgtgtaaacataagagacgaaagagcgagagcccaaataggcagcaaatgcgccacaagacagcacaaagcgagaaaggagacagcgcacacaaggggcagaggccgcacgccaggacgacacgccaaaaaaatgagcgcagcagccacaggagcagacaggcagacacactaccgcgagcaaagactggcaggacggaccactaggtcaacaacaacacacggcacgcagaacactgcgcacacacccgacccccagcagcacgctgtcagacgacaaacgagaagacgatcaggcaacgaatccgcaccaacgacgccggaccggacggcagcaacctagatagaacgcggt

SEQ ID NO: 417571 - DNA, 254 bp, Homo Sapiens
ttaacagtgcgcattgggcagatcaacaaccgggggggaattcacagagctatcttgctccactataagtacatagactcgagaaccataactcgataagaaaataaacagagatagtgcagcagcaggcaaaagcaaacacaaaatgcgtacaggatcaacaacaacgcatgcagaacaacattgcatgaagaaagagcatctcgtcacacaaaactctcatacgtcttccgtcacgctttttccaaggggag

SEQ ID NO: 417572 - DNA, 317 bp, Homo Sapiens
tgctgaaatgctcaaaatgtcttaccgatggcatgggatatttcaccggggtatatccagggatattgatccatttaagctaccttagtctggaagatcatactcgttagatacatatacgaagtatgggcgagaagtcagagaatagagaacggaaataggtcaataggacaggtaggcttgagtagtgctgaaagagttgcttgaagacaaaaaaataaatatgtgaaacagggaatcaaaaagtcacgtaacaatgaaagaaggacaaaacccagagtaaaacacaaactgggcaaattataaaacgtcataga

SEQ ID NO: 417573 - DNA, 988 bp, Homo Sapiens
  misc_feature (78)..(113): n is a, c, g, or t
  misc_feature (145)..(178): n is a, c, g, or t
  misc_feature (262)..(749): n is a, c, g, or t
ccttggattactctatagggcctagctcgcgcagacgaacgacgagcgcaggcggagtagtgagcgaggaagcggcgnnnnnnnnnnnnnnnnnnnnnnnnnnnnnnnnnnnncagtcgacggtaccggacatatgcccgggaannnnnnnnnnnnnnnnnnnnnnnnnnnnnnnnnncaagcgagctcgatatcaaattacgccccgccctgaatcatcgatactggtaattcattaagcatctgcgaatgacatcaaggnnnnnnnnnnnnnnnnnnnnnnnnnnnnnnnnnnnnnnnnnnnnnnnnnnnnnnnnnnnnnnnnnnnnnnnnnnnnnnnnnnnnnnnnnnnnnnnnnnnnnnnnnnnnnnnnnnnnnnnnnnnnnnnnnnnnnnnnnnnnnnnnnnnnnnnnnnnnnnnnnnnnnnnnnnnnnnnnnnnnnnnnnnnnnnnnnnnnnnnnnnnnnnnnnnnnnnnnnnnnnnnnnnnnnnnnnnnnnnnnnnnnnnnnnnnnnnnnnnnnnnnnnnnnnnnnnnnnnnnnnnnnnnnnnnnnnnnnnnnnnnnnnnnnnnnnnnnnnnnnnnnnnnnnnnnnnnnnnnnnnnnnnnnnnnnnnnnnnnnnnnnnnnnnnnnnnnnnnnnnnnnnnnnnnnnnnnnnnnnnnnnnnnnnnnnnnnnnnnnnnnnnnnnnnnnnnnnnnnnnnnnnnnnnnnnnnnnnnnnnnnnnnnnnnnnnnnnnnnnnnnnnnnnnctgatggaatgctcaaaagtcttagatgccatgggatatatcacggcggatttccggattttcctcattagctcctagtcgaaaacatactcggtgataataacgagttgcgccgagagccgtatcgcaaactccggcaacgacggagcgacgacctgcacagttgtcttcacaaccacttggtggaccttctgccacaaccacaagcaatccaacagccgaatccgcacctcggtgca

SEQ ID NO: 417574 - DNA, 934 bp, Homo Sapiens
  misc_feature (44)..(86): n is a, c, g, or t
  misc_feature (90)..(125): n is a, c, g, or t
  misc_feature (168)..(410): n is a, c, g, or t
caggggggaagacggttgaataatatagggcgctagctcgtcgnnnnnnnnnnnnnnnnnnnnnnnnnnnnnnnnnnnnnnnnnnnccgnnnnnnnnnnnnnnnnnnnnnnnnnnnnnnnnnnnnagtcgacggtaccggacatatgcccgggaattcggccattacnnnnnnnnnnnnnnnnnnnnnnnnnnnnnnnnnnnnnnnnnnnnnnnnnnnnnnnnnnnnnnnnnnnnnnnnnnnnnnnnnnnnnnnnnnnnnnnnnnnnnnnnnnnnnnnnnnnnnnnnnnnnnnnnnnnnnnnnnnnnnnnnnnnnnnnnnnnnnnnnnnnnnnnnnnnnnnnnnnnnnnnnnnnnnnnnnnnnnnnnnnnnnnnnnnnnnnnnnnnnnnnnnnnnnnnnnnnnnnnnnnnggtaggaaagaaagggattcctttaaatggggaaagaaaattcttaaaatttggggtggaggccggtttatagaattaaggcggttctcgaaagggtcctatggtaggcgggaataaaggtctaaatcctctcccttaagggggagaacacaagggtcccatttggagcgggatctaaatgggctgggttctggtcagtagaattacccattggtggttacccaattttgtggtgaagaatggcccatggctatcatattctaattataactccccattaggttttgagagggtacttgaagtggcattatggtgaaattacggatattggtattgtgaaccaattactttgagggaactttacaggtttcttttaaacgttctatggtgcgcgtgcaattacttttataaccgtgctggtgtggagagaaggtatggtgcagaaaaatttatgggtgcggacaatcggagggggagggggttattaggggccgtggtacctggaggaaggaccagaatgagcg

SEQ ID NO: 417575 - DNA, 1149 bp, Homo Sapiens
  misc_feature (86)..(121): n is a, c, g, or t
  misc_feature (168)..(489): n is a, c, g, or t
agaaaggggaaaacatatagggcgctaagctcgtcgagccgaacgacccgagcgcaggcgacgtaggtgagcgaggaagcggccgnnnnnnnnnnnnnnnnnnnnnnnnnnnnnnnnnnnnagtcgacggtaccggacatatgcccgggaattcggccattacggccnnnnnnnnnnnnnnnnnnnnnnnnnnnnnnnnnnnnnnnnnnnnnnnnnnnnnnnnnnnnnnnnnnnnnnnnnnnnnnnnnnnnnnnnnnnnnnnnnnnnnnnnnnnnnnnnnnnnnnnnnnnnnnnnnnnnnnnnnnnnnnnnnnnnnnnnnnnnnnnnnnnnnnnnnnnnnnnnnnnnnnnnnnnnnnnnnnnnnnnnnnnnnnnnnnnnnnnnnnnnnnnnnnnnnnnnnnnnnnnnnnnnnnnnnnnnnnnnnnnnnnnnnnnnnnnnnnnnnnnnnnnnnnnnnnnnnnnnnnnnnnnnnnnnnnnnnnnnnnnnnnccacaaccaaacagaaccggcaacgggggcggaccaaagaggcggcaaacaaacgagcgagcgatcaccacgggcaccacaacccgggcatcagggtgcacaaccacaatgcggtgcaccacggcaaaagggggggcaacacacaacaccaagtggcacagacaaacacaccacgcaagggtcggacagcgggaggccccacacaacgtgacgttgtgccaacaaacaacaaggcgtgacgatgacacacagacaccccacggggacccacaagtcgggccaacaaaaccgcaacacaacacaccgggacccgggggaacaaacaccaccttaacacaggcgacacgacacacagccgaacacgcggcaccagaaacggggcaccccttagacagcggcccacaccaaggccacaaagcaggggcgaaaacaggaagccacctacgaagacccggcggcggcaccaagaacgaagaaaacatgtggccccgcacagagcggcacaacacacaaccagcgagacgaatattgtgggcccgagacacgggcccacactggggcaccaccgggcacaacacggggggcaccaacacacgcgaccaaccaccggaacacaaacggtgacaaaccaccaacgcgcgggacacccgacacgaacat

SEQ ID NO: 417576 - DNA, 947 bp, Homo Sapiens
  misc_feature (46)..(154): n is a, c, g, or t
  misc_feature (187)..(249): n is a, c, g, or t
  misc_feature (667)..(714): n is a, c, g, or t
  misc_feature (734)..(821): n is a, c, g, or t
aagtcgaggtaccggacatatgcccgggaattcggccgacatgtannnnnnnnnnnnnnnnnnnnnnnnnnnnnnnnnnnnnnnnnnnnnnnnnnnnnnnnnnnnnnnnnnnnnnnnnnnnnnnnnnnnnnnnnnnnnnnnnnnnnnnnnnnnnaaaaaagagggttttttatgctaagctgactannnnnnnnnnnnnnnnnnnnnnnnnnnnnnnnnnnnnnnnnnnnnnnnnnnnnnnnnnnnnnntacagctacttgcacaccaaacagcacaccacgagtctacacaacagcggtgcggccgcacgaacgaaacacaggagaaagaccaacacataaaacgcagcaaccaaccaaaagaagagggaagaaaaaagacgacacaagacaacgagcaccacaaaaactcaataccaacagagagcacccaaacaccaacacacgcgcgagacgacccaaccagaaaaagtggagagacaacaaaaagcagacaaccaacataccacccccgcaagcgaacaccacaacacgatgcgagccacatccccaccccacgagacgaaaagaagagagcgaaccaccacactccggaccggcacacaaccgaagaccaactcctctcagccgagagagcaaacaaacaaacgccatgacgccagaaatnnnnnnnnnnnnnnnnnnnnnnnnnnnnnnnnnnnnnnnnnnnnnnnngaccgcacgccgcgcctagnnnnnnnnnnnnnnnnnnnnnnnnnnnnnnnnnnnnnnnnnnnnnnnnnnnnnnnnnnnnnnnnnnnnnnnnnnnnnnnnnnnnnnnnaaaacaactaccacacactcacggtcatcccacgcgaccacacataatacaaaaaagacacatacacgcgataccagacaacgccaccacaaacagaccaggccacgaacaacaaaaaaaccgccg

SEQ ID NO: 417577 - DNA, 1018 bp, Homo Sapiens
  misc_feature (47)..(86): n is a, c, g, or t
  misc_feature (90)..(125): n is a, c, g, or t
  misc_feature (175)..(355): n is a, c, g, or t
gacacgccagacttggaaactcatatagggcggctagctcgtcgagnnnnnnnnnnnnnnnnnnnnnnnnnnnnnnnnnnnnnnnnccgnnnnnnnnnnnnnnnnnnnnnnnnnnnnnnnnnnnnagtcgacggtaccggacatatgcccgggaattcggccattacggccgggnnnnnnnnnnnnnnnnnnnnnnnnnnnnnnnnnnnnnnnnnnnnnnnnnnnnnnnnnnnnnnnnnnnnnnnnnnnnnnnnnnnnnnnnnnnnnnnnnnnnnnnnnnnnnnnnnnnnnnnnnnnnnnnnnnnnnnnnnnnnnnnnnnnnnnnnnnnnnnnnnnnnnnnnnnnnnnnnnnnnngctcatgttttagctcatgtgtgaaatagactctaaatcaaacacaagcatggtatatttttttcatttggataggtatacataaaccatagatgtcttttcagaagtaataagtccagcaaaaaaatggtgagatcttattccctgctgtttatgacaatactcagactcttaggccaatttagcttctgttaagttttatgaaagttcttttgggctttcttccttgagaactcgagaattattttaggatgcagataaagtaccacatatgtacataaagtcagcagtctgttcagttaaaaaattctggacagttatgcttatgcagaccagaaatctattattactggaggaaaagggaagcacttcctgtcatgtgggttaaaacacaatattttaaatattcccaggtctttcggtaaatttatttcacagtacatctgtgggtcagaactacatatagtctgggaatgagccatattcagaggggttatatctcaaataaaaatgaagctccggggggattgggcaaaggcttggtcttgacaacagggggagaccctggcaacaccagttgggccggggggcacaaagggtccccttggtggacaaaaaactttggggaagacggcaaaatgtcccgcaggtgccccgcgcgag

SEQ ID NO: 417578 - DNA, 923 bp, Homo Sapiens
  misc_feature (50)..(154): n is a, c, g, or t
agtcgacggtaccggacatatgcccgggaattcggccattacggccgggnnnnnnnnnnnnnnnnnnnnnnnnnnnnnnnnnnnnnnnnnnnnnnnnnnnnnnnnnnnnnnnnnnnnnnnnnnnnnnnnnnnnnnnnnnnnnnnnnnnnnnnnnataaaatggttactcatatcatatggtacgtatatttaactctggctggtctttaaaataagatgacacacttttatgaagttttataaaatcttacatttttaggggtcggtgtccccagggctgcctcactttttccctaaaaaactaggacccacggttaacctcccagcagatgcaaggatcatgcttctcgggagtccttagtcacttccattcttggcaagtttagtactggcccaaatttactcattctacagtgttactgcccttgtgaacgtttgtgacccatgtcacccaagagaagcaaacttttggttgccctagagacaacttcgggtgctgctctcagtaaggtctatgagtccgggggtctacgtatctgtaaattatcctctccatcaggtctcactgatcattagtgtgtctgggttttcttaccctaagatgtgttccgacaatcaaagaacgttcactattttttaattggaacatcgtttcgggaggcaaggtttttattttcttttgtggaccacgtttcccctgcctccaaggggaggccgggggggactcaagccgtgggttcacctcccggtcagtggtttctgccgcgcccgaggggggttgggggcgcgcccgcccggaattgtttaaaagagggcccacggggcggggtaaagagcatggacatactcggcccatgggtggtgccgcccttttttgttgtctgcaccctgcatgggggctactatggggcaacgcgagtgcg

SEQ ID NO: 417579 - DNA, 510 bp, Homo Sapiens
  misc_feature (60)..(102): n is a, c, g, or t
  misc_feature (106)..(141): n is a, c, g, or t
  misc_feature (185)..(218): n is a, c, g, or t
aacccacaccccacccaaaaccaagaacttgttatctcctataggccgctagctcgtcgnnnnnnnnnnnnnnnnnnnnnnnnnnnnnnnnnnnnnnnnnnnccgnnnnnnnnnnnnnnnnnnnnnnnnnnnnnnnnnnnnagtcgacggtaccggacactatgcccgggaattcggccattacnnnnnnnnnnnnnnnnnnnnnnnnnnnnnnnnnncttggaactcgaagtgctgacactgaagcactcaacagactggccaacattgaagacacccccgtcgtctgcgaggaagagaaaacttgctgaacacttgcatattccaccagtttgcactgaacccaagattgtgccaactgtacatacagcgcaggagataacaccaacgcgggtaatacacgctcagccaacacacacaacaaaagtataataaagttactatcaaactcgaactacatgtaaccaaacggatgctcactataagactactataaactactctcaaaca

SEQ ID NO: 417580 - DNA, 963 bp, Homo Sapiens
  misc_feature (50)..(327): n is a, c, g, or t
  misc_feature (684)..(684): n is a, c, g, or t
agtcgacggtaccggacatatgcccgggaattcggccattacggccgggnnnnnnnnnnnnnnnnnnnnnnnnnnnnnnnnnnnnnnnnnnnnnnnnnnnnnnnnnnnnnnnnnnnnnnnnnnnnnnnnnnnnnnnnnnnnnnnnnnnnnnnnnnnnnnnnnnnnnnnnnnnnnnnnnnnnnnnnnnnnnnnnnnnnnnnnnnnnnnnnnnnnnnnnnnnnnnnnnnnnnnnnnnnnnnnnnnnnnnnnnnnnnnnnnnnnnnnnnnnnnnnnnnnnnnnnnnnnnnnnnnnnnnnnnnnnnnnnnnnnnnnnnnnnnnnnnnnnnntttccaagcctgggtgatgactggtgagactctccaatacatatgaaagagaaattttgaatccctgacctgttgctcctacttaccctcggtgtggccgtcatgggtggtcgcctcggaggggcgccttggattccatggcagggtggatttccaggccagtaactggcgagacatctgccatcttctgacttagaagagaaactgcgcgagaaatgttgtgtaatgcttaggatgccttatatgcccgcttattgtggaaagtcccttggtgcagctgggctctcccgggtgctaacgtgcttgacagtggcccccctcttgtttggggggagttggcggggcgcatactattgnattgagctgggtcgtttacccctataatctttgggtatccaacctatataggccatctcagggctgctcctgaccatccgatttcgccataacgcattgtactgtccacttggtgtctgcacatgccttgccgacggtttatcgggcggtcccggtggtgttccccaccttgagggtcttgtaagtggttacgggtttctgccaaaggggcctttcaccactgggttctttcactcgcccggggccacatttttttccccctggtgggtcccccgcccc

SEQ ID NO: 417581 - DNA, 798 bp, Homo Sapiens
  misc_feature (41)..(76): n is a, c, g, or t
  misc_feature (450)..(487): n is a, c, g, or t
gaagacgagcgcgacgagtcagttgagcgaggaagcggcgnnnnnnnnnnnnnnnnnnnnnnnnnnnnnnnnnnnnacgtcgacggtaccggacatatgcccgggaattcggccattacggcgggtctgtttgcccagactcagtgcagtggtacatcctggaccttcatcagggagatgcgccagttctgtcaggccctgtaccccgtgagtggctatgtctagtgcacgcatcccgaactaccacccagctggcagatcggcttcatgcgtgtgaggagaaagaatcaacgagcacgagatttcatgaaagcgcggtgcaatggctgctgaaatagtcaaggcaatgtgtgatgagaatgcttgttgagtgtactataaatcataaagttgaatggggctgggtgttgaggctgacacagcgttgtgcccctgatggtgccgtgacannnnnnnnnnnnnnnnnnnnnnnnnnnnnnnnnnnnnntgtttgcgaacccaggaggatggggaggctatgggatcactaggtgggaggtagccgaagtgaccaaaggatataggcacttggaacatagaaactgacagggatatggatatagtgagaagcaaacaaatctattgtggttacaagggcacaagaaattgctaggaaagacgttgcttttgtgtgaatgaacgtagctggagagaaggactaaaagggcagttccaatgtcaatgcaaatacaaggtgtgtaagggggcacggattgacatggttgtgcgatacatgaaaaaaagtgtttgaatgaaaac

SEQ ID NO: 417582 - DNA, 988 bp, Homo Sapiens
  misc_feature (50)..(249): n is a, c, g, or t
agtcgacggtaccggacatatgcccgggaattcggccattacggccgggnnnnnnnnnnnnnnnnnnnnnnnnnnnnnnnnnnnnnnnnnnnnnnnnnnnnnnnnnnnnnnnnnnnnnnnnnnnnnnnnnnnnnnnnnnnnnnnnnnnnnnnnnnnnnnnnnnnnnnnnnnnnnnnnnnnnnnnnnnnnnnnnnnnnnnnnnnnnnnnnnnnnnnnnnnnnnnnnnnnnnnnnnnnnnnnnnnnnnnnnggaagggaaaatttggtgtgtgtctggggaagttccccttcagaagatttggggagtctccccgggtgtttattgggtatttgggttttccttaaagactcagtttgggtgtattggctgccggtcttttaaatttggagccagagttaaaacagaaaccttcggttttttttggccacaaaagtaccaggtatttttgtggataaaacttttttccaatttcttcccctttgtttttggtacaccagtttcatgatccaaaaatgctttaataactggggccctggtcacaaatttggaaaagctgggggcagacttctaactatgtacttaacttttttagttgtacacacacttcgggctagggagacgcttgagacattttctggttaaggccccgggaaatttgggatctccaatggggtgggacctgtgtgtggaccactataattgcgtagtgcaagtgttaggctccctggacccacctattccttttgaggcttttacaaaaaagcccggttggaagctttaacttatggtattgacccggataaccgtgagcccgaatattccggttgtttggacatggacacaggtccttcggacatggggagcaggataccctttgtacacggtaactgtcacacgcctagagagggcctaaagaaatacgaggtgtttaaaacagggacccagtgaacattgttccgctgtttctctctatagattcagagtattg

SEQ ID NO: 417583 - DNA, 404 bp, Homo Sapiens
ttttggcgggcggtcttccagatgggaattggcgggaaaagaatatttttaatacctggttttcaaaagggggtttgaagatgtggactcatcaatagtggcgggaaaaaatctaacgctcttggaaagtactttaagtggcggggggccatactcttaggtgccaacgtggcggggaaatttttcatcaggtgaatgtggaaggatggtgttgggctgggaaatgtggcatcacggtatcttgcagagaagattatttctggtttatctcagacagtggggaggggtcaagaaagacgtagtttgccaggtcgggggtcatgctgtaatccaaagtgcggggttaaggttgagaatggggcaagtttgggtgactttatgtgaggaaatcggcaaacaggatg

SEQ ID NO: 417584 - DNA, 962 bp, Homo Sapiens
agtcgacggtaccggacatatgcccgggaattcggccattacggccgcgaaggataatgggaagtcgatcggatccctgcggatgcctggtcgctgcggcgatctcatcatgaccgcatttacgtcgtatgtgcctcgaacccggagtaccgttccattcatggtgctggtaccttgcttcaacacgtggctgtggtgcgagtgggaggaggcgcctcgaggacatcgcagtggaagtcgttgatggactcatcttgaggggctacggacggagtcagctcctttgaatatgggtatagcctgggcgacacttaacgaaaacgaggcatgagtctgtgggagaggtacttggctgcacggagaaggagtggatctcccaagactgtacattagcttggggaccacgtctggattcctagactggcacttggggagaggatagagaaagagacagggcttggagtaatccctaagcattcagtgcatgctattgagaatccggtggcctaatcgatgtgcaatgttgtttgcggcacggtttgaccgtgggtatatttgacctcacacacacgacatgtgttcttgactcgacgttagataactagtgctacccctctaccatcttcactttaagaactcctgcattgacctgccaaggaatttcgcggagtccagtgacccttgacgggaccagacctaagtgaaggtaggcgaaacgaccggatctccacaaaactattcgactggccctgggggttttaactgaattcttgtacgaagttcttgcgaacctcttaaattcagttacctcaatagattcactagagctgttgtaggctgtttaacccctcttgaaaagatactgggagcacctacagttgagaagtgggccaagccttgcatagagggtgatggaagccttgctggcgtaaccaattaccggcatggggcataatataagg

SEQ ID NO: 417585 - DNA, 705 bp, Homo Sapiens
agtcgacggtaccggacatatgcccgggaattcggccattacgcccgccctgacagtccaattcagtgattgtggattgtatgacttacctagtccatccatactcatatgatcaaatatataggtggaaacttggaaacaattagcatgggtctcttgtggatttaacttgaggtttagtgaatattcataaacctgttgctgggggagagaaatgaaagttaatggagcatgcttgctgatgagagagggatttgtaatttaacgtttgtaagttatagtttacttattgtctttagaagttagctttatacattatgccccgaactagatggcctagagtccaacatgacctttggagatgacataagttgtctccataattgagtggatagcgtttaaataaaaagattagtttggcttaaggaagttatgtaacaattgagtcagccctagtatgaacttaactgtttcaggccatatatgaatagcataagtggagttataacttatcagccgtatatggagcataaatagtttgctagctgctgagtttagagaagctttaattgtggttctaataaataccagtatggatagtgatgataggaatccaggatgttgaagaaatgtggcataatgtcgtatattttggaacagagaggaaaagtcactgaagaatagtatgaagtattaaattcctat

SEQ ID NO: 417586 - DNA, 1044 bp, Homo Sapiens
  misc_feature (54)..(96): n is a, c, g, or t
  misc_feature (100)..(135): n is a, c, g, or t
  misc_feature (182)..(190): n is a, c, g, or t
gagaagcaaaaagaaaccttggaatatcgactctatgggcgctagctcggttgnnnnnnnnnnnnnnnnnnnnnnnnnnnnnnnnnnnnnnnnnnnccgnnnnnnnnnnnnnnnnnnnnnnnnnnnnnnnnnnnnagtcgacggtaccggacatatgcccgggaattcggccattacggccnnnnnnnnnttgcgtagctcgtctggtagaagtgcgtgcaggtgttggtcgcgtccagctgcggtactggagactgtatcttcgggggacttcccggcgggaaccgacacgtagtggaaagacacgtaacggcagtacgcatgtggccagatgaacatgctgggctacggcgagccctgccatactgaacatgtcatcgtgtgtgctgtacatagtcaattttgacagggcggcgccttgaacgtctctgtgggcaacgtccctgtgggagagaacatattggggggtccctcaagggatgaagatacacccggtattgtccgagggcccatactcccagaaattattctgcctctgtaccacctggtgtcgtgcactactgtgctacgacaagtggctggggtagttttctgcacacaccgcgaaaattgtgttgccagtatgaccgtgctgaatgcgccagggctgcttaaatgtacctaagggatgctcaaagcaccactaacctgcccaaggtaaaaagggcccacgagtagagcacgcagtggcttccactgcaatgggcaatgtttatatgggcgtcatttgacatggatcaaatccgctgtggaactgaatgcgacgtggtagttccttgcccgttgtactgtattaggctcccccagccaagaagattcgaagtggggaaggctgatgaagggacttttgatcctagtagaagcgctccgaagtcttattcccatacactgcacgggttcatcgactgtacctgtactggacccttgcttccccgttttgcggagacccttgagcgtgaaactcgtgtcgctacttgaggcattacttaaccccttttgggtagt

SEQ ID NO: 417587 - DNA, 1029 bp, Homo Sapiens
  misc_feature (50)..(85): n is a, c, g, or t
  misc_feature (135)..(186): n is a, c, g, or t
  misc_feature (768)..(786): n is a, c, g, or t
gcgcgaacggaccgagcgcagcgaagtccagtgagcgaggaagcggccgnnnnnnnnnnnnnnnnnnnnnnnnnnnnnnnnnnnnagtcgacggtaccggacatatgcccgggaattcggccattacggccgggnnnnnnnnnnnnnnnnnnnnnnnnnnnnnnnnnnnnnnnnnnnnnnnnnnnncaccaaccctctctttagtcaccctggaggcctcggagaaggcggtttcggtgatccgtgaagagaccccgagtctgttacatcccggagaatgacaagagagcgagtacctgggtgacgtttacgttctgggatttcgggagatgcggttttctgcacgccagggccaaagcctgagacgtagatggacggcagggataggagctctctccgcgccacaaacgcccctgtcatacctgggttccttgattttcctgcctatataaccgagcctcccatggccgggctctgagctctcattctgcggactgggaccaaaggggttaactgtgatgcgctttgtataaccccaggattctgcacttgccaaagggcgaggcgcaaatcaaaaactacgcacaattgaacaccgagatcaggtgagtcctgagtgtctcacgacataaaatccttacgatttaacaagagttgtattgtgctagcactgttaacttgacaaacgcatgccaaatccatctgtctttaaagcccaatgtgtgacggttaaccacgtcgattgtctcttcaactttcttatttggnnnnnnnnnnnnnnnnnnnccagtggtctgacttggcgaggacccttcgagctagtccgtagccaatctggagtgatactggacgctgtgggagaacagccatgtgaatacacccgagtgaacccgtataagcaagggttaacgcgtaccataccatgtttcacgtctcacgtttaaaaacgcggcactgtgtcgcgaacgaaatagataaaggaggggcacatgggagaacactaacagcgcgcgcgcacccacacacccg

SEQ ID NO: 417588 - DNA, 593 bp, Homo Sapiens
  misc_feature (449)..(458): n is a, c, g, or t
ttttaaacaaaaattgggtttagaccaattcaactcaggtgaattttactgagcaatttggaaccggagtgaattctcctgagccaattttaattcctgtgatcatgccatacagtgtggcagttaacccaaaacccaattgggtgtctcattcctctgaagttatttccatcggatcatttctgtgaatttggcaccgatgattcatccatacatggttctcttatctgtgtcaaattcagcaggaccagttccctcagatagctccttggcttcagggggccctggacccatctcagggcacatacattcttgcttctgtacctggacttatgctcctctgcgaaggcctgcatcgtggtcacctgcctccttcacttttctcaggtatcccttgcggccatccattaattcggttccctctccccaattctgtacccctacggaannnnnnnnnngggggaggtcgcttccccggcaggggatctgtccaaaaaagggttccccaggggaagaagccggggatcagttgagagtgagcgtggcctctctttgtgtcgctttctgtgccgagcggcggtccgctcctcccg

SEQ ID NO: 417589 - DNA, 975 bp, Homo Sapiens
  misc_feature (50)..(164): n is a, c, g, or t
  misc_feature (172)..(229): n is a, c, g, or t
  misc_feature (412)..(424): n is a, c, g, or t
  misc_feature (769)..(815): n is a, c, g, or t
agtcgacggtaccggacatatgcccgggaattcggccattacggccgggnnnnnnnnnnnnnnnnnnnnnnnnnnnnnnnnnnnnnnnnnnnnnnnnnnnnnnnnnnnnnnnnnnnnnnnnnnnnnnnnnnnnnnnnnnnnnnnnnnnnnnnnnnnnnnnnnnntctccagnnnnnnnnnnnnnnnnnnnnnnnnnnnnnnnnnnnnnnnnnnnnnnnnnnnnnnnnnnctggttggggcgccgcgctgggcccccaaaaaaagcttcttaaacccacttcgtgtggggcgcgcgcgcgggcgccccagttatggtaatgtgacacacctgtcgctcaaacggcgttggtccccacagagaaaccccccggcgcccactgcggcacagcgggtcggtggtttcttccccccnnnnnnnnnnnnnccgcgccggggcgggaacacccgtgtgtttttgggaacaactccagagaggtggggtggcgagaggcccaagagagggctgctctcatacaccagagggggggtctccaagaggcaagcccccggatctattaagaaaattacgccccgccgcggggggagaaggagacaccacagaatacgacacacgaacaataacacacgagacaaaaacacacgagaaaaccaagaatgaggaaaccacacacacaacgcagcgcgcaccaccaccaagaacaaaagacccacacaaagccagaccgacaggaagagacaacacaccgcgacacgaacccacgaccacccnnnnnnnnnnnnnnnnnnnnnnnnnnnnnnnnnnnnnnnnnnnnnnngaaaaaggcgagccacatctcgcaacgagacagaacgaaaaatcgcgacgacccgcgacagcagcggacaggacaaacagcgagaataaaacaacacatagacacatcacagatcacgagacgcagctcaaacacaagacacgacaccaccaaacacatc

SEQ ID NO: 417590 - DNA, 894 bp, Homo Sapiens
  misc_feature (50)..(192): n is a, c, g, or t
agtcgacggtaccggacatatgcccgggaattcggccattacggccgggnnnnnnnnnnnnnnnnnnnnnnnnnnnnnnnnnnnnnnnnnnnnnnnnnnnnnnnnnnnnnnnnnnnnnnnnnnnnnnnnnnnnnnnnnnnnnnnnnnnnnnnnnnnnnnnnnnnnnnnnnnnnnnnnnnnnnnnnnnnnnnngaaaatactgtactgtgggaaagtgaagccatggtaagggaggattactgtatatcttcatttggtcttaagctttagaattatgggtaactaagaagccgtttgagatggttatattccatgactaaacttacctgggaatgtattatttacggggaaggcagttattttaaaaatgcttgtttaaggaagcagttgctgtatttgaattaagataactttcattagagattattagtgaaggttggccatctggttggctatgtgcttatagaattatagaagtaagctatttgtgacaattttagagttaaatttgacaatcttggttacctaccaaactttaaaatagaagtcaggatttctgttacccaacatgggagcttggttgtctcatattcggtaagataattctctgttaattgtggggtcttagaacaaatgggcttaagtaaaatcttcaatcatcttgatgattggcctctattatattttttggtggagagaccccaagctgaaggatggtaatggccataaatagaattcattcgactggggtcctttttagagaacattcggtcgggggaactctggcactggggctcttacgttggccgccccccacgcggggaaccccggggggggcgcggcacaagttttttgaaagcgttgtctgttcgtgctcacacttgcgtctctcgg

SEQ ID NO: 417591 - DNA, 1089 bp, Homo Sapiens
  misc_feature (44)..(86): n is a, c, g, or t
  misc_feature (90)..(125): n is a, c, g, or t
ggggggaaaaaagaaacctggattcaatgggcgcagctgcttannnnnnnnnnnnnnnnnnnnnnnnnnnnnnnnnnnnnnnnnnnccgnnnnnnnnnnnnnnnnnnnnnnnnnnnnnnnnnnnnagtcgacggtccggacatatgcccgggaattcggccattacggccggggtgtactacccggtaaagggctcgaatggacgtctatccgtgaaggttctctacctgtaccctgacggacaacgtcattatgatttgagattattccttaaccataccagtattatttgacgcttactgcatctgcactcgagaggatggttgcttttgatcaaccatgctgccggcctgatagtagtcttccaagcagccaatggtggaaggagtctacacagtagcattgtggtggattcctgaaagtctccgatacagcataggggcctcgagcgtcactgggttgttgagtcaaccttcatgcacgctgtgaagattactttggcgagctacaggttgctcaggacagatcaagttgggctaaatgcattattgcaacggcctgatgatgattccatgtcgttatagtgatactgcagtagggtgcgatgctgatctataatttgttattagccgatcattctggttagcagtcaattgcagaagaaactgttagacaattgtggtatgaagaggatatcggagtgtcatggttcttagaagtgattagctcttgtagatagaccgaggtatttggcaaataggaggggcctaagcggtgaggatgtttgggcctcagatgatgtccggtgtcttgaatcgcttaggtcagatatggtccactacatgctactggcaccctgtgcctccttgaaccatgcggtttcaagcatagaagggtgacgccacggtccagcaattagtctttgggttctggcaaccttggctgggctggtttttgccgctcacggggtgaggacccccgggaggggagaccagggtctgcgacacggttgggcccacctgtcccccgtgctttgaaagccagcgcacaggaacaccgactttcttgtggctcgcacacctccctgaa

SEQ ID NO: 417592 - DNA, 111 bp, Homo Sapiens
  misc_feature (46)..(55): n is a, c, g, or t
aacctaaaaaacattttcatttacatagcaccaaatataagagccnnnnnnnnnnaacctagaaagagtatttgcggagagagaaataaggatcagaaggtttaagagtat

SEQ ID NO: 417593 - DNA, 497 bp, Homo Sapiens
ggtttgaacaattagaatttaccctaatactttagataataggatgggaactaatcgtggtcctttttctaaaatgtggcgtcttgtggttcaaaaatggtcattttaaggtcattggagaaggacccagagttaatatagggggttctttaaaaaacgtggttttgtggggccgaggtgattttatacacacttgtgggagattggcccatttttacgcttggaattacattggagccatggaaaattcagttcaggggagaaccagacttttccaaaagtgaggattttccgaaagttcgcggaactttgtggacttcaaagggtgaagacttccagatgaggggtacaccgggttccactattacagtggcagtgggtggtaggggggttaagggcggcgaagaatatgagctaggggtggcggaagcgaggacagtttgtcctaaaaaaccggtgtaaattggggactaagttaattaaggtcgccggaatgt

SEQ ID NO: 417594 - DNA, 584 bp, Homo Sapiens
  misc_feature (50)..(164): n is a, c, g, or t
  misc_feature (172)..(228): n is a, c, g, or t
agtcgacggtaccggacatatgcccgggaattcggccattacggccgggnnnnnnnnnnnnnnnnnnnnnnnnnnnnnnnnnnnnnnnnnnnnnnnnnnnnnnnnnnnnnnnnnnnnnnnnnnnnnnnnnnnnnnnnnnnnnnnnnnnnnnnnnnnnnnnnnnntctccagnnnnnnnnnnnnnnnnnnnnnnnnnnnnnnnnnnnnnnnnnnnnnnnnnnnnnnnnntgtgtgtggggcgcgcgcccggggcccccggaaaagactttctaaacccctgcggtggtggggcgcgcgggagcccaagtgagggataggggacaaagtgggcccaaagagggtctcacataaagaaaacgcggggcacagaaacacagggcggggagattcccaccccatataaaaaaagcccgcgggggcacaccgaaggtttccgtgagaaacaaactcccaagagggagagccaccggagggcgccacacaacggggagacctaataacaacagggggcacccaaaaggagaacgccgccggatatcacaaaagatatacgccgccccggtctccgggggggccagagcaca

SEQ ID NO: 417595 - DNA, 1341 bp, Homo Sapiens
  misc_feature (68)..(111): n is a, c, g, or t
  misc_feature (115)..(150): n is a, c, g, or t
  misc_feature (200)..(322): n is a, c, g, or t
  misc_feature (324)..(353): n is a, c, g, or t
  misc_feature (749)..(891): n is a, c, g, or t
  misc_feature (935)..(989): n is a, c, g, or t
  misc_feature (1030)..(1088): n is a, c, g, or t
acgacgaaaaacaaaacaagagacagcacaaagatgatagactcactatagggcgctagcttgcacgnnnnnnnnnnnnnnnnnnnnnnnnnnnnnnnnnnnnnnnnnnnnccgnnnnnnnnnnnnnnnnnnnnnnnnnnnnnnnnnnnnagtcgacggtaccggacatatgcccgggaattcggccattacggccgggnnnnnnnnnnnnnnnnnnnnnnnnnnnnnnnnnnnnnnnnnnnnnnnnnnnnnnnnnnnnnnnnnnnnnnnnnnnnnnnnnnnnnnnnnnnnnnnnnnnnnnnnnnnnnnnnnnnnnnnnnnncnnnnnnnnnnnnnnnnnnnnnnnnnnnnnntgtgtggtgggcgcgcgcgccgcgggcccccgggagaagagagcgtttttagaaaccacatgcgcggtggggcgccgggggcccccaagagagaggaaagaggagaacacgaggggccaataccgggggtccccaagagagagaaactcggggcccaagagacaaagagggcaggaggaatcttctcccaccaaatataaaaaaagcgccggggggggacacccgcgaggcgcggttcgctggacaacaaaatccgcgagagagaggagagtcatcgggaggggggcacaatctcagagggggagcctctacacaacaagagggggagagcccccagaggcgagcgaacctcggaaaatatctaaacttataagcccccaagagtaatgggggggnnnnnnnnnnnnnnnnnnnnnnnnnnnnnnnnnnnnnnnnnnnnnnnnnnnnnnnnnnnnnnnnnnnnnnnnnnnnnnnnnnnnnnnnnnnnnnnnnnnnnnnnnnnnnnnnnnnnnnnnnnnnnnnnnnnnnnnnnnnnnnncaaggcggccgaacgagcggagagggggaggagcgccaggcgcnnnnnnnnnnnnnnnnnnnnnnnnnnnnnnnnnnnnnnnnnnnnnnnnnnnnnnncgcggacgcaagccacgcgcagaggcgagagaaagaaggcnnnnnnnnnnnnnnnnnnnnnnnnnnnnnnnnnnnnnnnnnnnnnnnnnnnnnnnnnnngggcgcgcaggagggagagacgacgacagccacgagagaaggcaaaagaagacacaggcaggcggacgagacggagacgcgagaaggcgacgagcagggaagaagagaagccaagcagcgagaacagcagacgaggagacagagagaagggaacagagccacagagggggacgcgagagacggagacagaaagagaaaccaggggggacagcgagaaagcgacgacgaaggggagaggcgaaaagagaagaac

SEQ ID NO: 417596 - DNA, 1015 bp, Homo Sapiens
  misc_feature (494)..(572): n is a, c, g, or t
caattgtggcggcgcgcgcgcctgcgggcccccgggagaaaaagcgtttcaagaacacacacatccgcgttggcgcgcgcgccgcgggcgcccacacgaaggacaaaagagtgggaacaccggtggcccccaatagcgcgatgtatctccacgagagagagcacatctccgcgggccccccgagcacaaagcggcccgcgcggcccttctctcacaccacaatataaacacaagagcgccgcgcggggggcgcacaaacggcgagagcggagtttcactgcgagcacaagcatttcccacaaagaagtggggaaattcccaccagaggaggcgctcacaaaacaaccggggcgccatctattatacacaccccaagggagaagctcacaacacagcgagcactgctctcacagcattcttctcacactatatttgaccagcgccccccggatagaaggggtagggacaaaccctcaagtcacctaaaccaatcnnnnnnnnnnnnnnnnnnnnnnnnnnnnnnnnnnnnnnnnnnnnnnnnnnnnnnnnnnnnnnnnnnnnnnnnnnnnnnnatctatccaagatacacagatcgtacatacaatcctcataacacacaaatcataaatacacaactagccgaacaacaacaacccatactaacaaaacacaacatgaacaggcaacccggaggccggccgagtactgcggtaaactggagggcgggacgcagggccgcatcgacaccactgaaagagcggcgagcggagagcaccgcacagcatgctactctcattaaaacactcaatatatatcatccaaactcaccacaacaacacccaccataacaaaaatactctatgactaaacaaaacacatgataaacttaataagactattcaaacttaatcacgcttcatccacaccgataaaaccaccacacaactcaactcaatcttaaacaaactaaaaacactatacacataacttacacctacagaacacaacatacaac

SEQ ID NO: 417597 - DNA, 1749 bp, Homo Sapiens
  misc_feature (49)..(100): n is a, c, g, or t
  misc_feature (104)..(139): n is a, c, g, or t
  misc_feature (189)..(287): n is a, c, g, or t
  misc_feature (320)..(385): n is a, c, g, or t
gaacaacaaaacaaaaccagagtgctatagactcactatagggcgctannnnnnnnnnnnnnnnnnnnnnnnnnnnnnnnnnnnnnnnnnnnnnnnnnnnccgnnnnnnnnnnnnnnnnnnnnnnnnnnnnnnnnnnnnagtcgacggtaccggacatatgcccgggaattcggccattacggccgggnnnnnnnnnnnnnnnnnnnnnnnnnnnnnnnnnnnnnnnnnnnnnnnnnnnnnnnnnnnnnnnnnnnnnnnnnnnnnnnnnnnnnnnnnnnnnnnnnnngtagtaggtcgagtatccccgttttctccatgnnnnnnnnnnnnnnnnnnnnnnnnnnnnnnnnnnnnnnnnnnnnnnnnnnnnnnnnnnnnnnnnnncactgtgtgtgtggcgcggcgcctgtggcgccccctgggagaaacagttttcacagagacacccctcggcgcgtgagggcgccgcgggaggcccccaaaagagagcgaacacgacggcgcacacaggggtgccacaacacagcgcgtgagtcccacaaagagggagaaaaccacgagcggaacaagaggacacacacacagcggcgcagcgagaacatcatcctcgacacacacaaattgtaaaaatacacgatgcgtgcacccgccgttgggagctgccacaccctagcgcggagagaagcgtcgatctgacgatgcgagaacgacagaacatgtcattctgcgacaaactgaatgctggtcagtctaatctcccgaagagacgatctaccacacatacagcgaggcggcggaactcctgctactttccacacagacggcgatgacgaactatatccacaatgaggcggtgatcgagcctcctcagacatacctctcaaattattaagtagacaccgcaacaacacaacaataggggcgaggagacaccagtcactcaacatgttcatactctaactctctaattctctcgacacactaccgtagaccagtacgctgtacaccttagcttacgactccctcatacgcccatctagatgatcactacactgctcagactgacactcagcaacaaatgagaacggtaaatccctccgacaaactcgacaagcatagcactttcgatgatagtatgtcctagtatcgctaccatcagccacgactagcgtcggtgcgtgggtgacgggcgtgggcgcgcgtcggccggccggcggggcggtgcgtctgggcgtggtcgtggtggtggtcctgtgtgcggcgcgccggggtgccgctcgtcggcttcgctcgtgctcggtggtgtgcggcggcgcgcgtgtcgtcgggcgcccctggtggtgctcttgtggtgcgtgggtggctgtggtcgggtgcggggctggtgtgcctgtcggccgtctgggccgctcgctgttggtctcgtggtcggcgggccgtgtcgtgcggtcgtcgagtgggtgtgaggtggggtgcgtggtcgcgtgtgagtagggcggctgtcgcgctgcgcgtgcgctgctcgtcgctgtcgcgtggtcggctggagtcgagcgttctttgattcggcggggcgggctcctgcgcggcgcgctggtgttgtgcgtccgtcgtcgtgggtgccgctgggggggcagtgtgtcgtgtcggtcgtcgagggtcgttcggtggccgtctggtgcgggcggtcgtgcgatgcgtcgcgtgtggcggtcagcgtcgtgcgcggtcggctcgtgtgcgctggg

SEQ ID NO: 417598 - DNA, 828 bp, Homo Sapiens
  misc_feature (50)..(164): n is a, c, g, or t
  misc_feature (172)..(199): n is a, c, g, or t
agtcgacggtaccggacatatgcccgggaattcggccattacggccgggnnnnnnnnnnnnnnnnnnnnnnnnnnnnnnnnnnnnnnnnnnnnnnnnnnnnnnnnnnnnnnnnnnnnnnnnnnnnnnnnnnnnnnnnnnnnnnnnnnnnnnnnnnnnnnnnnnngttccccnnnnnnnnnnnnnnnnnnnnnnnnnnnntttgttgggccgccctgcggcccttaggaaaagagtttttatagacaccaatttggttggggcgccggggcccccactataaggtcataggtggaccacgtgtggccaaagagcggtgttcccaagaggaaaaacccggggccaaggccacaaaggggcggggaatctccaccccaaataaaaaacccccggggggacacccggaggcggttcgtggaacaaacctccagaaggggagaggtcacggagggcggaccaatacgggggacctatacacaaccaaggggggcggtcccaaacggagaggctcacggatatatatcaaaaattaacgccccgggacgtggggggaaccacactaatatctacctagacaaactaccacagacacgaacctcaaacaacgaggactaaacaacatcaaaacgagacaccaacccaggaaacgaactgacgcagaaacaagccattcaacaataaccaccagtcgaaacatcagaagccaacacaaccaaaacatagacaaagccaaaacccacaactatcacaccccatacacatgcatcctcactacgcagaatgaacacaagaataacaaatcagtcaaacaagaacacaaacgtcaaccc

SEQ ID NO: 417599 - DNA, 803 bp, Homo Sapiens
  misc_feature (50)..(136): n is a, c, g, or t
  misc_feature (145)..(178): n is a, c, g, or t
  misc_feature (633)..(670): n is a, c, g, or t
agtcgacggtaccggacatatgcccgggaattcggccattacggccgggnnnnnnnnnnnnnnnnnnnnnnnnnnnnnnnnnnnnnnnnnnnnnnnnnnnnnnnnnnnnnnnnnnnnnnnnnnnnnnnnnnnnnnntcttatttnnnnnnnnnnnnnnnnnnnnnnnnnnnnnnnnnncaaacaagggtgtgcggcccgccctcgggccccgcgaagaacgctttcataaaacacacccgggtgggggcggcgcggggccccaaaggggcagagcgggaaacgggcgcaaacgcggggtccctttgagggaaaccccggggcaaatagacacaaagcggaccgggggatttccacacccatattaaaacaaccgcccgcggggcaaaccccgacaggtcctcctcgacacaaaatcccacaaagggagactcccccgagcccccatcaggcgggccacttaattaaccagagggaacctcccaaagaggagaagccgaagacaaaacacaacgatatgcaagcccccgcgcacgctgtgggaccaccccaccccacctccacaaagccccgaccacctacaagcaacccccctccatgacacaacagggcggagggagcgcggagacacgcgnnnnnnnnnnnnnnnnnnnnnnnnnnnnnnnnnnnnnntgacccgagaccggatgaagacgcgagcgaccccgcagaagcaaagagcgactcggtggcacgtgcctgcaggccggcggccaggaagagagaagcagcccacccggcggagcagaagcgaggcgggggcaac

SEQ ID NO: 417600 - DNA, 380 bp, Homo Sapiens
  misc_feature (50)..(164): n is a, c, g, or t
  misc_feature (171)..(199): n is a, c, g, or t
agtcgacggtaccggacatatgcccgggaattcggccattacggccgggnnnnnnnnnnnnnnnnnnnnnnnnnnnnnnnnnnnnnnnnnnnnnnnnnnnnnnnnnnnnnnnnnnnnnnnnnnnnnnnnnnnnnnnnnnnnnnnnnnnnnnnnnnnnnnnnnnntctcccnnnnnnnnnnnnnnnnnnnnnnnnnnnnncaacttgtgtgtgggcgcgccgccctggcgcccccggagaaaaaattttttaaacccaatcggttgggagccgcgcgcgggcccccaagatggggtctgaggtggaacatggggcccaaacgcggtcccaagagagaaaaccggggccctcggaacatgagggggcggggattctcccccc

SEQ ID NO: 417601 - DNA, 1057 bp, Homo Sapiens
  misc_feature (67)..(67): n is a, c, g, or t
  misc_feature (89)..(124): n is a, c, g, or t
  misc_feature (174)..(292): n is a, c, g, or t
  misc_feature (294)..(338): n is a, c, g, or t
  misc_feature (654)..(704): n is a, c, g, or t
ggaaagaactagagtgataatcatatagggcctaggcctagcagcgaacgccgagcggccagcgagntcagtgagcgaggaagcggcgnnnnnnnnnnnnnnnnnnnnnnnnnnnnnnnnnnnnagtcgacggtaccggacatatgcccgggaattcggccattacggccgggnnnnnnnnnnnnnnnnnnnnnnnnnnnnnnnnnnnnnnnnnnnnnnnnnnnnnnnnnnnnnnnnnnnnnnnnnnnnnnnnnnnnnnnnnnnnnnnnnnnnnnnnnnnnnnnnnnnnnnngnnnnnnnnnnnnnnnnnnnnnnnnnnnnnnnnnnnnnnnnnnnnntgtgtgtgtgggccgggccctgggccccgggaagaagtttctaaacaccacccccggttggggcgcgcgcgcggggcgcccaagagggataggctgacctgggccaaggcgggttcccaagagagaacccggggccccgagcacaagggggtgtgggtttccccccaaataaaaaacccgcccggggggaaccggagggttttgtgaacaaaacccaagaggggacgttcgaggggcaccaatacaggggggcctctacacacgggggcggccaggcggcgtccagaatatttcaaaattaagcccccggcgctgnnnnnnnnnnnnnnnnnnnnnnnnnnnnnnnnnnnnnnnnnnnnnnnnnnngacagacaaaacagcaacaaggccaggagtacatacaagaagccgagacaagaagaacagacggaccaggagaacggggagaccgagccgggcagagaacgaatagaacggaagacacagacaggcgaagaggaaagggaagagggaagaagacgaaaggaagacggacgacaacgcagacgacgagcaccgcgaagacagcgcgagcgagaagagccgggcgccgcgaaaagacgagacagcaggaagaacgcaacgacgaagcacacaacgagagagacgcaacgaagagtgcagagccaaagcgaaacgaaagaacacaagcagagagcgagcgacgacagcacggagca

SEQ ID NO: 417602 - DNA, 1056 bp, Homo Sapiens
  misc_feature (50)..(164): n is a, c, g, or t
  misc_feature (170)..(200): n is a, c, g, or t
agtcgacggtaccggacatatgcccgggaattcggccattacggccgggnnnnnnnnnnnnnnnnnnnnnnnnnnnnnnnnnnnnnnnnnnnnnnnnnnnnnnnnnnnnnnnnnnnnnnnnnnnnnnnnnnnnnnnnnnnnnnnnnnnnnnnnnnnnnnnnnnntctccnnnnnnnnnnnnnnnnnnnnnnnnnnnnnnncagtgttggcggcgcgcggctctggcccctcggaaaaagctttctaaaaccaattcggttgggggcgccccggcgccccaggttgtggtcaccgtggacactgtcgcataacgcgggctccctaaaggagaccccgggcgcccgcgagctacggcgtgtgggttctcacccaaatataaaaagccgccgggggggcacgcgggacggtggtctcttgacacatccccaacagggggtccaggagggcgcagtcagggactcaaacacacagcgggagggcacaagggggggagcgcaagaaataaaattaaacggcccgcccggggtgcaacaaacaagacgcagagcacagacacacaaccagacgcgagaccaacaaacaacaacataggacaaaggcagcgagaactagaacagagaagaagagcacagtgagcaacaaaacaagatacacaaacgaacgcagaacacagagaagagtagacaatagaaacgaagcaggagagaaaaataagacagcatacaaccacagaaacgcagaccaaaagagacacagcggagcaaagacataaacgagacagggggaaaaggggaagtggcaagagagacaatgaaggcacacgaacgggacggaagagcgagacgacagagcggagaacaagcgaccgacgacgcaacgagcagcaggacgagacaacgagccgcggaccgctagcgcgacaaagccaatgtcggtggacgaagagcacaaacacgatgaccaacacagtgagagaccataacaggcgcaagcacaacaacggaccgccgaacgggaagaaaaagaatagcggaaacacgatggggcgatcgaacc

SEQ ID NO: 417603 - DNA, 1047 bp, Homo Sapiens
  misc_feature (49)..(162): n is a, c, g, or t
  misc_feature (179)..(238): n is a, c, g, or t
agtcgacggtaccggacatatgcccgggaattcggccattacggccggnnnnnnnnnnnnnnnnnnnnnnnnnnnnnnnnnnnnnnnnnnnnnnnnnnnnnnnnnnnnnnnnnnnnnnnnnnnnnnnnnnnnnnnnnnnnnnnnnnnnnnnnnnnnnnnnnngtcctccagaaacaggnnnnnnnnnnnnnnnnnnnnnnnnnnnnnnnnnnnnnnnnnnnnnnnnnnnnnnnnnnnncgttggtgttgggggcggccctctctggcccccggagaaaaggcttttaaaacccactgtggtggggggggcgcgggcccccaaaagaggtgatgcggcggaaccgggggccccaccaggcggggctccccaaagggaacacccggcggccagcaccaacggggggcgcggggaccttcccccccaaaataaaaaaacccgcggcgggggcgggacgacgcaggcgcggtgctgagaaccaacaccccccacaagggaggcggtgtccggagacggggcccgacagcggcgcgtacaacacagagggaggccgcccaaaccagggcaggccgaggaattaaaaaattaacccgccccggccggctggggcgaccacaaccacgatcaacaacgacgagcaaagcacgaccaacagacgcacgccatcgcggaccacatcaactacgggaacataacgtaacggaccaacaggaacgcaacacgcgcacaagcaggcggagccaggcgccgcgaaggcagaagccagcgcactagacgcctgccggaacgaggcagcagacagccgagaaggcaaagaaagctcgccgataccgtcaacccagaccgccaaccgagaaggacagcagcaaccagacgagcgcgactcggcagcgcgcgcgaagatgcggaacaggaggacacgccaggaccaccaggagcgaagaccgagacaacgcggccgaggccagcagataccgcacgcgctaaacaccccagaacccaaggagagaacgaacagcaccgaagaagcacaaacccaaacaaagcgg

SEQ ID NO: 417604 - DNA, 718 bp, Homo Sapiens
  misc_feature (50)..(165): n is a, c, g, or t
  misc_feature (175)..(202): n is a, c, g, or t
  misc_feature (433)..(433): n is a, c, g, or t
agtcgacggtaccggacatatgcccgggaattcggccattacggccgggnnnnnnnnnnnnnnnnnnnnnnnnnnnnnnnnnnnnnnnnnnnnnnnnnnnnnnnnnnnnnnnnnnnnnnnnnnnnnnnnnnnnnnnnnnnnnnnnnnnnnnnnnnnnnnnnnnnncatccaaagnnnnnnnnnnnnnnnnnnnnnnnnnnnncttgttgggccgcggcccggggccccgggaaaaggttttcaaaaaccaatcggtttggggcgcccggggccccagtaggttaacgggcacgtggggccaacgggggcccccaagggaaagaccggggcaaggctaagggggtggggttccccccaatataaaaaagccccgggggggcaccgggaggcggtcgggaaccaaactcccaagggggcgctcggagggcgcccnacaggggcgctcaacacagagggcgtccacggggagcccgatatcaaaattaaccgccggcgaggagaaacaacaacacaccgagcacacacaaaccaagaagccaagacacgagaaagagcagcgaacaacaagcgacagaaggcaaagcagagagccacaccgcctcggacgacggaagcaacgagaagacgcgacagagaacagcacgcagccggaagcgcgacacacacccaagagtacaaaacagagaagcaacacacccaacagagacgggaaccacaa

SEQ ID NO: 417605 - DNA, 1331 bp, Homo Sapiens
  misc_feature (86)..(121): n is a, c, g, or t
  misc_feature (168)..(251): n is a, c, g, or t
  misc_feature (254)..(305): n is a, c, g, or t
  misc_feature (929)..(1024): n is a, c, g, or t
  misc_feature (1104)..(1104): n is a, c, g, or t
aataaatgtacgatcactatagggcctagccttgcgcaggcgaacgaccgagcgcagcgaggttaggtgagcgaggaagcggccgnnnnnnnnnnnnnnnnnnnnnnnnnnnnnnnnnnnnagtcgacggtaccggacatatgcccgggaattcggccattacggccnnnnnnnnnnnnnnnnnnnnnnnnnnnnnnnnnnnnnnnnnnnnnnnnnnnnnnnnnnnnnnnnnnnnnnnnnnnnnnnnnnnnggnnnnnnnnnnnnnnnnnnnnnnnnnnnnnnnnnnnnnnnnnnnnnnnnnnnncactgtggtcggcgccccttcgccccagaaagactttcaaaaccactcctgtggggcgcgcgggggcccaagtggttatggtacatgtggcaaacggggtcgcctaagaacacccgtggccatagactagggcgtgtgggtttccccaccaataaaaaacgccccggggggcagcaccggcgctgtgtcgaaaccacctccaagaggggagtcccgagggggacattatggggggctcattataccaagggggaggggtcaaacgggaggcctccgaatatatctaaaacttagccgcgccgccgtcgtcgggggaacgcacagaacaaatatcaggagcacaagtccgaacaactacagagcgagagcaagcagcaaacgaagcaagtagaaaccattacagaggacgaagcagagacgacaacacaagcgaagtaatacgaaatgctaatgaaagcaagtacgctaagccaagcagcaagacacgagggagacacacgcagcagacgacgagatgcatcaactcacgaaactagcagagacgggagaagacagaacggacagaacgacgagaggaagaatgcacgcgaggagcgagaaggcagaggcacgcacagcacgcannnnnnnnnnnnnnnnnnnnnnnnnnnnnnnnnnnnnnnnnnnnnnnnnnnnnnnnnnnnnnnnnnnnnnnnnnnnnnnnnnnnnnnnnnnnnnnnaagaacgagggggtagaagatcgcagtgacagacgaagaagcagtgaagcgagcaagagaaacgagcgacgatagacgangcgagtagcgaagacaagagagcatgggaagccatataggaaagacagagagagtaagacagacacggaatagatggaaccgaagagtgagagtgtatgcggagagactactgacggcgaggatagcgagcacacagagacaagagaaggcaaacgaaatcgcagaacgaagaagcaaggagagatgaagaggaagcgccgatggagagcaaatgacagagtgtgct

SEQ ID NO: 417606 - DNA, 1102 bp, Homo Sapiens
  misc_feature (71)..(107): n is a, c, g, or t
  misc_feature (110)..(145): n is a, c, g, or t
  misc_feature (183)..(332): n is a, c, g, or t
  misc_feature (335)..(362): n is a, c, g, or t
  misc_feature (801)..(863): n is a, c, g, or t
  misc_feature (966)..(1018): n is a, c, g, or t
aacagaaggcaagttggctaaatacgaactcactataagggggccgctcagggtttgacgcaagccggaannnnnnnnnnnnnnnnnnnnnnnnnnnnnnnnnnnnncgnnnnnnnnnnnnnnnnnnnnnnnnnnnnnnnnnnnnagtcgacggtaccggacatatgcccgggaattcggccnnnnnnnnnnnnnnnnnnnnnnnnnnnnnnnnnnnnnnnnnnnnnnnnnnnnnnnnnnnnnnnnnnnnnnnnnnnnnnnnnnnnnnnnnnnnnnnnnnnnnnnnnnnnnnnnnnnnnnnnnnnnnnnnnnnnnnnnnnnnnnnnnnnnnnacnnnnnnnnnnnnnnnnnnnnnnnnnnnncaattgtgtgcgcggcgcgcgcctcggcccccggaaaaggtttttaaaaccactccgtgttggggcgcgcgggggcccccatggggtaaggtggacctgtgggccaaaaggtcgggttcccaaagggaaacccggggcaaagagaattgtggggtggggtttccccacccatataaaaaaaccgccccgggggcggacaacccggtagcggtttcgagacaccaacccaaagaggggaggtccgcgaggcgccattaaggggcgggttctacacaaccggggcggcccaccggaggcccggatatcaaaatttacgcgccccggccgtagggagtaagagaggagagccgcagaggcagaagacgaagcgtggacacaggagaatcgacgagacacagcagacaacgagcacacaacaagaaagcaccgacccgaggannnnnnnnnnnnnnnnnnnnnnnnnnnnnnnnnnnnnnnnnnnnnnnnnnnnnnnnnnnnnnngaagagcaggcagccacgcagaccgcacaaaacaggagagcagcacagcacagacacgcgaaagaacagaagaggcgcagaggagaagagagaagacgaaccnnnnnnnnnnnnnnnnnnnnnnnnnnnnnnnnnnnnnnnnnnnnnnnnnnnnnacgacaaacatcaggagacgaaacggaagagagacagagagcagataggggaggcgaagcacgaacgcaagacaccgcaggaac

SEQ ID NO: 417607 - DNA, 950 bp, Homo Sapiens
  misc_feature (50)..(279): n is a, c, g, or t
  misc_feature (340)..(357): n is a, c, g, or t
agtcgacggtaccggacatatgcccgggaattcggccattacggccgggnnnnnnnnnnnnnnnnnnnnnnnnnnnnnnnnnnnnnnnnnnnnnnnnnnnnnnnnnnnnnnnnnnnnnnnnnnnnnnnnnnnnnnnnnnnnnnnnnnnnnnnnnnnnnnnnnnnnnnnnnnnnnnnnnnnnnnnnnnnnnnnnnnnnnnnnnnnnnnnnnnnnnnnnnnnnnnnnnnnnnnnnnnnnnnnnnnnnnnnnnnnnnnnnnnnnnnnnnnnnnnnnnnnnnnaaggtgaagccctccaggaacctggcaccttgataatgaatttctaccctccaagaacgtnnnnnnnnnnnnnnnnnntcccgggggttaagcttttggggttaaggggggaacccgggggaagactacatacacgggccttccttcttttcccagtatgatcacactaacgggtcggggagggaaagggtctgagtaaactgcagttatggaggtatagaacgcaactggctattaatcaataatgttatatcaactgggagcaataaacaagcaacaaaacacacaacaaacaggggctacccttgtgctggcaccgtatccttatatgtatatacagacttcaggtacataaaaagccagaaggggcttctcaaacagatggaggcctcacggggtcggttcacacgggcaattctatttctccacacctaacaatccggcgcacacatgtcattggtcccaacagaataatattggcgcgggagggttgcctaacgaatggcggctttcaaaatttcgctgtaagaaacctgatgctggaaaggatcaaggctttaagacaccgacagaggagggacccactatagtggcggaaaatcccggaggaggcagagtcatacagacacgggcgatagagaaacaggcgggcgaagaccaggctcgtctca

SEQ ID NO: 417608 - DNA, 732 bp, Homo Sapiens
  misc_feature (35)..(35): n is a, c, g, or t
  misc_feature (52)..(97): n is a, c, g, or t
  misc_feature (101)..(136): n is a, c, g, or t
  misc_feature (174)..(293): n is a, c, g, or t
  misc_feature (302)..(337): n is a, c, g, or t
gaggggacgaaagatggtaatacgactcactatangggcgctaggctcgtannnnnnnnnnnnnnnnnnnnnnnnnnnnnnnnnnnnnnnnnnnnnnccgnnnnnnnnnnnnnnnnnnnnnnnnnnnnnnnnnnnnagtcgacggtaccggacatatgcccgggaattcggccnnnnnnnnnnnnnnnnnnnnnnnnnnnnnnnnnnnnnnnnnnnnnnnnnnnnnnnnnnnnnnnnnnnnnnnnnnnnnnnnnnnnnnnnnnnnnnnnnnnnnnnnnnnnnnnnnnnnnnnntctccaacnnnnnnnnnnnnnnnnnnnnnnnnnnnnnnnnnnnngtgtgtgcggggcggaccgcgcggccccgcggagaaagacttttcagagaaccatgcgcggtggggcgcgcgcgcggggccccgaggagcgagcaaggaggaaagcgtgggcaacaaagcggtggttcccgagagggagacacccggggaacgagggcacaagaggcggcgtggagcaattttccaacccaaataaaacaaaagcccccgcgggggaaacaccggaggcggttttggtgaaacaaaactctcaagaggagggagacaacagagaggagcaaaacaaacggggggggctctattccaaacaagggcggcccaaaggaggacgcaccgaaaacctcaagtttaacgcgccccgggcaccggggggggaaagaaggacaacagacgac

SEQ ID NO: 417609 - DNA, 770 bp, Homo Sapiens
  misc_feature (46)..(161): n is a, c, g, or t
  misc_feature (176)..(205): n is a, c, g, or t
agtcgacggtaccggacatatgcccgggaattcggccattacggcnnnnnnnnnnnnnnnnnnnnnnnnnnnnnnnnnnnnnnnnnnnnnnnnnnnnnnnnnnnnnnnnnnnnnnnnnnnnnnnnnnnnnnnnnnnnnnnnnnnnnnnnnnnnnnnnnnnnacacaggaaggaagnnnnnnnnnnnnnnnnnnnnnnnnnnnnnntcttgttcgcggcgccggctttcggggcctttcggaaaaaggttttctctaaaacattccgtgttggggcggcggcgggcccagtaattgttatgtgaaccttgggccattaggctggctccaaaaggagaatcccgggcgctggagaactacttggttggggttctctcacccaatataaaaaaagcgccggcggggaaacccggaggggtttctggaaacaatctcccaaagatggagaggctcgagaggagggccaattaacgggggtgagtttatttccaaaaaggggggagttcccaaggggggagcctccggaatattacaaaattatcccgccccgtcctgtgtggggaaaaaggataataagcacgcatgtagatcaattaaagagcacacaagagaacgaagtaagtataataacagtaagaatcacataataatatcagaaagaacatacatcagagcatgtacaaaaccatcgtaggacagccacaattaggataaatatctatataggacaaaaacattgatagtaaaaagcgagagaatagagagaggaggg

SEQ ID NO: 417610 - DNA, 868 bp, Homo Sapiens
  misc_feature (50)..(339): n is a, c, g, or t
  misc_feature (369)..(383): n is a, c, g, or t
agtcgacggtaccggacatatgcccgggaattcggccattacggccgggnnnnnnnnnnnnnnnnnnnnnnnnnnnnnnnnnnnnnnnnnnnnnnnnnnnnnnnnnnnnnnnnnnnnnnnnnnnnnnnnnnnnnnnnnnnnnnnnnnnnnnnnnnnnnnnnnnnnnnnnnnnnnnnnnnnnnnnnnnnnnnnnnnnnnnnnnnnnnnnnnnnnnnnnnnnnnnnnnnnnnnnnnnnnnnnnnnnnnnnnnnnnnnnnnnnnnnnnnnnnnnnnnnnnnnnnnnnnnnnnnnnnnnnnnnnnnnnnnnnnnnnnnnnnnnnnnnnnnnnnnnnnnnnnnncaatttaagttaattaacccaggtttggcnnnnnnnnnnnnnnngccgaacacacaccaaccaacacaacaaccttttgtctgcgccgccactggcccccaggaagaaaggtttctataaaccaacctctgttgtgggccgccggggcccccagcgagggctaaggtggcaccaggggcccacaaggaggggggtcccaaaagagacgcacccggggccctacgcacaagggggcggcgggtccctccccccaataaaaaaccgcgcccggggggacccggcacagcgcgtcgcttgaagacacaactaccagaagagcgggctcaggaggggcccaaacgggggcctacaaacacaaggggggtcccaagccagggccccgatactaaaatttccccccccgcaaggtaggtgaccaagacaaccagcgcaacaagtagcaacaccgcacacaacgggcctcagagatacagacaaaacagaggcacgccaacaacaacaacagccagaggaccggactcagggacga

SEQ ID NO: 417611 - DNA, 693 bp, Homo Sapiens
cagtgtgtgggcgccgcgccctcgggcccccggggaaaaagctttcttgtaacacaaccacatcggcgtgtgggggcgcgcgcgggggcccccagaatgaaggataacggcgcacaaacgtgggcccacatagcggcgggttccccctaagggagaaaaccgcggggcccgagcgcaaagagggcggtggggcttccccacaccaaataaaaaaaacgcgcccgcgggggccagacccgcgagaggcgtgttggagaacaccaacaccccccgagagagcgggtaagcttccgggaggagctcctactacggggggcctctatctacacacgagggggctgcctcacagggcgaagccgccgaataatacaaaattatatagcgcccccacggtcacgggggtggagtccacaagaacaccacctacaaagaccaaaggcaccaacgtacacccctcgaccccagctcacagaagcagcacacccacacatcacatacagctaacaacgtacaacagaactcgcatcgagaagtacaacaaagcaccgtcacgcagcaacaacagaaaaaccgccagtaccacgccactaactatcagcctccaccaccacttcaacagccgacgcaacgccaaacacttgactgatatcagtagcaagacagcctcacgacacactcgatgccgaccgatca

SEQ ID NO: 417612 - DNA, 856 bp, Homo Sapiens
  misc_feature (45)..(91): n is a, c, g, or t
  misc_feature (95)..(130): n is a, c, g, or t
  misc_feature (168)..(287): n is a, c, g, or t
  misc_feature (295)..(353): n is a, c, g, or t
  misc_feature (407)..(430): n is a, c, g, or t
  misc_feature (715)..(799): n is a, c, g, or t
ggccaacacccagtcgtatagatcactatagggcgctagctttannnnnnnnnnnnnnnnnnnnnnnnnnnnnnnnnnnnnnnnnnnnnnnccgnnnnnnnnnnnnnnnnnnnnnnnnnnnnnnnnnnnnagtcgacggtaccggacatatgcccgggaattcggccnnnnnnnnnnnnnnnnnnnnnnnnnnnnnnnnnnnnnnnnnnnnnnnnnnnnnnnnnnnnnnnnnnnnnnnnnnnnnnnnnnnnnnnnnnnnnnnnnnnnnnnnnnnnnnnnnnnnnnnntctccagnnnnnnnnnnnnnnnnnnnnnnnnnnnnnnnnnnnnnnnnnnnnnnnnnnnnnnnnnnnggggggggcgcgccgcggggccccgcgcgaaaaacgcttttcagaacaccaccnnnnnnnnnnnnnnnnnnnnnnnnccacggaggagaaacggcgacaacgggggcacacacaggggtgttccccagaggagacacccggggacaaagagaaacaagaggggcgggagactcccccaccccacataaacaaagcggccgcgggggaaaccacgggcaccgccttccggaaacaaaaaccccaaggaggcgcgtcctcgagagaggcgcacaaacgggggggaccctcctccccagggggagcggcacaacaagaggagccccagaatctccaaaaaatacgcccccccgcgacgcgggggnnnnnnnnnnnnnnnnnnnnnnnnnnnnnnnnnnnnnnnnnnnnnnnnnnnnnnnnnnnnnnnnnnnnnnnnnnnnnnnnnnnnncacacaaaataatataaacaatccaaccccaacaacaacaccactaccactacacca

SEQ ID NO: 417613 - DNA, 992 bp, Homo Sapiens
  misc_feature (86)..(312): n is a, c, g, or t
  misc_feature (349)..(433): n is a, c, g, or t
aacattcatcgtagttaaaagatatatcagttatattaaatatcaaaccaattaattaattaaaacaattaagtacagtatcaggnnnnnnnnnnnnnnnnnnnnnnnnnnnnnnnnnnnnnnnnnnnnnnnnnnnnnnnnnnnnnnnnnnnnnnnnnnnnnnnnnnnnnnnnnnnnnnnnnnnnnnnnnnnnnnnnnnnnnnnnnnnnnnnnnnnnnnnnnnnnnnnnnnnnnnnnnnnnnnnnnnnnnnnnnnnnnnnnnnnnnnnnnnnnnnnnnnnnnnnnnnnnnnnnnnnnnnnnnnnnnnnnnnntatttacaagtaaataagttctatatcttgcttcagnnnnnnnnnnnnnnnnnnnnnnnnnnnnnnnnnnnnnnnnnnnnnnnnnnnnnnnnnnnnnnnnnnnnnnnnnnnnnnnnnnnnnattgaaaaagtgaatgagttttcaaatccaaatttgtcaacttgaaattttagatctgaggatgaatagcagtaagggagaaatttacaatatttagaattactccaagggtatatagtggtagggtatgtcttatagcatgaagctgtgtgaattcatctcaaggttgtctaggggctagattctacctgccgagtcaaacctgtgtataacccacagctgggatcacaaagacttggtgcccaaggaggggccacaatctggggcatccataggagaaggtcgaactgatacaaacctgtaacgaacgaaacccagtggcaccgaaaaagagtaagcaacactagaaatgagccgaagcgcgatcccggacgaggacgaaggcaaaaggaggagcacaggggcccgcgaaacacacgggagtacatgagcaccgaaaacgcggagcagacgagcaaccccggcgtggaaacacgacacagggcaggcagcagactgacacaagcagtcccgagagacaggcggtacacgagggaccacagcaagggacggaaagacg

SEQ ID NO: 417614 - DNA, 914 bp, Homo Sapiens
  misc_feature (167)..(175): n is a, c, g, or t
  misc_feature (295)..(308): n is a, c, g, or t
aactacctagttagtattttccacattgttcaagagctcttactttctgaaaaaaatacctaagtaacctcttctaaacaagttgtggtcacccagcaaggaaaagttttacctacactgcctgctgtgagggcaaattaaccagattcctgcattcttaatcaacnnnnnnnnncacagcaggttttacagagtatacaatgcatttatgcaggaatgttacactaattcctaatttcagtcaagcttccattcagtaaagcctaaagaagtaactggaggattgcgtaaactnnnnnnnnnnnnnnaaattcttttttgtattttggcgctcccgtttcgtttgtggaccgtaaaattccccgcaccttacgctaatcttttcgctttcgcttcgcaggagtgttgtgcaactgttatatagaaacgtgttggggaaattcaggcgaggaaaccgaaaaacgtgaggcgaaatcacccgtgggcaaaggaaaatcaggttcgcccgaggagcgaagtaagacacgactagcggggacaaacacgggtgaagaacgcgggagggatgcgaaagcgtgaaaattagaggaggacaatgtagcacgataacgacaaagacgcaacccggggagaccggcacagtgcgccggaaatacaccgggggaaaatatagatcgcgggaacacagcgctggacacggagtaaaacccatgcgcataatacatggtatagcatagtagcgaaaagggtagtacggcggccgcgcgttgcagatgcgaggcatcaacggtgaatctacggcaggcggcacgagggaagcgatctcggggacggcggcggcagccataggcggacgccgaaaagagcgtggagccgccgaaagatgcacgaagagagtatggcgagggccgcat

SEQ ID NO: 417615 - DNA, 992 bp, Homo Sapiens
  misc_feature (60)..(150): n is a, c, g, or t
  misc_feature (154)..(200): n is a, c, g, or t
  misc_feature (206)..(278): n is a, c, g, or t
  misc_feature (385)..(447): n is a, c, g, or t
attcaagcccggtttcagtaatggccgaattcccgggcatatgtccggtaccgtcgactnnnnnnnnnnnnnnnnnnnnnnnnnnnnnnnnnnnnnnnnnnnnnnnnnnnnnnnnnnnnnnnnnnnnnnnnnnnnnnnnnnnnnnnnnnntagnnnnnnnnnnnnnnnnnnnnnnnnnnnnnnnnnnnnnnnnnnnnnnncgcgtnnnnnnnnnnnnnnnnnnnnnnnnnnnnnnnnnnnnnnnnnnnnnnnnnnnnnnnnnnnnnnnnnnnnnnnnngagcgacccgcgaagacagcaggccgacgaacacaacagcacggagcacacaacaaccccgaccgccaacagacgcaccaccgaccaccccaacacaatacacacgnnnnnnnnnnnnnnnnnnnnnnnnnnnnnnnnnnnnnnnnnnnnnnnnnnnnnnnnnnnnnnngcaaccacgacgaactcactacacgccgcctccaacacacgatccacagaccacactacaagacacccacacagcggcggacgcaaggcgaccgcccgcagaccaatagagccgcagcatacaccaacaccaccacaccagcagaagcaacgccccgcagaaaacccgcaacagacagcaggcgcgcactagcacaaacagacaccgccccgcgagcgcacacgccggggagcagctcgcatcgagaacgaagcacaaacaacagacacgacacagccgcctgggccacgcagccgccacaaccaaggcgagagagacgcgaacggcgagccaggacccaggcatggaaaagaccagaagacaggaagagacgaaggcgcggccacgcccgagcccgaagcaagccacgaagagagcgacgaggggcgcgcgaaggcaccaggggcagagcgggaggagcccaagacagacacagcgagcagaacacacggcgcggcaggcagcgacgagaacccgcagcagcacgaacgacaggagacgcgcga

SEQ ID NO: 417616 - DNA, 992 bp, Homo Sapiens
  misc_feature (50)..(140): n is a, c, g, or t
  misc_feature (144)..(190): n is a, c, g, or t
  misc_feature (196)..(266): n is a, c, g, or t
  misc_feature (300)..(479): n is a, c, g, or t
  misc_feature (508)..(551): n is a, c, g, or t
cggccgtaatggccgaattcccgggccattatgtccggtaccgtcgactnnnnnnnnnnnnnnnnnnnnnnnnnnnnnnnnnnnnnnnnnnnnnnnnnnnnnnnnnnnnnnnnnnnnnnnnnnnnnnnnnnnnnnnnnnntagnnnnnnnnnnnnnnnnnnnnnnnnnnnnnnnnnnnnnnnnnnnnnnncgcgtnnnnnnnnnnnnnnnnnnnnnnnnnnnnnnnnnnnnnnnnnnnnnnnnnnnnnnnnnnnnnnnnnnnnnnnaagcgcggcgcgggaagggggcaggcaaaaggannnnnnnnnnnnnnnnnnnnnnnnnnnnnnnnnnnnnnnnnnnnnnnnnnnnnnnnnnnnnnnnnnnnnnnnnnnnnnnnnnnnnnnnnnnnnnnnnnnnnnnnnnnnnnnnnnnnnnnnnnnnnnnnnnnnnnnnnnnnnnnnnnnnnnnnnnnnnnnnnnnnnnnnnnnnnnnnnnnngaatacacacacagccgtaacctagagannnnnnnnnnnnnnnnnnnnnnnnnnnnnnnnnnnnnnnnnnnnaagaaaccagacaaagaaccacacggagaagcaacaaactaaagcgcggggaacaagacggagataagcagcacacacacagtacgcgagcacccaaccacaaaccaacaaacccaaaacagcacacaccaaaacagcgtagataagcaaccagaaacgacgaacgcaaaaaaagtaggaagaaaccacgcatgagtacacagaatacaaacgaacagaggaacgaagcagtagaaccacgaatgccaaaccaacaagaaacagagggaagaaggagcggaggagagacaatcgaaggaaggaacacaaaaaacagaaggaccaaagcaggcgggcgcacaccacaccacgacggaaacaggactacgacggagagcaacgaccgaacaacaaaacgacggcccgacagaaattaaacacaagagagccacgagaaaagac

SEQ ID NO: 417617 - DNA, 825 bp, Homo Sapiens
aaaagttatctccctcggtggtacttctctctctgtttttgccatttaaaaatgaacttttggctttatatatcctttgcactatgtcttgtctccatttcattatttatagctttcatttttacaaattgttccatttgttattttctagtttactttgatattcttttatatatttccttgactatttacttggctatttttggtcattcttttaaaatcaggtcttttaaaacatctactcttctaaattcactgacgttttgggtttgaccatattcaggaacttgcatttataaaagcaccctgaaattcttgaaggtttctttaaattaattacactattttctctttaactctttagcaatacaatttccaacataatattaatacattcactgctaaaacgctcacacttattgtttatattttcccagagaaacatcctcatcttccaatgaagtttctgtcatgccagaatgggatcacgagtctctttctttcaaacccaagagtctaacaccacataaattacccagagagctaccaaaaaattcagttacatcattctattttgtgggcttctgggtgtaagccagtgtcacttttcaaataggctgatatcctgtaggcttgagaaaaggcgaggtctcgttagtgtttatattcactaaagtatcttgctcgagccctggacaccgtagattctaggacactattgactctaggtgtctggtgaaacagtaggcctaaaaattgaggaatcccgttaatttatttgggcccagttaggatttattcttagacaactcgtacaccgatgtt

SEQ ID NO: 417618 - DNA, 622 bp, Homo Sapiens
  misc_feature (73)..(163): n is a, c, g, or t
  misc_feature (167)..(213): n is a, c, g, or t
  misc_feature (219)..(281): n is a, c, g, or t
ttagcagcgcgctcgcaccggggaggtttagtaatggccgaattcccgggcatatgtccggtaccgtcgactnnnnnnnnnnnnnnnnnnnnnnnnnnnnnnnnnnnnnnnnnnnnnnnnnnnnnnnnnnnnnnnnnnnnnnnnnnnnnnnnnnnnnnnnnnntagnnnnnnnnnnnnnnnnnnnnnnnnnnnnnnnnnnnnnnnnnnnnnnncgcgtnnnnnnnnnnnnnnnnnnnnnnnnnnnnnnnnnnnnnnnnnnnnnnnnnnnnnnnnnnnnnnnagggccagaggacgccagggcaagcgcaggagcagccgcgaccacgccagcaaagccagacagccaaccaatcacacaaaggagacacaacgatcacaagaaggaggccacagcgaagcagaacggcagcaggacagccgcagcaaaaaacaaacccgaccggacacacgccagcagcgaagtggagaacagatacccagcacacatgagacgtagaagcaaaaaccagaaaaccacggaccggaacccacgacagaccacagcacaggaccacgcgaccagccagcaccagagagcaaggcacacaaacagaccacgagaataccacccacgggcgctca

SEQ ID NO: 417619 - DNA, 810 bp, Homo Sapiens
gtttcttgcagtatcaattcagtggcattcagtacattcaccgtgttttacaaccatcaccactgtccagttccacaattttttcatcatccccaacagaaactttgtatccattagcaataactgcccattctcttctcccccacccctcattagcctttattctatcctctgtctatgaatttgcctattcagtggaattgtatattagtctttggaagtttagctgcctggcctctttcacttagtacaatgttttcaaggttcatctatgctgtagtatgtgtcagaacttaattccttttatggctgaatgatattctattttatggatataccacattttgtttatccattcatctatcgatggactcttgagttgcttctgctttttgtctattatgaatagtgttgctatgaagattcatgtccaagtatctgtttgagtccctgctttgagttctttgggtctatgcctagaagtggcaattgctgggtaactatgttttcttttcttgtctttctcttttgtgggccggagtctccctctttggccccggcgctggtctgccgtcggtgcgctcccggctctgaccttgaagccccggcctctcgtgggtctccaggtgattcctccttgcctttgcccttcccggagatagcggggactattcgcgcgtcgagccccctcgtcccggctgggtcttgcggcacttcctcaggtagcgaccgggtttgcccaattctggacgctgggcctgtctggacctcgtgcgcctggttgtcccgcggtctctgtctccctcggtg

SEQ ID NO: 417620 - DNA, 620 bp, Homo Sapiens
  misc_feature (390)..(437): n is a, c, g, or t
  misc_feature (460)..(522): n is a, c, g, or t
acacccacccgcggacgtaatggccgaatacccgggacatatgtccggtacccgtcgactgataacattcgatataaatgtatgcataatagagaacgattctgcgagcacgagtaccatcgatgcacatgactcgcagacgacacaggtccgtacgagcggaaggcgaggcaaaacgaacacaaatagagaagtcaggaataccaaaatctaatggccagcagacaaaacaacaccgattaccggcggaatcaaggataaccagacgaaatccaggagaatacacaacacagaaagaacatagtgagcaaaaggacaagcaggaaacaaacacgagagacaacacaacaagcaacaaaccacagcgcaacgcgaaaagacaccaacgtnnnnnnnnnnnnnnnnnnnnnnnnnnnnnnnnnnnnnnnnnnnnnnnngcgacgagtgaccagagcgaacnnnnnnnnnnnnnnnnnnnnnnnnnnnnnnnnnnnnnnnnnnnnnnnnnnnnnnnnnnnnnnngaagagatgacacaggagagcagtgaacacacagagcgccgacacacaacacgaaacagggcgaagaaaaagtggccaatgaaaacggaccactcgac

SEQ ID NO: 417621 - DNA, 813 bp, Homo Sapiens
  misc_feature (153)..(168): n is a, c, g, or t
  misc_feature (621)..(670): n is a, c, g, or t
agtcgacggtaccggacatatgcccgggaattcggccattattctagaggccgaggcagggccgacaatgatttaatggtcttagtgaatgctttcttcgatgtgtgtgagagcggggagacatgtttctagaggccgacgcgctaataagtnnnnnnnnnnnnnnnncaaactagcactggcgggacaaccggcggagaactagagaagaacacaacgaaaaaaacaacgcggcggcgagcggaagagcggccaacacgaagacacgagcggacgaagatggacggcaacgaggcgagagaggggcaccacacaaacgccccgccggggagcaaacacgggagatagaaacacgcgaacgcgacggtgcgaacaccccacgagcgaacacccaccggagcgagcgatacacacccacacgagagcgagagcgcgagcacaacaagacgccgcgagcacaccagacaccgccacaggcacacctacatgccgggagcgacggaaaacccgaccagacgcgcacgcagcgcacgacagagagacgacacacacagcgaggcaccacgcgagaagcaccggagtggagagggggataaccgagcgagtacaagaaacgccggnnnnnnnnnnnnnnnnnnnnnnnnnnnnnnnnnnnnnnnnnnnnnnnnnncgacccagacgcgcggcgatcgcaccgacacaaaaaagaacaggcactagcccaccaacaacctgatactaaaaatgaaaaaatcccctcgcacgaaaacaaaactcacaactacatacaattacgaatcgagagaggcgcca

SEQ ID NO: 417622 - DNA, 704 bp, Homo Sapiens
  misc_feature (50)..(164): n is a, c, g, or t
  misc_feature (172)..(233): n is a, c, g, or t
  misc_feature (612)..(620): n is a, c, g, or t
  misc_feature (631)..(639): n is a, c, g, or t
agtcgacggtaccggacatatgcccgggaattcggccattacggccgggnnnnnnnnnnnnnnnnnnnnnnnnnnnnnnnnnnnnnnnnnnnnnnnnnnnnnnnnnnnnnnnnnnnnnnnnnnnnnnnnnnnnnnnnnnnnnnnnnnnnnnnnnnnnnnnnnnntctccagnnnnnnnnnnnnnnnnnnnnnnnnnnnnnnnnnnnnnnnnnnnnnnnnnnnnnnnnnnnnnngtgtggggggcggccggggcccggaaaaatttaaaaccctgggtgtggggcgagcggggggcccacggagggaaagggaaacagggggcaccaagcgcgtggttcccccagagaaaaccccggggccaagaacacaaggggcgcgggggactttccccccacataataaaaagagcgcgcgcgggggggcaaccgcgcgagcgaggcgtgtctggagacacacaaaatctccccagagagaggggagagagtctgcgcgaagggagggctaaaccaaatgagcggagggacacaatctatatacaccagcgggggggagagctcccaacacggaagagaagcgcctcagcgaaatatatacaacacaatatatagcgannnnnnnnngccgcgggacnnnnnnnnnagcatgccaccacagcgcccaagctaagcgccaaccagacggaactacacaccaaccagccacaa

SEQ ID NO: 417623 - DNA, 701 bp, Homo Sapiens
  misc_feature (50)..(164): n is a, c, g, or t
  misc_feature (172)..(234): n is a, c, g, or t
  misc_feature (285)..(315): n is a, c, g, or t
  misc_feature (376)..(384): n is a, c, g, or t
  misc_feature (562)..(572): n is a, c, g, or t
  misc_feature (592)..(635): n is a, c, g, or t
agtcgacggtaccggacatatgcccgggaattcggccattacggccgggnnnnnnnnnnnnnnnnnnnnnnnnnnnnnnnnnnnnnnnnnnnnnnnnnnnnnnnnnnnnnnnnnnnnnnnnnnnnnnnnnnnnnnnnnnnnnnnnnnnnnnnnnnnnnnnnnnntctccagnnnnnnnnnnnnnnnnnnnnnnnnnnnnnnnnnnnnnnnnnnnnnnnnnnnnnnnnnnnnnnnggtgggggggcggccggggccccggagaaaacactttttaaaacacacatnnnnnnnnnnnnnnnnnnnnnnnnnnnnnnntaaggaaacacgtgggccaaaagcggggttcccaaaggaaacaccgggggcaaaaacaaannnnnnnnntctctctccaccacaaataaaaaacgcgccgcggggggagcaaacgcgagggggtctgtgaaaaaactcccaagagaggggagtccgagagaggggcccaaacgggggcctcttaccacaagggggccccagggaagaggccaaggatactcaaataatatacccgcccacgggcccnnnnnnnnnnnagcaactaacggcgcaggcnnnnnnnnnnnnnnnnnnnnnnnnnnnnnnnnnnnnnnnnnnnnaaaggcggagaaaccaagacaaaaaacaaagacacaactgaaggaggacaacggagacaaacacgg

SEQ ID NO: 417624 - DNA, 562 bp, Homo Sapiens
  misc_feature (205)..(205): n is a, c, g, or t
  misc_feature (434)..(491): n is a, c, g, or t
gaaaccctgtgtggcggcgcgcgcgcgctctcggcgccccctgagagaaagcgtttcctaaagaccacttccggttgggcgcgcgcgcggggcgcccaggtagcggtaacgggaacacctgtgggccaatacgcgggttccccaaaggagaaactccgggggccaaggagacaagcgggcgcgtgggagattctcctcacccaanatataaaaaagcgcgcacgcggggggggacaccgcgagaagcgcggtctcgtggagacaaaaatctccaagagaggggggaggtccgagagaggggcccaatagacgggggcactcttatatcaaagagaggggagctctccccagaggcgaggagaacgcgcgcgaaaatatctccaaaatttagaggcccccgcgaggccgcgggtggggaagaccagaaggcacgnnnnnnnnnnnnnnnnnnnnnnnnnnnnnnnnnnnnnnnnnnnnnnnnnnnnnnnnnntaggggacatcaccagaacaccacagaacaaacacaaaccaagaaccacagcgaccagacaacaagacgca

SEQ ID NO: 417625 - DNA, 547 bp, Homo Sapiens
  misc_feature (50)..(164): n is a, c, g, or t
  misc_feature (172)..(207): n is a, c, g, or t
agtcgacggtaccggacatatgcccgggaattcggccattacggccgggnnnnnnnnnnnnnnnnnnnnnnnnnnnnnnnnnnnnnnnnnnnnnnnnnnnnnnnnnnnnnnnnnnnnnnnnnnnnnnnnnnnnnnnnnnnnnnnnnnnnnnnnnnnnnnnnnnntctccagnnnnnnnnnnnnnnnnnnnnnnnnnnnnnnnnnnnncggtgtggggcgcgcgcccgcggcccccgcgaaaaagcttttctaaaaccattcgcgggggggcggcgggggcccaagtgagggaaagtggaaacatggggccaaaggcgtggttccctaagggaaacccggggccaaagagacaaaggggcggggagttctccaccaatttaaaaaaccgcccggggggaacccgagaggcggtccggagaacaatctcccaaaagggagaggccagagaggggccaatacgggggagctcttatctacacacggggaggccacaaggggagcgctcccgagatatacctcaaaaattatagcgccccccggggccccc

SEQ ID NO: 417626 - DNA, 537 bp, Homo Sapiens
  misc_feature (50)..(164): n is a, c, g, or t
  misc_feature (170)..(198): n is a, c, g, or t
  misc_feature (244)..(287): n is a, c, g, or t
agtcgacggtaccggacatatgcccgggaattcggccattacggccgggnnnnnnnnnnnnnnnnnnnnnnnnnnnnnnnnnnnnnnnnnnnnnnnnnnnnnnnnnnnnnnnnnnnnnnnnnnnnnnnnnnnnnnnnnnnnnnnnnnnnnnnnnnnnnnnnnnntctccnnnnnnnnnnnnnnnnnnnnnnnnnnnnngtgtggggggcgcgaccgggccccggaaaagattttaaacaccaannnnnnnnnnnnnnnnnnnnnnnnnnnnnnnnnnnnnnnnnnnnccaaaacgcgggtcccaaaggaaaacccggggcaagacacaaagggcgggggtttctccacccaattaaaaaacgcgccgggggggcacacccggagcggttctggacaaaatctccaaagggagccgggaggagacaaaaaacggggggacctcctatctcacacgagggaggcccaaagcggaaaagccccaagaattctccaaaatttaccgcccgcggaccgggggggaagcaccaaataaccaat

SEQ ID NO: 417627 - DNA, 616 bp, Homo Sapiens
  misc_feature (50)..(170): n is a, c, g, or t
  misc_feature (172)..(201): n is a, c, g, or t
  misc_feature (249)..(265): n is a, c, g, or t
  misc_feature (508)..(520): n is a, c, g, or t
agtcgacggtaccggacatatgcccgggaattcggccattacggccgggnnnnnnnnnnnnnnnnnnnnnnnnnnnnnnnnnnnnnnnnnnnnnnnnnnnnnnnnnnnnnnnnnnnnnnnnnnnnnnnnnnnnnnnnnnnnnnnnnnnnnnnnnnnnnnnnnnnnnnnnngnnnnnnnnnnnnnnnnnnnnnnnnnnnnnnttgggggggcgcgccggggccccgaaaaagttttcaaaaccacatgcnnnnnnnnnnnnnnnnnccccagtgggtaagagggaacccgggggccaaagcgggtctcccagagagaaaaccggggccgagagaacaagggggcggggatttccccccatttaaaaagagcgcccggggggacaccgcgaagggtttcggagaacaactcccaagaggggagagccgagaggcgccaacaacgggggcgccatactcaccggggagccccaaggggagaggcccgagaattctaaaattaaggcccccnnnnnnnnnnnnntgacgtatagggagaggagaagacagacaatcaaccagaacaagatccagggtgaacaacagaaaagaaacaaaaatagcaggaacacagaagacc

SEQ ID NO: 417628 - DNA, 478 bp, Homo Sapiens
  misc_feature (49)..(64): n is a, c, g, or t
  misc_feature (338)..(349): n is a, c, g, or t
gtgtggggggcgggccggggcccccggaaaagctttctaaaacacaacnnnnnnnnnnnnnnnnccccaggggagaaggaagaacgtgggcgcgcaaagcgcgggtccccaaaggagagaacccggggccagagagacaaaggggcggggagattctcccccaataaaaaaagcgcgccgggggggaacccgagagcggtttcttgagaaaatattctcccaagagggcgaggtctaggagagggccattaagggggcgctcttattacaacgaggagaggctcacaaggagagaggcccgagatatatctacaatatatatagcgcccccgggaccnnnnnnnnnnnnaccaaccgagaagttcagagtggagtgtgagagaacacaagagcccaacaaaacgaagacaacaacacgaagcgtagagcaaaaactagcagaccagcatacaacaacaaacacggcaacacagcaagg

SEQ ID NO: 417629 - DNA, 897 bp, Homo Sapiens
  misc_feature (72)..(111): n is a, c, g, or t
  misc_feature (149)..(432): n is a, c, g, or t
  misc_feature (438)..(468): n is a, c, g, or t
ttgatgtcatataggggctaggctcgtcgagcgaacgaccgagcgcagcgaagtagatgagcgaggaagcgnnnnnnnnnnnnnnnnnnnnnnnnnnnnnnnnnnnnnnnnagtcgacggtaccggacatatgcccgggaattcggccnnnnnnnnnnnnnnnnnnnnnnnnnnnnnnnnnnnnnnnnnnnnnnnnnnnnnnnnnnnnnnnnnnnnnnnnnnnnnnnnnnnnnnnnnnnnnnnnnnnnnnnnnnnnnnnnnnnnnnnnnnnnnnnnnnnnnnnnnnnnnnnnnnnnnnnnnnnnnnnnnnnnnnnnnnnnnnnnnnnnnnnnnnnnnnnnnnnnnnnnnnnnnnnnnnnnnnnnnnnnnnnnnnnnnnnnnnnnnnnnnnnnnnnnnnnnnnnnnnnnnnnnnnnnnnnnnnnnnnnnnnnngtcccnnnnnnnnnnnnnnnnnnnnnnnnnnnnnnngaggaaatatttaagcccgaagaattttgtttattaaggttcaccaatgagagggcgacaccacaaaaacctgggggtaagtgtgaaaaggggtgttatcaccccttgtgcagggcgtttccatagcggcgttgttgacccaggggaaattttacccacttgtggattctccccatttgagccaggatgtgaccctcttgtactacatttcacagggggggagcggcggagctacggcggcgcccgttttgaggagaccaagaacagtcgcaaacaggcaggtgggtgtactcacaaaagcgcctcaaacttggacgggagggccgagccaccctctgtgtgggggcgccgcaacagagaactcttctagcaccgaagacgataacaggggggaaccgggtctcggcaagcccccacaaggaagaagtc

SEQ ID NO: 417630 - DNA, 192 bp, Homo Sapiens
  misc_feature (70)..(114): n is a, c, g, or t
catgtgtgtggggcgcgcgcccgcggcgcctcctcggaagaaaagtttctcataagacaccaatctcggnnnnnnnnnnnnnnnnnnnnnnnnnnnnnnnnnnnnnnnnnnnnnccaaaacgtgtggtgtcccaaagaggagaactccggggccaagagagacaaggggcggggggatttcttcacccaaat

SEQ ID NO: 417631 - DNA, 768 bp, Homo Sapiens
  misc_feature (43)..(82): n is a, c, g, or t
  misc_feature (85)..(120): n is a, c, g, or t
ggaagagcttgtgtgatcctctagggcgctagctcgcgaatgnnnnnnnnnnnnnnnnnnnnnnnnnnnnnnnnnnnnnnnncgnnnnnnnnnnnnnnnnnnnnnnnnnnnnnnnnnnnnagtcgacggtaccggacatatgcccgggaattcggccattacgcgcccggcgccggcgtgtgaaggaagcatggcgagactgcgatagtatgacttcgaagaatggtactgccctgctgttcctggaggacctccaccattcgcccatcaccgatcatcagtgtggcgtcactgttctttcagagctgcgacctatcgaatcacaggctgcggcacgcctactctacctgaccaacattcagacgatgggcgcaagcttgttggacaacaccattccaatgctacacacgtactgacgacccacagatacgttatcctctgcgaagagccaccacagtcacacggcacaggacagcgacccaagagtcacacacacagacaacgctagataaggcacacaagacgctaggaacgccgtcgagcctatgacagcactgcatgcatacaacgagtgacatcattcacatgagcaccaacacgattacgacgtgtatggcgcaacgagacacgagcatattacatttacaaagaattgagaactcattatagcacttacgtgacattgatgatgaggacaagtacatgtaacagagtcagacagtgcatacaaggcaaagtaagatgatagaaataggcacacttgcaaac

SEQ ID NO: 417632 - DNA, 388 bp, Homo Sapiens
  misc_feature (84)..(119): n is a, c, g, or t
ccacggagtttttttgatatatatggggctagcctggcgagcgaacgacgagcgcaggagttcagtgagcgaggaagcggacgnnnnnnnnnnnnnnnnnnnnnnnnnnnnnnnnnnnnagtcgacggtaccggacatatgccccggaccttcgacaagctcgctagagcattcgtccgtagcgcggagccacttggtacacgtgaacatggtcataccatgtatcgtcatgacatcctgcgctcatcgcactatgtgcttgccactactcatcactactaaaacatcactccggagcacaacgcagcaacgatccagacaaaatccaagaatggcagtccatgcaccgacatatacagcactcgatccactcacggcatccaacccg

SEQ ID NO: 417633 - DNA, 1228 bp, Homo Sapiens
  misc_feature (44)..(168): n is a, c, g, or t
  misc_feature (170)..(243): n is a, c, g, or t
  misc_feature (345)..(397): n is a, c, g, or t
  misc_feature (476)..(504): n is a, c, g, or t
  misc_feature (631)..(790): n is a, c, g, or t
  misc_feature (833)..(895): n is a, c, g, or t
agtcgacggtaccggacatatgcccgggaattcggccatatacnnnnnnnnnnnnnnnnnnnnnnnnnnnnnnnnnnnnnnnnnnnnnnnnnnnnnnnnnnnnnnnnnnnnnnnnnnnnnnnnnnnnnnnnnnnnnnnnnnnnnnnnnnnnnnnnnnnnnnnnnnnnntnnnnnnnnnnnnnnnnnnnnnnnnnnnnnnnnnnnnnnnnnnnnnnnnnnnnnnnnnnnnnnnnnnnnnnnnnnaatgaccaccaccgcaaggaaacccgcggcccccacgccacgcccagtccacccgcggcacacaacagccaggaccaccaccgcgagcgacacacacggcgnnnnnnnnnnnnnnnnnnnnnnnnnnnnnnnnnnnnnnnnnnnnnnnnnnnnngcgaccgcgccgccgcgcggacccaccacgcgcactccccggccccgcgaaacaccagcccgccaccaaacccggccannnnnnnnnnnnnnnnnnnnnnnnnnnnncgggcgaaaccctcaacgcaccaacaaagcgggacgcaacacaacgcgagccaccgccccagcacccacatcaaccacacataccacaaccgacccaaccgccacccagggagcaaccacaacactnnnnnnnnnnnnnnnnnnnnnnnnnnnnnnnnnnnnnnnnnnnnnnnnnnnnnnnnnnnnnnnnnnnnnnnnnnnnnnnnnnnnnnnnnnnnnnnnnnnnnnnnnnnnnnnnnnnnnnnnnnnnnnnnnnnnnnnnnnnnnnnnnnnnnnnnnnnnnnnnacacgccgcggcgcacgacggaccccacccctccgcggcccgnnnnnnnnnnnnnnnnnnnnnnnnnnnnnnnnnnnnnnnnnnnnnnnnnnnnnnnnnnnnnnnggctgacagcccgcaccgcccgccagcaccaccaccgcgtcgacagagaaccaccctatcacacgcgagtcgacgacgagacggcgtggcactgcgcaccgcaccaagaagtaaccgactgatcaaccaacgacacgaacacgccaggagcagaaagcgccagccagtagacagcacacagacgcatccacgcccctcgacttcgccctggacggcacaacccagccactcgatatcaccaccatatccaccccgagcgacagagcaccacgaccagaccacaaacaagccgacgcagagcacgaccgccgccacgcgaccacagagccgctc

SEQ ID NO: 417634 - DNA, 1095 bp, Homo Sapiens
  misc_feature (66)..(101): n is a, c, g, or t
  misc_feature (151)..(266): n is a, c, g, or t
  misc_feature (272)..(316): n is a, c, g, or t
aattgaatatgggccaggcttaagcgaagacgagcgcaggagtatgatgaagcgaggaagcggcgnnnnnnnnnnnnnnnnnnnnnnnnnnnnnnnnnnnnagtcgacggtaccggacatatgcccgggaattcggccattacggccgggnnnnnnnnnnnnnnnnnnnnnnnnnnnnnnnnnnnnnnnnnnnnnnnnnnnnnnnnnnnnnnnnnnnnnnnnnnnnnnnnnnnnnnnnnnnnnnnnnnnnnnnnnnnnnnnnnnnntctccnnnnnnnnnnnnnnnnnnnnnnnnnnnnnnnnnnnnnnnnnnnnnttagggggttacttgccccttaaggtggaaccttcaaaccttccggggttcaacggcggaatcttctcggggctatagagccccccactagtagtgcgggggcacacccggggttcggtgtgccaactcagagtgcccgggccacgtttttggggctttttctgggaaacaaccgggggagtttcccgacccttgcgttggcggcccagggttgggggctcttggtacacttcctctggccccctcagggagtatgcgatcaacacccacacccttcgcggcgccccccagaatagggcccgcagtggcacccatctgacgtgcttgggacgccacccggtgggttctagggacgccgtgaggccctgaacacactctcctgtggcgcaagacccactttactcctcatgttctcacacaacgcctacgcttcgccaacacagcagctggcgcccaagtgcaacacgcccaccaggggggctgcacacgccgctcgacaatgccccacgggcaccgcggtgcgctaggcgccgtccaccgcaatacctgccccgagtaccacaacacacctgtcccgttccgctgtcacacagcgctctatcccgcgccgctaccactcactcaccgctcggccgccatccgagatacgcctccatgcacggcagcgaacccaacctgccccagtaaaccctgtgtagcggtacaacactgccgtgatgcgatccccgcgaaccgggcgacgacgcgtactcacgaccgtggagtacacaccgccgaac

SEQ ID NO: 417635 - DNA, 459 bp, Homo Sapiens
  misc_feature (49)..(182): n is a, c, g, or t
agtcgacggtaccggacatatgcccgggaattcggccattacggccggnnnnnnnnnnnnnnnnnnnnnnnnnnnnnnnnnnnnnnnnnnnnnnnnnnnnnnnnnnnnnnnnnnnnnnnnnnnnnnnnnnnnnnnnnnnnnnnnnnnnnnnnnnnnnnnnnnnnnnnnnnnnnnnnnnnnnngaccagatgagacaacacacaaaaaaccgtgttttgtggccggctctgcgacccagtagaaaagcgtttcctaaaacccattcgcgtggggcgcgcggccgcgagtggggaaacgtcaacctggggccaatagcgcggcgcccccaaggaagaaccggtgcacaagaataggtggcggggattcccccaccaaaataaaaacggccgggggggagcacgggcgtgttcgggaacaaacatcccacgtgtgcaggttccggacgacccaatcgagggg

SEQ ID NO: 417636 - DNA, 1404 bp, Homo Sapiens
  misc_feature (42)..(85): n is a, c, g, or t
  misc_feature (88)..(123): n is a, c, g, or t
  misc_feature (273)..(273): n is a, c, g, or t
  misc_feature (294)..(294): n is a, c, g, or t
  misc_feature (373)..(373): n is a, c, g, or t
  misc_feature (673)..(732): n is a, c, g, or t
  misc_feature (1071)..(1071): n is a, c, g, or t
cggggaagacgtttaatatcactatgggcctagcgtttaagnnnnnnnnnnnnnnnnnnnnnnnnnnnnnnnnnnnnnnnnnnnncgnnnnnnnnnnnnnnnnnnnnnnnnnnnnnnnnnnnnagtcgacggtaccggacatatgcccgggaattcggccagtgacccggcgcggaatgcattgctatcatcctattctgattcggtcgctacagagccctcgataggttcatgtctgaactctggccctattagccatgtttcccgataggnagaatcttcatgggtctctgnacatatgttgtcgtgagacctactgagcctaacctaacagagaaattgcccgcggtcgagtaaatgcggacgtccgatntcctttgtacactacaaacttactacgtagtcgttaccgatttccctggcacgagatcttatattaacttggcattcctttatttaccaaattcacgagaaagttacctcaacgtctggagggcttcggcagtattgcccagattctgacggttgcaattgacggtggggggagaatctctgagagtaagagaagtggtgaggatattgtgaacacttaactttatacctgggtaattggatacgttccccaattccttatattggtgaattgaaagagcggctcctttttaaagccagnnnnnnnnnnnnnnnnnnnnnnnnnnnnnnnnnnnnnnnnnnnnnnnnnnnnnnnnnnnngtgttgtgagttggggaggcgaaggcgacgcttgtagggaggcaccacctgtaggagggaaaacaggaggttctttgctattatgagcgccacacacattatcttgtagtgtgttgtcgagacgaggcacgaggaggggcgaccccaccagagtaggagtgtagtatagcagggtggtagaccaagcatttgtggcgacacatacaatagacgagcgggtagtgtcacccccataagagggaggagaaacctccgcgggggagcacccaaagcgcgacacacctataaacctgcaggacgcatagcagaaggagaaagactaaccctaatcaacaaccncacaaaagtatccagcaaaccaaaaagacgcgaccacaccagcgaggcagggaggagcaacaaacgacagagcaggaaagccacggtagtcgtacgagcaaagcacaccacaacgacaatctctacacctaagcgatgtagcggaggagaagcatcacgaccacagagagcgcagccgacaactcacacgcacgggagcagcaacacactcgatgataccagacccacacacgagggaagagatcccaaacaaaacgagcagcagcgacccgacatactaaccccatccaaccatgttacaacgccgcccccgcacgtcgccgcggtgggggg

SEQ ID NO: 417637 - DNA, 802 bp, Homo Sapiens
  misc_feature (46)..(77): n is a, c, g, or t
  misc_feature (81)..(116): n is a, c, g, or t
  misc_feature (154)..(275): n is a, c, g, or t
  misc_feature (292)..(344): n is a, c, g, or t
  misc_feature (603)..(603): n is a, c, g, or t
aagaaaaattgtaatacatatgggcctagctgttgagcgaaggaannnnnnnnnnnnnnnnnnnnnnnnnnnnnnnnccgnnnnnnnnnnnnnnnnnnnnnnnnnnnnnnnnnnnnagtcgacggtaccggacatatgcccgggaattcggccnnnnnnnnnnnnnnnnnnnnnnnnnnnnnnnnnnnnnnnnnnnnnnnnnnnnnnnnnnnnnnnnnnnnnnnnnnnnnnnnnnnnnnnnnnnnnnnnnnnnnnnnnnnnnnnnnnnnnnnnnntctccagaacaaaggannnnnnnnnnnnnnnnnnnnnnnnnnnnnnnnnnnnnnnnnnnnnnnnnnnnnctctgtggtgggcggcgccctgggcgccccttgaaaagaagcgttttttatagaacccaattgcgcgttgggggcgcgcgcgcgggccccccccagttttgggttactcccctgtcgcaccgcgtgtggcccaacgcgggtgtgctcccccaaacaggggaaaatctcccgcgggacacgaagagaactatagacgtgggtctgcggggattttctctccacaccactattagaaaaaagaacgcgccgcggggggggnaagcaacccgccggacgagtgttctgtggcaacaagatcattcccgagaatagggggaagctcagcgaggagggcgacccacgaagacggggacctctcatcacccaacaagcggggagttctcccacacaggggggaaacgtcccgtagatattgctacatattttaaccgccccgcgctactgtgtgggagtatgac

SEQ ID NO: 417638 - DNA, 447 bp, Homo Sapiens
  misc_feature (43)..(194): n is a, c, g, or t
agtcgacggtaccggacatatgcccgggaattcggccattacnnnnnnnnnnnnnnnnnnnnnnnnnnnnnnnnnnnnnnnnnnnnnnnnnnnnnnnnnnnnnnnnnnnnnnnnnnnnnnnnnnnnnnnnnnnnnnnnnnnnnnnnnnnnnnnnnnnnnnnnnnnnnnnnnnnnnnnnnnnnnnnnnnnnnnnntaaaactgaatatttgaattctcaataagaaaaaaggaagaataaacatagaaaaaagaacttttggggcggctctgggccgtcggaaaagtttcgtcaaccccaatggggtggggcgtcgaggagcgcccctggagcggtctacgtgctgcacactgtgtggtgcataaggagtgttactccaaaggggacaacccgcgggaacatgaacagataagagggagcgtgggggttatttccttccgccctaatt

SEQ ID NO: 417639 - DNA, 1046 bp, Homo Sapiens
  misc_feature (74)..(116): n is a, c, g, or t
  misc_feature (119)..(154): n is a, c, g, or t
  misc_feature (204)..(263): n is a, c, g, or t
  misc_feature (304)..(531): n is a, c, g, or t
cgtccacaacacacacgcaaccatcgcccccacagcacccctgtatcgatcactatagggccctaggtttttgnnnnnnnnnnnnnnnnnnnnnnnnnnnnnnnnnnnnnnnnnnncgnnnnnnnnnnnnnnnnnnnnnnnnnnnnnnnnnnnnagtcgacggtaccggacatatgcccgggaattcggccattacggccgggnnnnnnnnnnnnnnnnnnnnnnnnnnnnnnnnnnnnnnnnnnnnnnnnnnnnnnnnnnnnaaaagagcgtgggtggatcacattgaggctcagggttggannnnnnnnnnnnnnnnnnnnnnnnnnnnnnnnnnnnnnnnnnnnnnnnnnnnnnnnnnnnnnnnnnnnnnnnnnnnnnnnnnnnnnnnnnnnnnnnnnnnnnnnnnnnnnnnnnnnnnnnnnnnnnnnnnnnnnnnnnnnnnnnnnnnnnnnnnnnnnnnnnnnnnnnnnnnnnnnnnnnnnnnnnnnnnnnnnnnnnnnnnnnnnnnnnnnnnnnnnnnnnnnnnnnggaaacacacacacggaaacacaacaaggcactgtgaccctatcttgacggcctctccgcgcgcactgggtcacacttcacaccggggcctactacacccacgttcccgcactcttaacaaacttcagtgccgaggggcccccccttagtgtgtgcgccccattctcctgggtaccgacacagcccacaaccgtggccccgctgcatactttccctccaattgcgtgaggatacaggggccacaagggaccaaaaggcccaatcaaccccgggcaacccctaccgtgtcggacacaccccccacggggcacaccaacacacacagagacccactaccgcactaacacgaaccccaagagcacacttcacaacaccaacgaaggagacacaaaggggacaaacacaccaataacctagaacaacacccagggagaacaacgcgacagacagaccacaggggacacgcggccaaagcacaaccggaccacggacaaaggctagaacaacagacgcgc

SEQ ID NO: 417640 - DNA, 400 bp, Homo Sapiens
  misc_feature (49)..(154): n is a, c, g, or t
  misc_feature (172)..(206): n is a, c, g, or t
  misc_feature (267)..(279): n is a, c, g, or t
agtcgacggtaccggacatatgcccgggaattcggccattacggccggnnnnnnnnnnnnnnnnnnnnnnnnnnnnnnnnnnnnnnnnnnnnnnnnnnnnnnnnnnnnnnnnnnnnnnnnnnnnnnnnnnnnnnnnnnnnnnnnnnnnnnnnnngcgagaccccgttctccnnnnnnnnnnnnnnnnnnnnnnnnnnnnnnnnnnntttgggtgcgggccgccctcggggcccttggagaagagtttttaagaaacccattgggttnnnnnnnnnnnnnccccccaaagtggggtataggtgaaccacgtgtggcccaaaggcgggtgttccccaaaggaaaacccccggggggcccaggcaacaaaggtgcgttgggggaccttcctccaccaccatat

SEQ ID NO: 417641 - DNA, 1036 bp, Homo Sapiens
  misc_feature (50)..(177): n is a, c, g, or t
agtcgacggtaccggacatatgcccgggaattcggccattacggccgggnnnnnnnnnnnnnnnnnnnnnnnnnnnnnnnnnnnnnnnnnnnnnnnnnnnnnnnnnnnnnnnnnnnnnnnnnnnnnnnnnnnnnnnnnnnnnnnnnnnnnnnnnnnnnnnnnnnnnnnnnnnnnnnntaatgaggaggcacttattacacgggtagggtctgacaaacatacattagtgactaacaaacaatgacatagttttgctggctcagtgcgagtgtataaaaaaaatttaataacatggattatatgcgcgtcatgccgtcccgcacagagtacataggacaccacgttggtggatcgcctgtaacctgaacagcagcaattcgggggcagcaacacagagcccaggtggtgttcccccactcgtagaaacgaatcccgaccggtaacaacggcaacttggctttgcacacaccatcgcattggttggcgtatgcgcgggccgcacctagccggctggaacaagacggtggttccaagcgcagcgccatctcttttatgaataactctctcccgcagtgttcgtgcgaacattaccacgaagaatggtggcgtcaatacacttcagagagcagcaacaatatcttaatatcctttaaggacgtggtgcgtccaggccatccagatagcaaactgctttacggtacccctcttggggacacggtggacctctgtagattcttaactggaaagattatgggcatagaaccatggacagacctcacacggcattcatacgagaccctgctaataatttgttgatcatccagtagtctctcaagggaacctgctcatccctgggttccgttgtactcaacaccccaagtccgaaatattatgaccctcctatcaccaccatttaagcaaatcgacagggtcaactctccgttgacaccgagctaaacgtcgcgaacatgcgttacaacacagctaaggttactatcccaaactgtctattcctctgccaaaagctaccaacacg

SEQ ID NO: 417642 - DNA, 738 bp, Homo Sapiens
  misc_feature (44)..(86): n is a, c, g, or t
  misc_feature (90)..(125): n is a, c, g, or t
  misc_feature (175)..(290): n is a, c, g, or t
  misc_feature (295)..(331): n is a, c, g, or t
ccacagacacttgaatatccctattaagggcgctagcgtgttgnnnnnnnnnnnnnnnnnnnnnnnnnnnnnnnnnnnnnnnnnnnccgnnnnnnnnnnnnnnnnnnnnnnnnnnnnnnnnnnnnagtcgacggtaccggacatatgcccgggaattcggccattacggccgggnnnnnnnnnnnnnnnnnnnnnnnnnnnnnnnnnnnnnnnnnnnnnnnnnnnnnnnnnnnnnnnnnnnnnnnnnnnnnnnnnnnnnnnnnnnnnnnnnnnnnnnnnnnnnnnnnnnntctcnnnnnnnnnnnnnnnnnnnnnnnnnnnnnnnnnnnnnctttgtgtggcggccgctcttgtcccctcgtgaaaaacgttctttcaaacaacaaatttctgtttgtggtcggcgcggggcccaataattggtacgctggacacctggggccaatatgagggttttcccatcaaaggaaccatctccttgggtcacaaacgaagacgataagtgtggctgtggaatctctatcataccccgatgttaacaaaaacagagaccgcccacgtgtggagtgacagccccgaggaactggtttatgatacaacagaaatctccacacgagttagtatctctcgcaaggaatatcacagacggagcggcttccatttacgaacaaggggcatccctcaacagagcgcctcagaatccaacaattttaccccccccgacctaggggggacctg

SEQ ID NO: 417643 - DNA, 1596 bp, Homo Sapiens
  misc_feature (41)..(80): n is a, c, g, or t
  misc_feature (84)..(119): n is a, c, g, or t
  misc_feature (157)..(280): n is a, c, g, or t
  misc_feature (283)..(309): n is a, c, g, or t
  misc_feature (881)..(937): n is a, c, g, or t
ggcatttgactatcactatagggcctagctcgttgaagcannnnnnnnnnnnnnnnnnnnnnnnnnnnnnnnnnnnnnnnccgnnnnnnnnnnnnnnnnnnnnnnnnnnnnnnnnnnnnagtcgacggtaccggacatatgcccgggaattcggtcnnnnnnnnnnnnnnnnnnnnnnnnnnnnnnnnnnnnnnnnnnnnnnnnnnnnnnnnnnnnnnnnnnnnnnnnnnnnnnnnnnnnnnnnnnnnnnnnnnnnnnnnnnnnnnnnnnnnnnnnnnnnccnnnnnnnnnnnnnnnnnnnnnnnnnnncatttccggcgcgctttgacctctggagcaagcttttatataaccacaagcgtatagtggacgcccgagtgccacgagagagataacatggcacactgtggcacaaataccccagtgaataccaaaagggagaacactccgtggcaaataggcacatcataagtgggcatcatgcgaaatattcatcacacacacgatactataacaaaaccaacgcacccggtgtgtgtggtaaaaaactcacgcaagcacattaacgtggtggcacagaaaaaatctcacaaacattgtacgcagcattccgtagcacgcatccaactctcctctggggcacctcccatgatcttcaaccacaagaggaagagactatcacacaacaaacggagaaacagacacaacgagaaaaaaaccgaaagagaatctataaagacgcccacacaggcacgtatgtgagggagggacaacaacgcaaggcaagcacaagcaccaagacagaccaggacaacgataatgacatgacagactagcgaaagacacagcaagtcaaagaagacgagacgacgggaacgcgnnnnnnnnnnnnnnnnnnnnnnnnnnnnnnnnnnnnnnnnnnnnnnnnnnnnnnnnncgggagcgggagcaggacagaaggcagcgaacgacgcgaccacgtggatcgagaagcgccagacacaagaagaacagggaggaaggcagagactaacacgccacgacgcgtcgcacctaaggaacgacgagtcggcacagaggtcgatcccaaagcggaagacagaggaggactaatagagttgtccaggactaacagcaggtcataggaacacgcgaaagcaagaagagcagacaagaggaaaacaagagggtaatagagaggaaaggagcagcgacgacgcactacgaggagaacaatcgacggaggatgaaacgagacgcagaacgcttccgcgatgaatcagtaaggagcacagacaacgcagaaaactgcagggcagccgaagggcaacgaacaggagcatgcgacgaacacagaaggagacagacgagcgatgacggagacgcaaccagaccgcaggagcgaacactgagctagacgcacggcgcagaactccgcgcgcgcggggaggaacgacaggggagagagcagaactcgaccgaggagagagtacgagacgagacgagacagcacgcctggcagatgagacccacaggggacgaccgagatccagcaccgacgcagcccggcggaggcggagcaaagaggcagaccac

SEQ ID NO: 417644 - DNA, 922 bp, Homo Sapiens
  misc_feature (42)..(83): n is a, c, g, or t
  misc_feature (86)..(121): n is a, c, g, or t
  misc_feature (171)..(456): n is a, c, g, or t
cggagagaggacagactgatatcatatgggcctagcctgtgnnnnnnnnnnnnnnnnnnnnnnnnnnnnnnnnnnnnnnnnnncgnnnnnnnnnnnnnnnnnnnnnnnnnnnnnnnnnnnnagtcgacggtaccggacatatgcccgggaattcggccattacggccgggnnnnnnnnnnnnnnnnnnnnnnnnnnnnnnnnnnnnnnnnnnnnnnnnnnnnnnnnnnnnnnnnnnnnnnnnnnnnnnnnnnnnnnnnnnnnnnnnnnnnnnnnnnnnnnnnnnnnnnnnnnnnnnnnnnnnnnnnnnnnnnnnnnnnnnnnnnnnnnnnnnnnnnnnnnnnnnnnnnnnnnnnnnnnnnnnnnnnnnnnnnnnnnnnnnnnnnnnnnnnnnnnnnnnnnnnnnnnnnnnnnnnnnnnnnnnnnnnnnnnnnnnnnnnnnnnnnnnnnnnnnnnnncaaacaaaacaaaccaccttttaaaatacctggacacgtctacgggactggttctgtctgacacatctctatgttacaatccctggtagcagtctcttaaatcatctcgaaatcttaaggaaaacccactggtgtgtggccataaagggacacaccttgtacacctcaacaatttaatgcggttacaagatgcggaccatacaaaccaaatccaatctggtcggcaacattattggctgggctggtccaaaaaattacccagataggataagatttaatcaactccctggtgatggcacatgtggtacatcctagggccaagtattggaggctttcttggaggaaacaaattaccttttaaattgtggtcctggtggacttcctaccatcaaggtgacacatagggggctcaatggaactgtcttaggaaaaaggtcactttgaaggtacaaaaataagagcgtta

SEQ ID NO: 417645 - DNA, 677 bp, Homo Sapiens
  misc_feature (53)..(94): n is a, c, g, or t
  misc_feature (98)..(133): n is a, c, g, or t
  misc_feature (176)..(264): n is a, c, g, or t
cgggagaaggaagaaaagacgtgatagtactatagggcctagcgttgttgagnnnnnnnnnnnnnnnnnnnnnnnnnnnnnnnnnnnnnnnnnnccgnnnnnnnnnnnnnnnnnnnnnnnnnnnnnnnnnnnnagtcgacggtaccggacatatgcccgggaattcggccattacnnnnnnnnnnnnnnnnnnnnnnnnnnnnnnnnnnnnnnnnnnnnnnnnnnnnnnnnnnnnnnnnnnnnnnnnnnnnnnnnnnnnnnnnntttaacaggttaaaaaactacacctggagtaaaagattagggggaaatcattggagaattaaacgaggcaagaaagacttaagaacattggcgttctgatattataaaagaaaactatcactttttagcggccctttcttcccgatacttccacttcttgccctgtccacggggatctttggcgatcctggggggtttggctccacgattttctgcaccctcttctttttctctgatacgcgggcggggtcatctcacgcatttatatactatttgtgcggaggagaaacccgtgaggggaggacccggtgggaggcaccgtgggcgccatttgggaacctgcacctgcacggggagaataatcacagctgtgggccgaaaaaccctttacacccttgtggcgctatcacagg

SEQ ID NO: 417646 - DNA, 1274 bp, Homo Sapiens
  misc_feature (81)..(116): n is a, c, g, or t
  misc_feature (165)..(278): n is a, c, g, or t
  misc_feature (332)..(357): n is a, c, g, or t
  misc_feature (526)..(536): n is a, c, g, or t
gaaagcttgatgtcctattgggcctagccttctgggccgaacggaccgagcgcaggagtatgtgagcgaggaagcggccgnnnnnnnnnnnnnnnnnnnnnnnnnnnnnnnnnnnnagtcgacggtaccggacatatgcccgggaattcggccattacggccggnnnnnnnnnnnnnnnnnnnnnnnnnnnnnnnnnnnnnnnnnnnnnnnnnnnnnnnnnnnnnnnnnnnnnnnnnnnnnnnnnnnnnnnnnnnnnnnnnnnnnnnnnnnnnnnnnntctccagcaacaggaagcacaaacaacaaacacaacaagagacaagaggacccnnnnnnnnnnnnnnnnnnnnnnnnnntgtgtgggggcgagcgcggccccggaaagaagatttttaacagaaccactggttggggggcgagcggagcccaaggtgggaagagggcaccacacggggcccaacggcggtcccacaaaggaaacacccggggcaacgaacaagagcggggggtggggttcccacaccnnnnnnnnnnncacgcgccggggggcgacacacgcagggtgttgtggacaccacaaccaccaagagggagagttcagggcggagcacacaagacgtgctctctacacaaagacgaggagggacaacaggagccagcgcagaatataacaaaatatacgccccgagcagcgtgagaagtagacacgaacaagcaagaacgagcaaagtacagacaacgatcagcagccggtcagagagacagcagtaccaagacagtagagctcagatcagagaagcagcagcacaacaacagaagaaccaagacgcaacagccactagagccgaacacgaagacgagaaacgcagacactgcaaagagaagagagcatggcaacagcaacgaacaagccgagacaagcaacaggacggagagagcacaaacagaacgacagcagccaggaagcagacgatagcacacacaagcagaacagagacagacaagagcgcacagtcaccaacagagaagagagcagcgcgagacaaactaggaccagcgagagcacaaagaagagacagaacaacgagcgacagacgaaacacgtacgaaacgaagagacagcgggagagaacaagaacaaatacagcaagagccaagcaagaagggtagaaaagcactagcccacccgcaggagaaccagagcaagcagcagcagacaacgagaaggcgcaagcgagcaaacaagagagcaagagcagcagaggagagaacg

SEQ ID NO: 417647 - DNA, 1214 bp, Homo Sapiens
  misc_feature (75)..(111): n is a, c, g, or t
  misc_feature (161)..(296): n is a, c, g, or t
  misc_feature (933)..(975): n is a, c, g, or t
aagattgtattcatattagggcgctactgttgagcgaacgacgagcgccagcgagtatgtgagcgaggaagcggnnnnnnnnnnnnnnnnnnnnnnnnnnnnnnnnnnnnnagtcgacggtaccggacatatgcccgggaattcggccattacggccgggnnnnnnnnnnnnnnnnnnnnnnnnnnnnnnnnnnnnnnnnnnnnnnnnnnnnnnnnnnnnnnnnnnnnnnnnnnnnnnnnnnnnnnnnnnnnnnnnnnnnnnnnnnnnnnnnnnnnnnnnnnnnnnnnnnnnnnnnagaaagaccacaaaacacatcttgtgcgggcgccggccctgggcccttagaaagggttttttcaacacacatcccggttgggcgcgcgggcggcgcccaggtaggtataggtgaacctcttgggccacataccgctgtaccccaaggagaagcccggggcacacaccaaccagggcggtggagttctcccccaattagaaacagcgccccgtggggggcacccgaggcgcgtttagaaacaaccccaggagggggggtatcgcaggagggccaacacacggggggaccctaaaacacaagcgagggagctcaccaaagcgggacgccgggatattataaaaattaagacgccccccggcgcggtgtagtaaagtcaaaccgaagatgccaagatcgacagacgaaaaagaccgtcgacatgcgcgagacagcaagaacacaacgaacaaacaagcacacagatcaatcaatagaggcgaaagcaccatgaaagaagaatgaacgagacgtcgaagaactgcgacacaaacacagaatgacgaaagcgcacacaacagcgaaagaagataccaagcacagaacaagcggcagagaagtgcggacaaaggggagcagaaaacaccacggagaaggagcnnnnnnnnnnnnnnnnnnnnnnnnnnnnnnnnnnnnnnnnnnntaatacaagtaaacgacaacatataaacgcaaaagaagaggactaggggagtaaagagagcaacaatagtaagaaatacagagaagtggaagataagtagggaaagtcggtaaaaagcaaatgagaaacgtaagtgatctatgatgagacagtaaccgaggagatatatacttacaagatatagtataggtaaaacgtaggaacgactaaagagaaaacagatcgagaacgtagatgag

SEQ ID NO: 417648 - DNA, 1121 bp, Homo Sapiens
  misc_feature (50)..(175): n is a, c, g, or t
agtcgacggtaccggacatatgcccgggaattcggccattacggccgggnnnnnnnnnnnnnnnnnnnnnnnnnnnnnnnnnnnnnnnnnnnnnnnnnnnnnnnnnnnnnnnnnnnnnnnnnnnnnnnnnnnnnnnnnnnnnnnnnnnnnnnnnnnnnnnnnnnnnnnnnnnnnnggatcagaaacaaaataccaaatagcaagggcaaggaacaataaaatgaaatcaatcaaacaaaaaactgtgtgtgtgcggcggcttgcgcccggagaaaaaagattttgaagaagcccattttggttggggggcgccgggcccccccgaggtgcataaggcgaacacacgtggggctctccggcgggttccccaagagaaaaccccgggctctcggagacaaaaagggggtctggggttttcaccccaaattaaaaaaacgcgcgggcggggcaccaaggcggtggtctggaagaacaaccccaaggggggggtccacgggcgggcaaacaacggggacgcactaccacagggggtcggcccaagggagaggcgcagatctacaaaattttagacgccccgcgccggaggggggtaaacagcagatacctagacagaccactaagcagcacggaacggtcgacggacaccagctacgacgaccaagacaggcgagtagacagcgacacatagcaggacgacgcagagcacacaaacaacaacggatgcacaatagcggcccaaaaagagacagcagcgcaagcgaaggaacaaaggagacgtcaacgagcggcaagaccgcaacagagagcaagagcagcaaaaaacacacaagagggagagatgacaccggtgaagagggcacaacgcacacacgaattgaacgaaagacagagagaaaggagacgatgaggaggcggggaataacatgcagactgcagacttgagagcgcaaggcggtgcaatagtcaaagccccgacgacgcgaagaatgcatagaggcagacctcacgaagaggcgaacccagataaaaacgggaactagccgagacgctgacgaacacccgagcgatagtgaccgcgagaagaaacgagtgcagaagaacagcacaggatcggcgacaga

SEQ ID NO: 417649 - DNA, 396 bp, Homo Sapiens
tttggggggcggccgcctgggccccggaaaaagttttaagaacccattctggtggggcgccgcggggcgccccagatagtcgtctagctgcgacagcaccgtgtggccctaaaccggggggtctcccccagagagaaaaaaccggcgggtgcccagagaacacagagagcggccgggtggaatttctcccaacccccaaaattaagaaaaaaggcgccgcgggcggggggaacaaccgcggaggtggtttcgtggcaccacaactatcccagacggggggacggttccgagaggagccacaaacgcggcgggcgtcctctaacaacgacggggggcgtccccaacggcgacagcctccgaatattacaaaaataatgccccgcggcgcggggggga

SEQ ID NO: 417650 - DNA, 787 bp, Homo Sapiens
  misc_feature (45)..(84): n is a, c, g, or t
  misc_feature (88)..(123): n is a, c, g, or t
  misc_feature (173)..(286): n is a, c, g, or t
  misc_feature (299)..(369): n is a, c, g, or t
  misc_feature (430)..(447): n is a, c, g, or t
  misc_feature (552)..(560): n is a, c, g, or t
  misc_feature (592)..(602): n is a, c, g, or t
aagccaggaccgtgataatcatatagggcgctagctctccgaggnnnnnnnnnnnnnnnnnnnnnnnnnnnnnnnnnnnnnnnnccgnnnnnnnnnnnnnnnnnnnnnnnnnnnnnnnnnnnnagtcgacggtaccggacatatgcccgggaattcggccattacggccgggnnnnnnnnnnnnnnnnnnnnnnnnnnnnnnnnnnnnnnnnnnnnnnnnnnnnnnnnnnnnnnnnnnnnnnnnnnnnnnnnnnnnnnnnnnnnnnnnnnnnnnnnnnnnnnnnnngttcctcccaggnnnnnnnnnnnnnnnnnnnnnnnnnnnnnnnnnnnnnnnnnnnnnnnnnnnnnnnnnnnnnnnnnnnnnnngttggtggggcggcggcccgggcgcccggagaaaagggttcaagaagaccacttcggagannnnnnnnnnnnnnnnnnccccacagagtgagaggataagcgcgagccactgggtcggcaacaaacgggggaggccccacaaaggaggagagaacccggggggagacagagagcacaagcgcnnnnnnnnntttccctcccaaatatataaaaaaacggcccnnnnnnnnnnnagacacgcggagagggggggctttgggggaacaaactctcccggaaagaggggagcgctccgcaggcagagcgagcaaaagcagggggggcgaccaccaccatacacagcagagggggggcgtcccaaaaacaggacgagagagccgcggaaaatattataaaatattagcgccccgggcgcggc

SEQ ID NO: 417651 - DNA, 822 bp, Homo Sapiens
  misc_feature (78)..(113): n is a, c, g, or t
  misc_feature (163)..(275): n is a, c, g, or t
ggatgtgatgatcatatagggcgctactttttgagcgaacggacgagcgcaaggagtagtgagcgaggaagcggccgnnnnnnnnnnnnnnnnnnnnnnnnnnnnnnnnnnnnagtcgacggtaccggacatatgcccgggaattcggccattacggccgggnnnnnnnnnnnnnnnnnnnnnnnnnnnnnnnnnnnnnnnnnnnnnnnnnnnnnnnnnnnnnnnnnnnnnnnnnnnnnnnnnnnnnnnnnnnnnnnnnnnnnnnnnnnnnnnnngaccccgttttctccaggaaacaaggggcgaacaacacaatagaccaaaaacaacaccaagaccgaaaacaaacacacaacatgcagtagcccatgtaaacacacaccagttgtgtcgggagcgcagcacctgcgccctactagaaaaaaacacgccttcttattaaacccacatttctggtttgtggcagccgcgccgggctccccaagaatagtgacttcagtcgtcacaccgttgactgaccacaacggcgcgtgtacccccaacagcgagcacacaccccgtgcggcacaatgcgacatcagagttgccttggggaattcctccccacccgaatttcgaagacaaacccgccccccgcgtgtggggaaacacagccccagagagcggtcttctggggaaaaccaaccatttctcccgcagatggtgtgcccagtcttctctcgcggaccactccccacttcgcgcctggggggcttctttcttcatcaccaaccgcggcggatggtctcccaccagtctgccgcaatccccgtggtattaaat

SEQ ID NO: 417652 - DNA, 773 bp, Homo Sapiens
  misc_feature (50)..(314): n is a, c, g, or t
  misc_feature (316)..(345): n is a, c, g, or t
  misc_feature (414)..(436): n is a, c, g, or t
  misc_feature (596)..(604): n is a, c, g, or t
agtcgacggtaccggacatatgcccgggaattcggccattacggccgggnnnnnnnnnnnnnnnnnnnnnnnnnnnnnnnnnnnnnnnnnnnnnnnnnnnnnnnnnnnnnnnnnnnnnnnnnnnnnnnnnnnnnnnnnnnnnnnnnnnnnnnnnnnnnnnnnnnnnnnnnnnnnnnnnnnnnnnnnnnnnnnnnnnnnnnnnnnnnnnnnnnnnnnnnnnnnnnnnnnnnnnnnnnnnnnnnnnnnnnnnnnnnnnnnnnnnnnnnnnnnnnnnnnnnnnnnnnnnnnnnnnnnnnnnnnnnnnnnnnnnnnnntnnnnnnnnnnnnnnnnnnnnnnnnnnnnnncaattgttgggggccggcttgggcggcgatcgagaggaagaaggggttttctaaaagaccccatctcgnnnnnnnnnnnnnnnnnnnnnnncccccataggatacgtggaaaacggaaaccactgtggcgcaccaaaagagggggtgtcccacaagggagaaggacccccggggcgacaaacagaacaacaaaggggggcgcggcgggagtttcttcctcacaccccaagtatataaagaaaagggcgccnnnnnnnnnacaacaccacgggaggcggtgttcgcgagaccacaaaaactccccaggagaggggggcagctccaagagaggggcgcccataaaacaggggcagcttaacatcacaacaacggggaggggctccaaaaggggcgaggcggcccggaataatcaaaaatattaagcgccc

SEQ ID NO: 417653 - DNA, 1105 bp, Homo Sapiens
  misc_feature (49)..(185): n is a, c, g, or t
  misc_feature (196)..(224): n is a, c, g, or t
  misc_feature (526)..(526): n is a, c, g, or t
  misc_feature (587)..(659): n is a, c, g, or t
  misc_feature (722)..(808): n is a, c, g, or t
agtcgacggtaccggacatatgcccgggaattcggccattacggccggnnnnnnnnnnnnnnnnnnnnnnnnnnnnnnnnnnnnnnnnnnnnnnnnnnnnnnnnnnnnnnnnnnnnnnnnnnnnnnnnnnnnnnnnnnnnnnnnnnnnnnnnnnnnnnnnnnnnnnnnnnnnnnnnnnnnnnnnnccaaagagacnnnnnnnnnnnnnnnnnnnnnnnnnnnnncactgtgtgtggggcgcgcctgggacccggaaaaaggttttttaaaacccattcgcttggggcgcgcgcgggcccccagtagggttaggggaacactgtggcccacaagcggtgtccccgaagagaaacccgcggcgccatgcacacaggcggcttgggtttccccccaaataaaaaacgcgccgcgggggaaaccacagggcgcgtttctggggaccacaactttcccgagagtggcagcgtgcctgagaggcgaggccaaatcaagggggcgctgtatcacacaacagggaggtgcccanaaggcgagagggtcacgatatattcaaaaattaaaccgccgccggcacggaggtgagtagnnnnnnnnnnnnnnnnnnnnnnnnnnnnnnnnnnnnnnnnnnnnnnnnnnnnnnnnnnnnnnnnnnnnnnnnntctctactaccgatcagcgtcaaacgacgaggacaacgacgtgacaaagatgacagacagaannnnnnnnnnnnnnnnnnnnnnnnnnnnnnnnnnnnnnnnnnnnnnnnnnnnnnnnnnnnnnnnnnnnnnnnnnnnnnnnnnnnnnncgagcacgaacaggacagcacagctgagagaagagaaaacaagacaggaacgacaacacagacaaaacagaagacagcgaagcagatagacaagagattgaaacgacactatcgacagccagcatcacaccacaacgacagcacgaacagaaggcataggacacacgagagacacaagacaaactcaggcacacaaacacaaccagcagaagaagagagaggagaacgacagacaacacacacagcaacagagcacgacgcacgaaagcaatcggagactacgtcccatacacacac

SEQ ID NO: 417654 - DNA, 999 bp, Homo Sapiens
  misc_feature (66)..(101): n is a, c, g, or t
  misc_feature (138)..(717): n is a, c, g, or t
ttatagaatataggccctcggttagcgaacgacgagcgcagcgagtagtagcgaggaagcggccgnnnnnnnnnnnnnnnnnnnnnnnnnnnnnnnnnnnnagtcgacggtaccggacatatgcccgggaattcggcnnnnnnnnnnnnnnnnnnnnnnnnnnnnnnnnnnnnnnnnnnnnnnnnnnnnnnnnnnnnnnnnnnnnnnnnnnnnnnnnnnnnnnnnnnnnnnnnnnnnnnnnnnnnnnnnnnnnnnnnnnnnnnnnnnnnnnnnnnnnnnnnnnnnnnnnnnnnnnnnnnnnnnnnnnnnnnnnnnnnnnnnnnnnnnnnnnnnnnnnnnnnnnnnnnnnnnnnnnnnnnnnnnnnnnnnnnnnnnnnnnnnnnnnnnnnnnnnnnnnnnnnnnnnnnnnnnnnnnnnnnnnnnnnnnnnnnnnnnnnnnnnnnnnnnnnnnnnnnnnnnnnnnnnnnnnnnnnnnnnnnnnnnnnnnnnnnnnnnnnnnnnnnnnnnnnnnnnnnnnnnnnnnnnnnnnnnnnnnnnnnnnnnnnnnnnnnnnnnnnnnnnnnnnnnnnnnnnnnnnnnnnnnnnnnnnnnnnnnnnnnnnnnnnnnnnnnnnnnnnnnnnnnnnnnnnnnnnnnnnnnnnnnnnnnnnnnnnnnnnnnnnnnnnnnnnnnnnnnnnnnnnnnnnnnnnnnnnnnnnnnnnnnnnnnnnnnnnnnnngttcctataggaggcccattgggatatttcaccggcgggcttatccggggcattgccttccacttagagtttccgtgaatcctgtaagaaaccaaaaatgcgtgagagcacattatacagaattcggcggaggaaagccgcagagaaacggcattctggggtctggtcaggtgagtcctgtcaaagagtcttaaaactttcgttctgtgttcgagaaagcacactgtgtgttgcacactgttaacgacgagacttgtgacgatgtgaatatacgagactaac

SEQ ID NO: 417655 - DNA, 566 bp, Homo Sapiens
tttgtggggggcggctgggaaaaagtttttaaaccttgcggttgggcggcggggggccccaaggaaggggtatgggcgaccttggcgccaaaaagcgctggccccaagagggaagatccgtggcgccagagaacaaagcggcgcggggttttccccccaaaataaaaaaagcgcgccgggggggaagccccggggtggttcttgggaccacattcccagaggggcgcggccgggggcataccccggggttcctaaccacagggggcccaagggaacgcgaaataaataggccagcgcggggaacaacgccacgagcaccacaaacgggctaacccgacgcaccgagagacaggcgaacacacgccccacagcgcgggacccgcccaacagcgagcagacgcaacactgcagccaaaaaggacaataccgcgactagcaccgaacacacacagaacgcccccacagctggacgcaccatcgcacacctcagccaaatacggcgatcacgacagcaacaagcggaacgcgacaactcgcgcggacacaaggtacacccaccgaccaca

SEQ ID NO: 417656 - DNA, 816 bp, Homo Sapiens
  misc_feature (43)..(87): n is a, c, g, or t
  misc_feature (91)..(126): n is a, c, g, or t
  misc_feature (176)..(294): n is a, c, g, or t
  misc_feature (296)..(318): n is a, c, g, or t
gacaaagcagaacttggatatcactatagggcctagcgcttannnnnnnnnnnnnnnnnnnnnnnnnnnnnnnnnnnnnnnnnnnnnccgnnnnnnnnnnnnnnnnnnnnnnnnnnnnnnnnnnnnagtcgacggtaccggacatatgcccgggaattcggccattacggccgggnnnnnnnnnnnnnnnnnnnnnnnnnnnnnnnnnnnnnnnnnnnnnnnnnnnnnnnnnnnnnnnnnnnnnnnnnnnnnnnnnnnnnnnnnnnnnnnnnnnnnnnnnnnnnnnnnnnnnnncnnnnnnnnnnnnnnnnnnnnnnncactttgttgggccggccttgggcccttggaaaaagcttttcttagaaccaattccggtttgggcggcggggggcccaggttgggttacagtgtggacactgtgggccaaataaggcgtggtgtcccataaggggagaacccgtggcgccaatggacataaggtggcgtggggtattcttccaccaatataaaaaacgcgcccgggggggcaacaccggagcggtcccgtggacacaaacatctccaaagattggggaggtcccagagagggggccattacacgggggacctctattcaacacgagggaggctccaaggcgaaagaccgcgcgaaatttatctcaaaaatttttaggccccgcgagcacgtcggtgggggggccagggggaaacaaaagcagggagcgagacgaggccaaaaacacaacaggcatgagaacaggaggggcgcacgcagaacacaccaccacgagagatggtcacgatagctaaccgag

SEQ ID NO: 417657 - DNA, 759 bp, Homo Sapiens
  misc_feature (80)..(115): n is a, c, g, or t
  misc_feature (165)..(281): n is a, c, g, or t
  misc_feature (289)..(368): n is a, c, g, or t
agactgatgtcatatagggcctagcgtgtagcagcgaacgacgagcgccagcggagtctagtgagcgaggaagcggccgnnnnnnnnnnnnnnnnnnnnnnnnnnnnnnnnnnnnagtcgacggtaccggacatatgcccgggaattcggccattacggccgggnnnnnnnnnnnnnnnnnnnnnnnnnnnnnnnnnnnnnnnnnnnnnnnnnnnnnnnnnnnnnnnnnnnnnnnnnnnnnnnnnnnnnnnnnnnnnnnnnnnnnnnnnnnnnnnnnnnnntctccagnnnnnnnnnnnnnnnnnnnnnnnnnnnnnnnnnnnnnnnnnnnnnnnnnnnnnnnnnnnnnnnnnnnnnnnnnnnnnnnntctggtgtgggggcgccggcctgcgcgcgccccactgagagaaaagtttttacaaaacaccaacttcgtgtgtgggggcgggcggcgggccccccacatagggtaggcgtgaccaccggcgggccaacagccgtgtgtacccaggagaaagagacagccccgcgggccgaacgggccacaagtgcgtggccggcggggctgtcctcccccccaaataaaacagacagcgcgcgcgcgggggcggcaaaccacgagaggtcgtctgtcgtgcgataccacaaacccccagacagcgacgcactccgcgggagagcgacaccaaacgagggggcctccttccatcaccacgggggggttcacccaaaggccgggacggcccaccgaatgattc

SEQ ID NO: 417658 - DNA, 1074 bp, Homo Sapiens
  misc_feature (46)..(90): n is a, c, g, or t
  misc_feature (94)..(129): n is a, c, g, or t
  misc_feature (179)..(293): n is a, c, g, or t
  misc_feature (301)..(363): n is a, c, g, or t
  misc_feature (730)..(740): n is a, c, g, or t
cccacggacaggaacttgatgatcatatagggcgctagcgtcttannnnnnnnnnnnnnnnnnnnnnnnnnnnnnnnnnnnnnnnnnnnnccgnnnnnnnnnnnnnnnnnnnnnnnnnnnnnnnnnnnnagtcgacggtaccggacatatgcccgggaattcggccattacggccgggnnnnnnnnnnnnnnnnnnnnnnnnnnnnnnnnnnnnnnnnnnnnnnnnnnnnnnnnnnnnnnnnnnnnnnnnnnnnnnnnnnnnnnnnnnnnnnnnnnnnnnnnnnnnnnnnnnntctccagnnnnnnnnnnnnnnnnnnnnnnnnnnnnnnnnnnnnnnnnnnnnnnnnnnnnnnnnnnnnnnnggtgtgtggggccgccccggggccccgggaaaaagcgcttttctaaacaccacatcgcgggtgggcgcgcgcgggggcccccaagtgagggaacggcgacacctggggccaaaagggtgttcccatagggaaaaccgggggaccaagaacacaagggcgcggggagatctctctcccacaatataaaaaaagcgcgcccgggggggagacaaccggagagggtctctgagagacaaatctcccaaagagggagagactccgagagggggccacacatcacgggggagacctctattaacaagagggagaggccaaaacggagagagcgccgcgagatatctcacaaaattacgcgccccgacacccnnnnnnnnnnnccccagacgacgactccaaacacaaagaagaacacgaacgaaaaagaaaacacacgcacaacaaaagcacacaaccagcgacagaacaacacaacagacgaacacacaagccgagagggagaggaggggcgagaagcagcagaggagcgagagagggaaggcgcagagagcgcacgaacaacgaaccaaacacacacagcacacgcgaacacagcagacagcgacagagcaccccgaagcgaagcgaacgcaggcacacacaagcaccgccaggagcagaggcgcaagcacgaaacaaaaacagcagagaacagaaaacggctaggacacacaa

SEQ ID NO: 417659 - DNA, 847 bp, Homo Sapiens
  misc_feature (51)..(95): n is a, c, g, or t
  misc_feature (99)..(134): n is a, c, g, or t
  misc_feature (184)..(333): n is a, c, g, or t
  misc_feature (717)..(728): n is a, c, g, or t
gggaaaaaacagaactttggactatcactatagggcgctagcgtctgttannnnnnnnnnnnnnnnnnnnnnnnnnnnnnnnnnnnnnnnnnnnnccgnnnnnnnnnnnnnnnnnnnnnnnnnnnnnnnnnnnnagtcgacggtaccggacatatgcccgggaattcggccattacggccgggnnnnnnnnnnnnnnnnnnnnnnnnnnnnnnnnnnnnnnnnnnnnnnnnnnnnnnnnnnnnnnnnnnnnnnnnnnnnnnnnnnnnnnnnnnnnnnnnnnnnnnnnnnnnnnnnnnnnnnnnnnnnnnnnnnnnnnnnnnnnnnnnnnnnnnctttggtgggcgcggccttgggcccttggaaaaggttttctatagaaccattctcggttggggcgcgcgcgggggccacagtaggtgtacacggtggacactgtggggcctataacgcgggtgcccaaaggggagaacccggggccatatggaactaaggcgcggggggtattctccacaccaatataacaaaaaacgcgcccggggggggcaaaaccggagagggcgttttctggaaaccaaattcccgagagaggggcgagatccacgggagaggggcctataacgcgggatatctctattccaacagcgggagagtccccaaaagggagagaacggctctcagagattatctcaaaatttttaacgcccccgagccccccnnnnnnnnnnnnaacctggggcagacaatcacaaggaggagagtgcacggatagaaacaacacaagacgcagagcgacaacaacacgaggacaactagaataggcagcacagaagaggcacgaacagacag

SEQ ID NO: 417660 - DNA, 190 bp, Homo Sapiens
tttggtggggccgcgcctccggcgccctcaggaaaaaaggtttctcaaaacaccattcgcggttgggcgcccgcggggggcccccaaggtggtgtaggtggacactgtggggcccaaaaagctggtccccaaaagaggaaaaccccggggcgccaagggaaaatgaggggcgctgggggtttccctcccc

SEQ ID NO: 417661 - DNA, 1018 bp, Homo Sapiens
  misc_feature (74)..(109): n is a, c, g, or t
  misc_feature (159)..(451): n is a, c, g, or t
  misc_feature (957)..(965): n is a, c, g, or t
aagagaggatgatatatggggctaccgtcgagccgaacgacgagcgcagcgagtagtgagcgaggaagcggcgnnnnnnnnnnnnnnnnnnnnnnnnnnnnnnnnnnnnagtcgacggtaccggacatatgcccgggaattcggccattacggccgggnnnnnnnnnnnnnnnnnnnnnnnnnnnnnnnnnnnnnnnnnnnnnnnnnnnnnnnnnnnnnnnnnnnnnnnnnnnnnnnnnnnnnnnnnnnnnnnnnnnnnnnnnnnnnnnnnnnnnnnnnnnnnnnnnnnnnnnnnnnnnnnnnnnnnnnnnnnnnnnnnnnnnnnnnnnnnnnnnnnnnnnnnnnnnnnnnnnnnnnnnnnnnnnnnnnnnnnnnnnnnnnnnnnnnnnnnnnnnnnnnnnnnnnnnnnnnnnnnnnnnnnnnnnnnnnnnnnnnnnnnnnnnnnnnnnnnaggaacaaagaagtttcttgaggtggaatgatgttcacacaaagacccattttatagataattacggcattggtgaatacaattagtaaatagtcttctgaaaagaggcagcgtgataccttaagtgtttactagaattgggtctggatatgtatgtaagaatttattggcgagggaaatacggggtttcatgtgtttcaaatttcgagagtgtatgttactgttgacagtgcttatttaatatccaatggtctccaatctccatttaccttagggactgtacaggagctgtgcaagatgtatgaatggtattctttataatccacaataacatttctggtcaggatggaatcactacatgtggtcacattttcaggtaaggatgaggaagcttaggttaagtgggggtaagaacgggttggttcaggttcattgggcgaagggctttgcgtgtttaagaaggggtcacaatcgtgattgcacgtttgggaataaaattttttgannnnnnnnncccacatgttaaggctcggggatataggggcggaaggccaagggggccaaagg

SEQ ID NO: 417662 - DNA, 675 bp, Homo Sapiens
  misc_feature (50)..(164): n is a, c, g, or t
  misc_feature (172)..(183): n is a, c, g, or t
agtcgacggtaccggacatatgcccgggaattcggccattacggccgggnnnnnnnnnnnnnnnnnnnnnnnnnnnnnnnnnnnnnnnnnnnnnnnnnnnnnnnnnnnnnnnnnnnnnnnnnnnnnnnnnnnnnnnnnnnnnnnnnnnnnnnnnnnnnnnnnnntctccatnnnnnnnnnnnnccaaaacaacaagaaaaacagtgtgtcgggccgggcttcgggcccgggaagaaggttttctgaaacaccatttccggttggcggcgccgcggcgccccaggaggggtaggtgcgaccctggggccaaaagacgttgggccccaaaagagaaaactcctggccaaggactacgtggcctgggggttgtccccccagaaataaaaacgcgcgcccgggggcgacaccgggcggggtctgtggaaccaaattccaaagagagggacggtccgaggaggccactccgcggggtccttatcaaagcagcggagggtccagcagaacgaccccaagtatccaaaattaacgccccggccgcgggataggagaaaagatacgacgcgacagaagtagagccaagaaagatagaggaagaggaaaacgtcggaccgacaataatgaacaagcgagagagcgcaaacacaacagagacgacatcggcaaataacaagacaa

SEQ ID NO: 417663 - DNA, 705 bp, Homo Sapiens
  misc_feature (50)..(163): n is a, c, g, or t
  misc_feature (194)..(212): n is a, c, g, or t
  misc_feature (532)..(532): n is a, c, g, or t
agtcgacggtaccggacatatgcccgggaattcggccattacggccgggnnnnnnnnnnnnnnnnnnnnnnnnnnnnnnnnnnnnnnnnnnnnnnnnnnnnnnnnnnnnnnnnnnnnnnnnnnnnnnnnnnnnnnnnnnnnnnnnnnnnnnnnnnnnnnnnnntctccagaaaaagcggacacaacacacaacnnnnnnnnnnnnnnnnnnncatgttgggggccggcctcggagccctagagaaaaggtttctcctaagcccaattccgtggtgggcgcgcggcggggaccaaggtaggttttatgtcacacttggcccaaaaccgtgtgcccaaagggagaaccgggggccaagagactagggggtgtgggtttcccccccaatataaaaaaacgccgcggggggacacccgcagcgggtttgggacccaaccccagagaagggggtccgggagggcataccggggcccaccaaaagagggggcccaagggaagggccggatataaaaattaacgccccgcgcgtgaggnaagtaaaaaaacggagcgacaataatcgaaagaatcgaccgcaacgacaggaaagtgaacaaaaatgaacacaaacaccacaaaacagaagacggaaccaccaacgcgacaggaccacataataatacaacatagagaacacggcgcaacaagatacagagggcacttaaaca

SEQ ID NO: 417664 - DNA, 850 bp, Homo Sapiens
  misc_feature (43)..(74): n is a, c, g, or t
  misc_feature (77)..(112): n is a, c, g, or t
  misc_feature (159)..(168): n is a, c, g, or t
aactgatctcatatagggcgcctagcgtgtagagcgaacggannnnnnnnnnnnnnnnnnnnnnnnnnnnnnnncgnnnnnnnnnnnnnnnnnnnnnnnnnnnnnnnnnnnnagtcgacggtaccggacatatgcccgggaattcggccattacggccnnnnnnnnnnccgggcccaaaataaaagaaaggaggtaccagattccactgaagtcaaatgagaaggtgaatacaggtaagcaggttaaaaggtcagatctctgtgccaggtgagaggagggagggggatctccctggcacaggtggggggcagttaccactccctgtcccctcatgcagaacatctggcccagatgaatcaaaggatatttcctgaagacctgaagtgctccagaggaaaaaccctctccagtgagtcttctggagattcccccaattaagtggtcaatggccaatcagaccctctaatgcaaaggagggtggataaccaagcctccccacccatggttgcaggcagctctaagtgtcgtgctcttaaacacgagcccagcaccaagggaacccctgtgacccagggaagcatccagtatgaatgaatccaaaacacacagaaattgaatggccctctgcagggccacagacataaggcaagggaagagaagatacccaagagagaaacctgttgtgtatgaaaagagaacacagaaaagcaaagagatatttgaattctaaaatacaatatgaaataaaatgcaggcggtgtgcagtggtcaagctgtatccagatttgggaggcgagcaggggacagaggtcggaatcgagacatctgttaaaggtgaatccatttata
